United States Patent Application Publication US 2004/0034888 A1 - sequence listing, part 2

SEQ ID NO: 2415 - DNA, 1647 bp, Zea mays
  Clone ID: 700211827_FLI
cacgtctaatcagacattttactcagaagtcatctttgcttgccggtcccgaataaagagcagcagcgcaagaggtcggtagagcgagaagaaggcaatggcggccgagagcttccttttcacctcggagtccgtgaacgaggggcaccccgacaagctgtgcgaccaggtgtcggacgccgtgcttgacgcatgcctcgcgcaggaccccgacagcaaggtggcctgcgagacctgcaccaagaccaacatggtgatggtgttcggcgagatcacgaccaaggcgaccgtggactacgagaagatcgtgcgcgacacctgccgcgagatcgggttcacctccgacgacgtgggcctcgacgccgaccgctgcaaggtgctggtgaacatcgagcagcagtcccccgacatcgcgcagggcgtgcacgggcacttcacgaagcggcccgaggagatcggcgcgggcgaccagggccacatgttcgggtacgccaccgacgagacccccgagctgatgccgctgagccacgtgctggccaccaagctgggcgcgcgcctcaccgaggtgcgcaagaacggcacctgcgcctggctgaggcccgacggcaagacccaggtgacggtggagtacgtgaacgagggcggcgccatggtgcccgtccgcgtgcacaccgtgctcatctccacccagcacgacgagaccgtcaccaacgacgagatcgccgccgacctcaaggagcacgtcatcaagcccgtgatccctgagaagtacctcgacgagaagaccatcttccacctcaacccgtccgggcgcttcgtcatcggcgggccccacggtgacgccggcctcaccggccgcaagatcatcatcgacacgtacggcggctggggagcccacggcggtggcgccttctccggcaaggaccccaccaaggtggaccgcagcggcgcctacgtggccaggcaggccgccaagagcatcgtggccagcggcctcgcccgccgctgcctcgtgcaggtgtcgtacgccatcggcgtgccggagcccctgtccgtgttcgtcaactcgtacggcaccggcacgatccccgacaaggagatcctcaagatcgtgaaggagaacttcgacttcaggcccgggatgatcagcatcaacctcgacctgaagaagggcggcaacaggttcatcaagaccgccgcctacggccacttcggccgtgacgacgccgacttcacctgggaggtggtgaagcccctcaagttcgacaaggcatcggcttaaggttgggagtgtcactgtggacatgaggactaccttcctctggctctgctgttacctgcaagcattgctgctgctggatgtgtgtgtttgatcagtgactggctgctgctccatagaagatgaacggagagaaggatgatgaagggctttggcaatcgccgctgcaactgcaacccatgccatgccggcttagtgattgggtataatttggcttggcagcagccagcattattatgtgctgatctgttatcttttactagtttggtcgtccgatatctttctttctttttccccccttttcgactctgtactgaaactgctgagagattcgcagtattgttgtatcgtattcatatgctactgtt

SEQ ID NO: 2416 - DNA, 657 bp, Zea mays
  Clone ID: 700211848_FLI
cgagcttggggcaacagacctcctggtgcctggcgttctcccaattggctgcttcccgttgtacctgacgctgtacaacaccagcagcaaagcagattacaacgcccggaccgggtgccttcggaggtacaaccgcctggccttccaccacaacagggagctgaagcagcagcttgacgagcttcagaagaagtaccccaagacgaagatcatgtatggagattacttcaaggctgcactgcagtttgtcgtcaaccctgggaaatttggtttcagcacggctttgcaagcgtgctgcggcgccggagggcagggcaactacaacttcaacctgaagaagaagtgtggcgagcagggcgcgagcgtgtgctccaacccgtcgtcgtacgtgagctgggatggcatccacatgaccgaagctgcgtacagaaaggtcgccgatggctggttgaatggcccgtatgctcagcccccaattctcaagtcatgatcgagattactaggctgtgcgtaacaccgccgcagctgcatgctgcggctagagatatatatgaggagtgtttcaggcaatagatatgctaagttatggtaaagctatttggtctgttcattggaagatctgtataaactgcgccggtatagatatgttcccagctg

SEQ ID NO: 2417 - DNA, 1608 bp, Zea mays
  Clone ID: 700211860_FLI
tgtacttggggttggattccagctgtcaggtggagacagccaaatgaacgaactaatttggtatagctggcttggtggggtgattatcggcacaatgataggtgcaaacagtgtcctagaggaacactgcaaagctggacctcgcaatgtcgtcataactggaagcacaagagggttaggaaaagcgcttgctcgtgagtttcttctttctggagaccgtgttgtaattacttcacgaagtcctgaatcagtccttcagactataaaagaacttgaagagaacatacaggaagggttatctgttgccaaaaagaagcagaggaatattctatcgcatgccaaggttgttggtacagattgtgatgtctgtaaacctgaagatgtgaaggagttagtgaattttgctattaatgagcttggttcagttgatatttggataaataacgctggcacaaataaaggttttaggccattggtaaccttttcagatgatgacatcactcagatcgtctcaacaaacctagttggttctctactgtgcaccagagaagccatgaatgtcatgcaataccaagagaagggaggccatatattcaacatggatggagcaggttctggaggatcaagcacaccactaacagctgtctatggttcaactaaatgtggactaaagcagttccaaggatcacttctgaacgaaagcagaagatcaaaagttggagtgcatactgcttcacctggtatggtcctcacagaccttctgttaagtggttcatcgctcagaaataaacagatgttcaatttaatatgtgaacttccagaaacagtagccagaactttggttccaaggatgagagttgtaaaaggaagtggaaaggcaatcaactacttaacaccaccaaggatcttgcttgctctggttactgcatgggttcgacggggtcgatggtttgacgacgagggaagagcggtgtatgcagctgaagctgatagaattcgcaactgggctgaaagtcgagcacgcttctcgttcaccgacgccatggagatgtacacggaaaacacatgggtttccgtattctcgctctcggtggtctgtgcgttcataatcctctctagctccggtggacctcttccaggcacatgatttccagagctgtcaaactactagtagacggccatgcatatgctcattttttaccccaccaaaggcattctactaccagaagccatttgatacagcacttaatgaatggggaagaagagaaccccccacagatgtagatatataggtgcaacggagattagcagctgcctcctcgcaccatttaaagtttggctagctaacctatgtgctcatagaagggtaaatagaatttattgcgtgggcattccactgccgtacgtaagctggactatgatccgtgacttttttaaggacatgtatgcaaagttaggtgagcaggatcagagtcgacattgcctcgtgtacatgcatgtagttgtcattataatcactgtaacttctggtatcgcttgtacccttcaaaattcgaagacattatattgtgaagcgaagtggcacacaccatgtgcatatggtttatc

SEQ ID NO: 2418 - DNA, 1386 bp, Zea mays
  Clone ID: 700211906_FLI
cacctcagcaaaagaaagctagctagtactctagctatatatacatgataactagacaaggatcgtgaagtaattaatataatgacaaagtcgtcaggggcgctagatcttgctcggagcaccggagggtcgcttagcaaggaccaagtcaaatccgccgttgatcagtatgtgaagtaccacgacctccacggaggcgaacaagaatcaaggaagtcaaattacgctgatttggcaaacaagtactatgatcttgtcactggcttctacgaatatggatggggcgactcattccattttgctggcggatatccgggtgaaacttcccgtgaagccattaagcggcaccagcattttatggcactacaattggggctcaagaagggtatgaaggttctggacgtgggatgtggaattgggggacctttaatagaaattgccagattcagctcaacttcaataactggattgaccaacaatgactaccatgtctcaaggggcaaggagcacatcttttcagcaggtttgagtgagcaatgctgctccttgaagggggacttcatgaatatgccaatagctgataacacctttgatgcggcctatgcaatacaggctacatgttatgcaccggaggcacaaggtgtctatagtgaggtctaccgtgtgctgaaacctgggcagtattttgcactagatgaatggtgcttgaccgaccgatttgatcccaaaaacactaagcatttgaccaccaaggctgagattgagcttggcgatggcctgcctgacatccgtaccactcgccagtgtgtccaagctatgaaagatgcaggattcgaggtcgtttttgcaaaggatcttgctcaagattttccttgcccatggtaccagacgatggatcctaactacttttcatggactaacttccaatgcacacgcccaggacggatcatcacccgtgcaattgtcaatacacttgagttcctccgtattgccccagcaggcagcgtgggagcctacaacgtcctgacgagtgcctctgatggccttctaaaaggtggtcgggaaggtatcttcacagcgtccttcttcgtcctgggccgcaagcctctcaaggaaactgaaatagtgaacggcggcaacctttgagctgcaacatgagtatgggactatggggtcgtacttataagagctatgaatcatggccaacgtgttacgtgctgaggtgtgcttaccggtttgtcttatggctcttgcgtgtgtgctgggtcatgttcccgcagtagcatactagcatgtatctgcttcttgtgtgttgtactatgaactatctgaataaatgctgtttacgcgttgtattaatcgcaccatttcttggcaacacggctt

SEQ ID NO: 2419 - DNA, 1101 bp, Zea mays
  Clone ID: 700211923_FLI
ctcatttccactttccactgcgcctccgctgcccatcgccgtccccgaccgcagcgcaggtgaggatccaaccccaacaaacttccaggcgacggactgaggatgagtgaagaggataaggctgctgcttctgctgagcagcctaagagggcccctaagctcaatgaaaggatcctctcctctctgtccaggaggtccgtagctgctcatccatggcatgatctcgagatcggtcctggtgctcctgctgtattcaatgttgttgttgagatcacaaagggaagcaaagtcaaatacgagcttgacaagaaaactggactgattaaggttgatcgagtcctttactcatcagttgtataccctcacaattatggtttcattccaaggactctttgtgaagacaatgacccaatggatgtgttggtcctgatgcaggagcctgttgttcctggttcgttcctgagagctagagcaattggccttatgcccatgattgaccagggtgaaaaggatgacaagataatagcagtatgtgctgacgatcctgaataccgtcactacaacgacatcagcgagctgtctcctcaccgcctgcaagagatcaagcgcttctttgaagattacaagaaaaacgagaacaaagaagtcgcagttgatgcattcttgcccgcgacaacagctcaagaagccattcagtactccatggacctgtatgcccagtatattttgcaaagcttgaggcagtagattgcaagcaacaatttatctatcatgcgtcttggatcggggcgtgattttaataagccgaatcgcttgctatattgcgaaccttggaattgagaacagcgtcactagctgtgattcgctcctttctcgttaaattatcatatgaataggccaagtccatacgtttaccgtgtggcgctctgtcagtcttcgtctacccaagtagctagctgcatggagggatgtctagcgttgctatgagatggcactcgtgggtctgcgggctgactacatgggtccgttcctgtgttttccgtaaaataaaattataattctatataattgaatcatttaatttatgtgatctttttgtgt

SEQ ID NO: 2420 - DNA, 1208 bp, Zea mays
  Clone ID: 700211931_FLI
cgccaagtcgccgtcgacggccgtggacatgagcgaggtgctggcggcgtacaccaacgacgtggtgagccggtcggtgctgggctcgacgcaccggaagaaaggccggaacacgctgttcagggagatgaccatgaccaacgtggacctcctggtggggttcaacctggagtactacatcccgcggtggccgctgacggacctgctcttcaggctcgtgtgctggaaggtcacgcgccacctcaagcgctgggacgccctgctggaggaggtgatccacgagcacgtggagatgaggaagctgtccggcgacaaggagaaggagtcggacgacttcatcgacatcttcctctccagatacgaggagtacggcttcaccatggataacgtcaagtccctcctcatgaacgtgttcgaggcagccatcgagacctcatatctggtgctggagtccgccatggccgagctcatgaaccacaggcgcgtcatgaagaagctgcaagcggaggtacgggcgtacggagcggagaagaagctggacatgatcagggaggacgacctgagcagcctgccgtacctaaaggcgtccatgaaggaagcgctgcggctgcacccaccggggcccctgctgctgccgcactactccaccgccgactgccagatcgacgggtaccacatccccgccaacacgcgcgtcctcgtgaacggctgggccatcggcagagacccggcggtctgggagaagcccgaggagttcatgccggagaggttcatgcgggacggctgggacaagtccaacagctacagcggccaggacttcaggtacctgccgttcgggtctgggcgccggatctgccccggggccaacttcgcgctcgcgaccatggagatcatgctcgccaacctcatgtaccatttcgactgggaggtccccaatgagaaggaagacggtggcgggaaggtgagcatggacgagacgttcgggctgatgcttcgcaggaacgagccgctctaccttgttcctagggccgtctagctagctagttactgtgccgccgccgcctcctatccaagaatgcatgagtcttagacgtgtggcagtaataattgcgtggggtgtagtaaaataataagcacgtttgttgagttgtaatggattcacattatgtgcattcgagacaggtccaaggaattgtatctctaaagtg

SEQ ID NO: 2421 - DNA, 1058 bp, Zea mays
  Clone ID: 700211955_FLI
gcgctcctactcccacctcctcatccacacctgccaccgtcgcggagtccacgccatgggcggcatggcggctcagatcccgatcaaggacgatgcggcggcgaacgaggcggcactggagctggtgcgcaaggacaagctgagggaggtgcgcgcgggccacgacggcacgtgggcggcgcacccggggctcatcccggcgatacgggaggtcttcgagggccacctcggcgggaggccgaaccagatcggcgacgccgcagggcacgagggtgccagcgtgaaggaggaggacctcatccagccgccgcggggcgcgcgcactgtggacggtctgcggctcaacgtccgcgtgggcgtgcagtacctcgcggcgtggctggccggctccggctccgtcccgctgtacaacctgatggaggacgcggctacggcggagatcagccgcgtccagaactggcagtggctgcgccacggagcggcgctggacgccggcggcgtggaggtgcgcgcgacgccagagctactcgcacgcgtcgtcgaggaggagatggcgagggtcgaggctgaggtcggccccgacaggttccgaaaggggcggtacgcggaggcgggcaggatcttcagccggcagtgcaccgcgccggagctggacgacttcctcacgctggacgcgtacaacctcatcgtggcgcaccatccaggtgcgtcaccgtgcaagctctgaatacatgcatgcctttgtggcagtggagtcagctttcaaaaataacacatcgctgtccaatgcagccatcgaaataaggacggatgaccaacaaacatgatagacatgaacagccttgtaaagcgcactgcatattctctgctctgggacttttagtcgtgcttatgatagtacagggtggtctatgtaataaactgagcttctgttgaactctcgggaaggacaactgcacaaccctgtatgagtgtaccgagactatcttttcaccctcagaactaccgctctacaacgtgtatctttctaattttataaatcaaacttatttaacttt

SEQ ID NO: 2422 - DNA, 1144 bp, Zea mays
  Clone ID: 700211981_FLI
gtcgccgcgtgcaccagcggcggggcgccggagcgctaccgcggagtgaggctccgcaagtggggcaagtgggcggcggagatccgcaacccgttcaccggcaagaggcagtggcttggcaccttcgacaccgctggcgcggcctccgcggcctacctgtccgcctcccggagcttcgccgacgagaagcggcgccgccgcgggctgcccgtggccgcgtcctcagcagacactccggcaagcggcagcaccccgacggcttcctcctcgtcgtccgcctcgaccgctccattcgcgcacccgtcgccgtcgtccgtgcttgaaccgagcaaggaagcgcggaacacgcagtccccagaggcgacgcccgcccggccgtcgaccgactcagcgcagctgccggaggacccagagttctaccaggaccttctgcgcggcctgcagctgcccgacatcgacccgctggacttccgcgccgggctggacgctctggatctctccgatgcggacttcggcctggacgacgaacatgacctcctgctcggggacttcggggacgaggagatggagatcgacctcgacctcgacgacatcaacgacgtcttcccggagatgcccggctgcgacctcggccgcggcatggacgacttcctgcaaaccgttgatttctgcgtgtgaattaaaagggagtgtgcccttgatatgttagggttgtttggtttcataaacgagcccctgagagtgtgcttggaaaggggagatgagatatcttgggttttttccccgggcaagttggatctgctcgtgcccaggagatttcctctttgccctcatttaccccatcaggtaacacagagaaatcagtgatcactctagtgtatttacccatggccttagtgacaaagacgaaggggcagacggtcttgcagatgcaacacttgttgtcgcccatcacgaaacggaggcggacgatgcatgtggagcacacgtcgcggtgcccgcacgacccataggccacccactccagcgtatctgcgcacaccgcacaaaagtcttccatggctatctgcgcagctctaatctccgaagtccgaatatatcttcaaatctggtaagatagggatcgattctatctcgaacaggg

SEQ ID NO: 2423 - DNA, 1128 bp, Zea mays
  Clone ID: 700211988_FLI
gtttttgttttgaggaatccaaaggaactccgattagaagcacttggggaccatgtgatctcaccagatgtcagttgagctcagataagataatctcagcaagtacgcctattaattaaccaccattttcgcaatgccgtagtactgcaacactaacaaaaagaagtatatttgcttcctgcgtcattaactattccccggcccggttgaggccaagtataggaacagaccgatacttgtgaaataccaaaatacttacttacatatacatttaaatagaataaaaaaataaatcagagaaaatatcatcattaaactaaacatttcaggccttgtttgtttactaggtggattgaagtgtaacttaaactgattatagcatgtttgcttggttttattgtttttacagtgattttgtctctatggattagatctgtagcagtcaaaactggctccacgctcaccggactctgaattttggtgaacacgatattatccaaacaagacctcaagattattgacataataatatacactagcactaggttgacaatgcaatggactaatggagtaagtaagataacaaacactcgaggaagaaagggggcaatgccccccccccctttaatcctcttcaaattctatagaagcatattcaaacttctcgaaccaattgtaagatacttcgatccctcggttaagaccttagatttcgtaggggacaacacacaccggcgatgggggtggtggaggaatcgtaagtaaagaaacacacaacaacaggttgcaagggtcacctgtgagcaggacgaggagcactgcaacgaagaagcgagacggcggccaccgagttccgaaccgctccgccacggccatgaaccgcgccgcctccgcgagctcacaaggcctccaatccacacacagcaaccagatagaaagaaatgccgagagagcggtcgcccgacgaggccgcccgcgacggcgaggaaccgaaccgaaccgaaaggcgagtcgaggacgcttcacgcttgcgtgcgtgcgtcgatggcggagcctagtgctcttcgctcggtaagcgtctcctctcctcgtcgcgttgcgtgctcgcgtaacggtgtctgtctgtgc

SEQ ID NO: 2424 - DNA, 1659 bp, Zea mays
  Clone ID: 700212015_FLI
ctcagacgaaaggaccaagtgggccacggccgcggggaaggaaaccaacaaagaatgatgtggtggaccttaggaccatcctcatccactgtgcacaggcggtggcagcagatgaccgcagaactgctaatgaattgttaaagcaaataagacaccattccaagccaaacggcgatggaacccagaggttagcacattgttttgcagatggtctcgaggctcgcttggcaggcacggggagtcagctttaccgcaagcttatagcgaaacgtacaactgcctcagacatgcttaaagcctaccaccttttccttgcagcaagcccatttaagagactttcacattttctttccaatcaaacaatcttgagtttgactaaaaatgcatcaaaggtgcatatcatcgactttggcatttattttggattccaatggccatgcctaatcaggcgtctctccaagagggaaggtggtccacctgttctgcgcatcactggaatcgacgtacctcagccaggtttccgccctaccgagagaattgaagagactggacaaaggcttgcagagtatgctgagaagttcaaggtgccttttgagtatcagggaatagcgtcaaagtgggaaagcatccgagttgaggatctcaaaatttggcaaggacgaagttgtgattgttaattgcctatacagattcagaaacctgattgatgaaacagttgctgtagacagtcctaggaatagagtgctcaacaccataaggcaagtaaacccagcgattttcatccatggaattgtgaatgggtcatacagcgttcccttcttcatcactcgtttccgtgaggcgctgttccatttctccgcactgtttgacatgctagagacaactgtcccacgggatgatgcacagcgtgcgctcatagagagggaaatgtttggccgagaggcactcaatgttattgcatgtgagggctcagacagagttgagagacccgagacatataaacagtggcaggtgaggaacctcagggctggatttgtccagtctccgctaaaccaagaaattgtgatgaaagccatggacaaagtaaaagacatttatcacaaggacttcgtcatagatgaagacaacggatggctcctacaaggctggaaaggaaggatactgtatgcaatttctacatggaagcctaagaataactaggttcttggtctcacgcgaaatctctcctattccatcgatggtggcagctaattaatcagtcctgctatcttataacatttgggccttgacctgtgaacttgtctgatcaaggcaatggcttgaagacggaccatgatcaacatggaggtttgctagatttacatctgtccagccagtactctgataaactggaaaggagcagctgtagacgtctctaacttggtgttggtaccatcacctttatttaattcgtagttttcttctttccatttacttctatgaccggcctggcgtcctattaccagcaaccagatcaccgcttctagttcaaaatggctaggcaaactacctactatcttgagcttaatatttttgacttgtatccatccatgtcaaacatcagttcggttttcagcacctgcagatcagaaattccccaacgagtaagcctaaagcatc

SEQ ID NO: 2425 - DNA, 1141 bp, Zea mays
  Clone ID: 700212031_FLI
tgaaattatagagagacggaaatactttttaaattagaatctaactacaattcgatttagttcaagtcaatattcagagttctactttctggaattattcagagttcagttattcaaagttattaatagctatacttagccacccatgatgtagtcaagaaaaaaataactgaactcttctgcttataatttcaactatattaatagatattgttatcaggtgtttaaaaagaatgtggtcatcttgtgtgacatttgtgttcttaaattgttgctctgcttataaccttttttacaatgtactcatcagttctatactcgcagccaaaatctatagtgggaactcctgcatacattgctcatgaggttcttctgaagaaggaatacaatggaaaggttttatgcgtagtgtcgttaattattctacacttgacatactgtttttgtttagtgtgcatgttattattctccacttgaacaacatgtttgtttgtcaaaacattttatacacgcacgatttgtagtcatgcataacagggaactatgttggaaggttcgaatgctaaattagtcactaactctttgttactgaactaaggttgctgatgtgtggttatgcggagtgatgccatacgtgatgctgacgatcaccatccctgagataagaaaccatccatggttcttgaaaaacctcctagctgaccaaatggatgacaatacgatgagtaagcagtacgaggagcctgaacaaccgatgcagagcatgaatgagttcatgcagatcctggttgaggcgaccattccagcagttggttcacgtggactcaatcagtttctgaatgatgacattgacctcgacgatgacatggaggacctagactcagatgccggtcttgacctggaaagcagtggggagatcgtgtatgctatttgacaacattgaatactttgttgtgtcgtaggttaccaagataattagagacaaggggcaggttgttgtgcttgcaagtatctgttgcagctgttgttcatgcctgatgttgatgcctcttttcatactgttgtgtttggatggtgtaccaccagtgttttacaacagtttggcccttggaattgctattgctaaaacttggttcctctg

SEQ ID NO: 2426 - DNA, 822 bp, Zea mays
  Clone ID: 700212045_FLI
aagtttcaatctggtgagcttagctcagaatcggtttacttgtcttctgtttcaaaaaaaaaaaatagcagcagccagctccatccatcctctttcccctcctcgcttcgcttcctcggcggattcctcctccctcgaccgtccccgtccccgtccccttccggcgcgcaagctcgcccgagatggcaaacgcgagatcgggtgtcgctgtgaatgacgagtgcatgctcaagttcggcgagctgcagtcgaagaggctgcaccgcttcctaactttcaagatggacgacaagttcaaggagatcgttgtggaccaggtcggggatcgcgctaccagctacgaggacttcacaaacagcctccccgagaatgactgccgatacgcgatctatgatttcgactttgtcactgcagaagatgtccagaagagcaggatcttctatatcctatggtccccatcctccgccaaggtgaagagcaagatgctttatgcaagctcaaaccaaaaattcaagagtgggctcaatggcattcaggtggaactgcaggctactgatgcaagtgaaatcagccttgatgagatcaaggatcgggctcgctaggcatcatcatgatcatgcatcatggacttggcctactactgtggatttgtatgccattatagacttggtgctgtgaaagactgcttgatgatttgcgggtttgttgctgtgtaaaaaaaggtcccatggctcccagaagaccatgaaggttcggatctatcatgtaattccttgttatctgccaattatgtatggactatggacatgtgttgcgctgttc

SEQ ID NO: 2427 - DNA, 1851 bp, Zea mays
  Clone ID: 700212054_FLI
ggggtattccagcaggagaactaccttgctaattggattcaggctctattcaattccttgccccctgaagattatgtgggtgcaacccttgtacttgggggtgatggccggtactttaacaaggaggctgctcagatcatcattaagattgcagctggaaatggagttcagaagatcatagttggcaggaatggtctactgtcaacacctgctgtatctgctgtaattcgtaaaagaaaagccaatggcggctttatcatgagtgcaagccataatccaggtggaccagacaatgactggggtattaagtttaactacagcagtggacagccagcaccggagacgattactgatcaaatttatggaaacacactatcaatttctgaaataaaaacagcagacattcctgatactgatttgtcctctgttggagttgtaagctatggtgatttcgccatagaagtgatagatcctgtttcagattaccttgaactaatggagaatgtgtttgacttccaacttatcaaggatttgctttctcggcctgatttcaggttcatatttgatgcaatgcatgcaattactggtgcgtatgccggacccatttttgttgagaaacttggagctgatccggactgcatattaaatggggtgcctcttgaagattttggaaatggccatccagatccaaatctaacttacgctaaggagcttgtttttactatgtttggaacccatgcacctgactttggtgcagcaagtgatggtgatggtgatcggaacatgattcttgggaaaaggttctttattaccccatcagactctgttgcaataattgcagccaatgcacagacagcaattccttatttccagtttggtacaaaaggactcgcgagatcaatgccaaccagtggtgctcttgatcgtgttgccgagaaattgaatgttccattctttgaggttccaacaggctggaaattttttggcaacctaatggatgcaggaaaattgtctatttgtggagaggaaagttttgggactggatctgatcacatcagagagaaggatggcatctgggctgttctggcttggctttccatacttgcacaccggaacaaggataagaaggtcggagagagattagtgtcagttgaagatattgctatggagcactggaaaacctatggcaggaatttcttttctagatacgattatgaggcgtgtgaatcacacagtgcaaaccagatgatggatcaccttagagatgttatggcaaatagcaagcctggagagaaatacggaaattacaccctccaatttgctgatgatttcagctatactgatcctgtagacggtagtacggtatcaaaacaaggacttcgatttgttttcactgatggatctaggattatcttccggctttcgggaaccggatctgctggagctactatccgcctctacatagaacaatttgaatctgatatctcgaagcatagtctcgatgctcaaacagctttgaagcctttaatagacctggctttgtctgtttcgaagctcaaggacttcacaggaagagagaaacctactgtcataacataatatttagatgttgttgtcctcggccataccaactgagcagcatgggccaagaattgaactgatggaaaatatgtatcattaggacaaattccgccagaataagttgttcctcggaagtgttttgagcacctccagcatcttccaaatatatctccaataagatattagtgggataacatatggcagatgttatcaaataatgtaaatatagatcgaacacgagacatgttttacgtggagaactcttgtatg

SEQ ID NO: 2428 - DNA, 1326 bp, Zea mays
  Clone ID: 700212087_FLI
ccaaacctctgtcgaaagtttcacctccggtcgctggtttcctccaatctccgtggtagttcagcgcgagcgggcggcggggtttgagctcgatggtcacttccggcgaacaatcggctggcggcgggtctgcggcgagggcgtcgaagctgcggtacccgctgcggtcggcgagcaaggggaaggcggcggtcgtttccccggcggctgatgctcctcccaccatctctgctccgcgacgggcaaaaccatcttcagatgtcagcaagagcatgtgtttagacctttctgtgaaggataattctgccaaacccccacggaggcactcaatacaaaccaagccaggagctagcccaaggccaacaccttctggaactgtgactccggtgtctggggttcggtcaaagaggtcggaaagccaggggaggtttgataccccgacatcagaagtgtccatgtccatctcaaggcgcaagttcagcacgctttcttcaatctcgtactggatgacacagatcaggctggcagaggctgcttccaagcactcggtttctctgggcttctttaagcttgctcttgaatcagaatgtgagcctttggaccggatgagggaagaactcaagtcctacgtagcacggcatggcctggcgacagaattggaggacccagttaaggacattctccaggtttatgatattttggatgattttgagaagctgaagatctctgcagagccctcacagcaaccaaaaaagtctgacaaggctgctcgtactgccacaaatgcgtcaccgaatggtaacctgaagccaaggtcactgaactctgatgctactgaaagcaaggaagctgtaaagaaagagagcattcagaaagtaaatcctggtgcaaggatcagaggctcctgtaacaggaatccagtcaaaaacaccaccgcaaaggaagcagttgccaagaacaccggtaaggaaaccaagaaaggggccaagggtcagcaggaagttagcgaggctccgtcagcccttccaaatcaggaatctgctgatgttgtgaaggagatcacccatgaagataaagagaacatgggcgatattgaaatggcagtggatgttgccgtagcccaagatatctagaacagccggaccaacttcagattcgatccccttttttttctatcgctgaagatgaagtgttagcgtgtggttgcttattttggttttcgattgttaatatgttattagtagagcttgtctgtgtgattgcttgctggctggaccttgaagggtcttcaggagcgtgtcataagttgatgattgctttcattcc

SEQ ID NO: 2429 - DNA, 627 bp, Zea mays
  Clone ID: 700212127_FLI
ggtcatccacactaacgaacgaactgaggtcgacgacgactgatcgagcagcgacgatggcggctgtgctgaacagcaggaagacgccgcaggtggttgccgtgctggtggcggcggcgctgctggcgtcgtccgcttcggcggcgatcacctgcgggcaggtggggtcgtcgctggctccgtgcatcccgtacgcgacggggagggccagcgcgctccccgcgtcgtgctgcagcggcgtcaagagcctcaacagcgcggcgcggaccagcgcggaccgccaggcggcgtgccgctgcctcaagagcctcgccaacagcgtcaagagcgtcaacatgggcaccgtcgccaccatccccggcaagtgcggcgtctccgtcggattccccatcagcatgtccaccgactgcaacaagatcagctaagttatacgacgaccaagctaataagcctaccgaacgtacacgtacgtcccgcgcgctgcacgagtgatgaagccagggaagaaataaaataaagctagctgtattgccaggagcagcatgcagtatcgatctatatatatactgtactgtagtactctattatatatgtatgtgtggcctgcagtgcgagttgcttcgatcc

SEQ ID NO: 2430 - DNA, 1023 bp, Zea mays
  Clone ID: 700212153_FLI
gaactttgcatttaaggactacttcaagaggttgttcaacttcaagaaggatagggatggctattggaagtggtttgctggcaacctggcctctggtggtgctgctggtgcttcctctttgttttttgtgtactccctggactacgcgagaacaaggttggctaatgacgcgaaggctgccaagggaggaggtgaaaggcagttcaatgggcttgtcgatgtctaccgcaagacactcaagtctgatggtattgctgggctttaccgtggatttaacatctcctgtgttggaatcattgtttatcgtggtctgtactttgggctctatgattccatcaagccagttgtccttactggcaacctccaggacaatttctttgccagtttcgctctgggttggctgatcactaatggtgctggtcttgcatcttaccccatcgataccgtccgcagaaggatgatgatgacatctggtgaggctgtcaagtacaagagctccttggacgcgttccagcagattcttaagaaggaagggcccaagtccctgttcaagggtgctggtgctaacattcttcgtgccattgctggtgctggtgtgctttctggctatgaccagctccagatcctcttcttcggaaagaagtacggctccggcggtgcttaaatggagaaatatgatgacgaacaagagcagtgtgtgttcccggtcctttccaatcaggatctggtgaagtttttgcctttcatatcgaagaaattaataattcatgtagagggaggattcttccaacaatttgttttggatggagacttagatctccaaacactcgtaactatcctactaggtggtgacatcggtccccaaaaacatttatggtcatagagtctgcccttcgtttgtcagtcgggcaatttttcttgcatacaatgccttcgtttaagtatcggatgagttgctgcgactaattatttgtttgtctttaccttttgcaatgcttgattgttgatagcattgtttttgtc

SEQ ID NO: 2431 - DNA, 1796 bp, Zea mays
  Clone ID: 700212184_FLI
agagaaagcaaagatgcataattggcttgactactatcagctgagatttgaaaggaatgcatctaaaaggcctactactaagactggttttcttggttgttttggtacgaaggtggatgccattgaatactacacatcagaaattgagaggatagaaaatgaagaagcagaagagcgtgaaaaaaaattgtaaaggatcccaaatccattgtaccagcagcatttgtttccttccgatcacgttggggtgcagcagtttgtgctcagacacagcaaaccagtaacccaactgtttggttgacagaatgggctccagaacctcgtgatgtgtactgggataatttgtctattccatttgtctcccttacagttcgaaggctgataattgcagtggcattcttcttcctgaacttcttttatgtgttcccaatagcatttgttcagtctcttgcaaatcttgaagggattgagaaggcagcgccgtttctgaagcctctgattgaagagcatactattaaatcattcatccaaggtttccttccgggaattgctctgaagatcttccttatattgctcccaagcatattaatgtttatgtctaaggttgaaggattgacctcaatatcttcactggagagaagatctgcatcaaagtattatattttcatattcttcaatgtgtttctggcaagcattattgcaggatctgctttagagcagctaaaaagctatattcatcagtcagcaaatgaaataccaaggacgattggtgaagcaattccaatgaaggcaacctttttttataacatatacaatggttgatggttgggctggggtagctggtgagatattgagattgaagccactagtgatcttccacctgaaaaactttttcttggtcaagactgagaaagacagggaagaggcaatggaccctggaagtattggttttgactcaagcgaacctcaaattcagctgtatttcttacttggtcttgtctatgcggcagtgacaccatttatgctcccttttgtattggtattctttgggtttgcgtacgttgtataccgccaccagataataaatgtgtataatcaagaatacgagagtgcagcagcattttggccaagtgttcatggacgcataatcacagcgttgattgtatcacagctgcttctccttgggttacttagcacaaaaggcgctggccagtcaacacctgtgctccttgttcttcctgtagtgaccttctatttccacaagtactgcaacaaccgctacaaaccgacttttgtgaaatgcccattgcaggaggcgatgaagaaggataccctggaacgtgccagagagccaggatttgacctcaaaggatacctaatgaatgcctacatccacccggtgttcaaaggtgatggggacgacgacaagttctcagtcgctgatgaaccagaagccgagcaagtcctggtggcaaccaagcggcagtccaggcggaacacccccgtgcccagtaaatacaacgggtcggaatcaccttcgcttcctgaaattgtaaatgagcaacggctataaagatgtctacagttttcctatgtatattaaggatacaataatgcttttgaatgcctccagttaatactagtaaaagcagtgatggccaacatattcatgcgtgtggttctttgtcctcctgtgccaattgttttggattatttctttcacacttgtgatatatggtcatgtagaatattgtttgtatggtagactgtattgtttatatattaaattttgaaat

SEQ ID NO: 2432 - DNA, 2515 bp, Zea mays
  Clone ID: 700212223_FLI
gtttgggcaggcggagacggacaccgacgaggtctacgcgcagatcatgctcatgccggagcccgagcaaaccgatgtgccggctgagaagccgagttctgcacctgctgcgtcgccgaggccagcagtcaggtccttctgcaagacgctcaccgcctcggacaccagcacacacggtggcttctctgtgctgcgccgacacgctgacgagtgcctccctcccctggatatgacccagtcgcctcccacacaggagctggtggcgaaggatctgcatggcatggagtggcgcttccgccacatctttagagggcagccaaggaggcatctccttcagagtggttggagtgtttttgttagttctaaaaggcttgttgctggtgatgccttcattttcctcagaggagaaaatggtgaacttcgagttggtgttaggcgggcaatgaggcaattgtctaatgtaccttcttcagtcatatctagccaaagcatgcacctcggagtccttgcgactgcatggcacgccattaacacgaagtccatgttcactgtctactacaagcctaggacgagcccttcagagttcatcataccgtacgatcaatatatggagtcggtaaaaaataattattctattggcatgagattcaggatgaggtttgaaggagaagaggcgccagagcagaggtttactggtacaatagttggttgtgaaaatcttgacccactatggcctgattccagttggagatacttgaaggtgcgttgggatgagccttctactatcccgcggccagatagggtctctccttggaagatagagcctgcttcatcgcctcctgttaatccactcgtgcattcttctagagcaaaaagacctagacaaaacgttcctccaccttcacttgaatcatctgttctcacaaaagaaggtgcaaccaaggtcgaaatcgattcagctcaaacacaacaccaaaattcggtcttgcaaggtcaggagcagatgaccttgaggaacaacctgactgaaagcgctgattctgattccactgttcagaagccgatgatgtggtccccatcactcaatgggaaagcccacactcattttcagcagagacctgctatggataattggatgccattgggaaggcgtgaaaatgacttcaaggacacccgttctgccttcaaggatgcccgcaccgcctctcaatcatttggagatacacagggtttttttgtgcaagcttatgatgacaatcatcaccgtctctctttcaaaaatcagggttcaactcatcgcttcgcagatccgtacttctatatgcctcaacaatcgtcagtgacggttcaatcaagcacaaggacacaaacagcaaacaatgacttgtgtttctggggtgaccagaatgctatgtacggcaatccaagtgaccaacaacagggtttcaactttggacaaaacccatcaagttggttgaaccagccatttccccaggttgaacagccacgagtggtcaggcctcatgcaacggttgctccatttgatctggagaagactagagaaggaagtggcttcaagatttttgggttccaagttgatacaaccagtccatctcctgtccaattgagctctccattgcccgctatccaggagcatgtgttacaaactcgaccatcggcaccggtgaatgaattgcaacctgtgcaaattgagtgcttgcctgagggatctgtaagcacagctggaactgcaacggagaacattcagcaagccccgcagagttcaaaagatatccaaagcaagtcccagggtgcttcaacaaggagctgtacaaaggttcataagcaaggagtcgcacttggcaggtcggtggacctctctaaattcaccgactacggcgaactccaagcagagctggacaagatgtttgacttcgagggtgaattggtatctggcagccaaaactggcagatcgtctataccgacgacgagggcgatatgatgcttgtgggagacgacccgtgggaagagttctgcagcatagtgcgcaagatctacatctacacgaaggaggaggtccagaagatgaactcgaaatcagctgcgccaaggaaggaggaatctccggcagcgggcggcggaggaggttgcgccgccgccacaaacgagtagtatggtggtttgctcttggtggcaagttgaggccaaggttttactactgctattgttattgctgatttgctctccccgccttccggtgtaaatatctgtgtgtacccagtcccggccttgtgctagtaagtagcaagcagtgttaccttttggtattttaaccagcagctaagttcgcggcattttagtccctgtaagcggtaagcagctctgtagcgtgagatagatggccaagcgccggtacgtacgtgtagtgtctggtcttctcactgagtgtactataaagagttaatataggagctgaccctgtgaacccgcgtgatggatgcatatgcttagtgc

SEQ ID NO: 2433 - DNA, 879 bp, Zea mays
  Clone ID: 700212261_FLI
ctcccctccactgcgcctctccgtttccgccatggctccggccgccgccttcctgtcggcgtgcgccgctggttccattccccgtgcgcccttcctgatcccgaggcctcttcttctcccaattccgctctcccctgcgcgctgggaccgctcccgcagctgcagcctctttggcgtaggcgccaacactcgccgcgcgccaacccttcgacggaacgcctccacggagacggtggttccctacgtgccgggctctggcaagtacatagcgccggactacctcgtgaagaaggtgtcagccgaggaggtgcaggagctgctgagggggcagaggaaggtgccgctcatcgttgacttctacgcgacctggtgcgggccctgtgttcagatggcgcaggacatcgagatgcttgcagttgagtatgaggacaatgccctgtttgtgaaggtggacacagatgatgaatatgaatttgcaaaagacatgcaggtaagagggcttccgaccctttacttcttcagtccagaccaaaacaaagatgccatacgcaccgaggggctaattcctatggatatgatcagaaacatcattgacaacgagttatgacagctgatagatcactgtattaggaacataggcaatgttttatctttgtagcagaaaattttttgtcatgaggctaagcattaccgctaggtgctagtttgtgtgcttgatgttttcttttgctccaatggtaggtttcatctgtgcaaatccattctgctgtttctgtatcgtgttgtttattctcatcaaactctaggttgtgtcgtgctgttgtcggttaggcctgtgtgaccattttcatccctcgaatgataagatggctttggctc

SEQ ID NO: 2434 - DNA, 642 bp, Zea mays
  Clone ID: 700212274_FLI
gtgctgcgtccaccagcctcgtcgttaggacgtaaggtaagacagccaggggtcagccagtgagtactgactgagtagcccgaagctcagagcaagcgggtgccaactgccaaggggggtgatggcgctgtctcgacgcatggcggctcccgtcctcgtcctcctgctcctcctcgtcgccacagagctggggacgaccaaggtggcggaggcgaggcactgcctgtcgcagagccaccggttcaagggcctgtgcatgagcagcaacaactgcgccaacgtgtgccagaccgagaacttccccggcggcgagtgcaaggcggagggcgccacgcgcaagtgcttctgcaagaagatatgctagtagtagcctaggctttgcttgctggcacaagcaggtcgtcggcacgcaacgcaattcaagcatatcggtcctcctcccgcgttgctgtctactcgatcccgttttctctttcgatcgatttcgttgtttcatgttgctttcttctgttcccgccaataataagctccatgggatctcactgttgtactttctgcatccgttggtagtcaggacgatccttcttcccgctgtcacgtgtgattcaaaatggatctaataatgcaaccgttcgttcttcc

SEQ ID NO: 2435 - DNA, 2452 bp, Zea mays
  Clone ID: 700212292_FLI
tcaaactcgctactggcctcgggcccgcccgtcgtgaggtccgagctcgatgcagccgatccggcggcggcaccgaggctttgcactcctctgtctctccgccgccctcctcgctgccgccactctgctccccggcgccgccgtcgccgaaggtgtcacgccctccgaggcgcgccggctccgcgacgaggtgaaagatatgttctatcatgcgtttgatggatacatgaagtatgctttcccactcgatgagctgcggcccttaagttgccaaggtgaagactcccttggtggttatgcgctcactcttatcgattctttggataccttggctttactgggtgataaggagaaatttggtgctgctgtggagtgggttggtaagaatgtccactttgatattaataaaaccgtctctgtttttgaaaccaacatacgtatccttgggggtctgctatcagctcacctgattgccagtgattatgccactggtatgagaatccaatcttatgatgaccagttacttcatttagctgctgacttagctcagaggttgttgcccgcatttgacactcctacaggtattccatttggatctgttaatttattgtacggagtcgatgaaaatgaaagcaagataacatcaacggctggtggtggtactttgacactggaatttggcatattgagtcgcttgactaataatactgtttttgagcgagttacaaaaaaatcagtgcgtggaatatggtcacgcagatcaaaactcaatcttgttggtgcccatataaatgtctttactggtgaatggacacagaaggatgcaggaattggcacaagcattgattcattctatgaatatcttctaaaggcatatttattgtttggagatgaagaatacctgtacatttttcaggaggcttacaaagctgccatgcactatctccatcatgatccttggtacgtggaggttaatatgaactctggtgctactgtttggccactcttcaatagtctgcaggcattctggccagggcttcaggttttagctggagatgttgatcctgctattcgcacacatgctgccttcttcagcgtctggaaaaagtatggttttacccctgaaggttttaatcttgctacatccactgtacagaatggacaaaggagctacccgctacgaccagagttgattgaaagcacatattggttgttcaaggctaccagagattacagataccttgatgttggaagggacatattagcaagccttcaatatggtgccagatgcccttgtggttactgccacatatcagatgtggaaacccacaagcaggatgatcacatggagagttttttccttgcagaaacggtcaagtatctctggcttctttttgatttagctgctggccctgacaatattgttgaaaatggaccatataagtacatatttagtacagagggccatttgttacctgttactcctgagatagccttggaagatgaacattgttcatattttggagcattctgtaatggcggtgccgaccatggatatggtgctagtgctagttctactaagcatcgaaatggaaactatacccaattagatgatattcaaaccccttccagtcactattcaatgtccaatgtgttgtttacgccaggttacatcaagggagtttgtccaggattgactcatgcgcagaaatttgggatatcatactctgatgaagaggataactttatagagcagacttctgagagtcttgatcatcatggtgaatctgccatagaatctagcgtccaagaccaatcaagttctattatattgatctctcacccagtcgcaagccaacaggatgaggcttttgagagcgagtctggaagtcaagatcatgcaaatattgttgtaacttctgattctgattctgattccacaagccgtgataatactgttggctctcccggaatgaactcggaagaacttatggacgacatatagggcacctctagacaggacaaaagatgaagaggttgctcacagtgttgagtccaagatatcagctgaccctttgctcatgtagcaacccatttctgtggaatcttcagggtcaatggcttgccgaatgcagaacaagttagcaagcaagcaaaatgtctggtagacgattccagtatcttgccagcttcaacatcggaaattgatatttactttcagatagaatatattacagggcgtacattcactaatttgttcttttttttctgtatcgatcactaatagatattattttgattaatagagaatgcacgagttttgtacaccagatgcatatgaagaggcgcggcacacatcacaggatctatttagtgtagaacagaacagcaaacgagttttagcgtgtatcttacaagattttagattcgaaaaaatcaaggatttgaagct

SEQ ID NO: 2436 - DNA, 3216 bp, Zea mays
  Clone ID: 700212293_FLI
ccgagtccatgctcagggcgcagatgagctacggccgcggcggcgacgcgcaccccggcttcagccccgtccccaacgtgccgctcctcaccaacggccagatggttgatgacatcccgccggagcagcacgcgctcgtgccgtcctacatgagcggcggcggcggcgggggcaagaggatccacccgctccctttcgcagatcccaaccttccagtgcaaccgagatccatggacccgtccaaggatctggccgcctacggatatggcagcgtggcctggaaggagagaatggagggctggaagcagaagcaggagcgcctgcagcatgtcaggagcgagggtggcggtgattgggatggcgacgatgcagatctgccactaatggatgaagctaggcagccattgtccagaaaagtccctatatcatcaagccgaattaatccctacaggatgattatcgttatccggttggtggttttgggtttcttcttccactaccgagtgatgcatccggcgaaagatgcatttgcattgtggctcatatctgtaatctgtgaaatctggtttgcgatgtcctggattcttgatcagttcccaaagtggcttccaatcgagagagagacttacctggaccgtttgtcactaaggtttgacaaggaaggtcaaccctctcagcttgctccaatcgacttctttgtcagtacggttgatcccacaaaggaacctcccttggtcacagcgaacactgtcctttccatcctttctgtggattatccggttgagaaggtctcctgctatgtttctgatgatggtgctgcaatgcttacgtttgaagcattgtctgaaacatctgaatttgcaaagaaatgggttcctttcagcaaaaagtttaatatcgagcctcgtgctcctgagtggtacttccaacagaagatagactacctgaaagacaaggttgctgcttcatttgttagggagaggagggcgatgaagagagaatacgaggaattcaaggtaaggatcaatgccttggttgcaaaagcccaaaaggttcctgaggaaggatggacaatgcaagatggaagcccctggcctggaaacaacgtacgcgatcatcctggaatgattcaggtattccttggccaaagtggcggtcgtgatgtggaaggaaatgagttgcctcgcctggtttatgtctcgagagaaaagaggccaggttataaccatcacaagaaggctggtgccatgaatgcactggtccgtgtctctgctgtcttatcaaatgctgcatacctattgaacttggactgtgatcactacatcaacaatagcaaggccataaaagaggctatgtgtttcatgatggatcctttggtggggaagaaagtgtgctatgtacagttccctcagaggtttgatggtattgacaaaaatgatcgatacgctaacaggaacgttgtcttttttgacatcaacatgaaaggtttggacggtattcaaggacccatttatgtgggtactggatgtgttttcagacggcaggcactgtatggttatgatgctcctaaaacgaagaagccaccatcaagaacttgcaactgctggcccaagtggtgcctctcttgctgctgcagcaggaacaagaataaaaagaagactacaaaaccaaagacggagaagaagaaaagattatttttcaagaaagcagaaaacccatctcctgcatatgctttgggtgaaattgatgaaggtgctccaggtgctgatatcgagaaggccggaatcgtaaatcaacagaaactagagaagaaatttgggcagtcttctgtttttgtcgcatcaacacttcttgagaacggagggaccctgaagagcgcaagtccagcttctcttctgaaggaagctatacatgttatcagctgcggctacgaagacaagaccgactggggaaaagagattggctggatttacggatcgatcacagaggatatcttgactggatttaagatgcactgccatggctggcggtctatttactgcatcccgaagcggcctgcattcaaaggttctgcgcctctgaacctttccgaccgtcttcaccaggtccttcgctgggcccttgggtccgtcgaaattttcttcagcaagcactgcccactttggtacggatacggcggcgggctaaaattcctggaaaggttttcttatatcaactccatcgtttatccctggacgtccattcctctcctggcttactgtaccttgcctgccatctgcctgctcacggggaagtttatcacaccagagcttaccaatgtcgccagtatctggttcatggcacttttcatctgcatctccgtgaccggcatcctggaaatgaggtggagtggcgtggccatcgacgactggtggaggaacgagcagttctgggtcatcggaggcgtttcggcgcatctgttcgcggtgttccagggcctgctgaaggtgttcgccggcatcgacacgagcttcaccgtgacgtcgaaggccggggacgacgaggagttctcggagctgtacacgttcaagtggaccaccctgctgatacccccgaccacgctcctcctgctgaacttcatcggggtggtggccgggatctcgaacgcgatcaacaacgggtacgagtcgtggggccccctgttcgggaagctcttcttcgccttctgggtgatcgtccacctgtacccgttcctcaagggtctggtggggaggcagaacaggacgccgacgatcgtcatcgtctggtccatcctgctggcctcgatcttctcgctcctgtgggtccgcgtcgacccgttcctcgccaagagcaacggcccgctcctggaggagtgtggcctggactgcaactgaagtgggggccccctgtcactcgaagttctgtcacgggcgaattacgcctgatttttttgttgttgttgttggaattctttcctgtagatagaaaccacatgtccccggcatctctgctgtgtccatggcatctctgcgttttttttgaaccgaagacagtccatgtctgatgctcctgctgctggttggtggtggtggtggcaaggcaggcagggattgatattgatctgcaagccactggagcaggagagagaggtgcctgctgctgtttgttgagtaaattaaaaagttttaaagttatacagtgatgcacattccagag

SEQ ID NO: 2437 - DNA, 605 bp, Zea mays
  Clone ID: 700212331_FLI
caaagatctttgccaaagtcagaggatgggagactgagaatattgaggagattgctttgaagatctctcaacttcctttggcttcaggcaagcaaaagaggattgctgtgattactcaaggtgctgatccagtggttgttgctgaggatgggaaggtgaaaacgttccctgtgatcctattgcccaaggagaagcttgttgacaccaacggcgcaggtgatgctttcgttggaggcttcctctcacagttggttctaggcaagggcattgaagactgcgtgagggcaggttgctatgccgcaaacgttatcatccagcgcccgggctgtacttacccggagaagcctgacttcaactagtgcaaaaactgaggcacgtcatgagagggactgttataggcacacttaattgttaaccagtgcgtggttcggtgtctacacaccctgtattcttccgaggcttctcttctgatccggccaatatttttgccgtgaaatttgtgttctgcgactatggacgtctcctttgtcgctgtataaggcatgatttgccatcattctgttgcttcggtgatgcttgcaatgcaatgagaatgtgttggaacg

SEQ ID NO: 2438 - DNA, 2410 bp, Zea mays
  Clone ID: 700212365_FLI
cggaggaggaaaacccgccctgatactgcaagttgtgggactgcttcaattgaggacaaaatcagcaattatctactgttgagccttattggaatctgtgctaatttgaactctgataatgttcagcattcaaatggccaggagttgctatccactcttttgaagaacctagggtctgttgccaaatcactggagccaaaagaactatgtaaactcctggaggcataccaaagcctgcaaaatggatcaaatgctggaacctctggaacagctaatgccacagaagaggctgcagggccatctaactctaagttgcctttcgtgaatggtagtcattgtggacatgcatcatcatctgttgtgccagtacagtcgaaggctaccatagtggtaactccagagcccgcatcatgcaagcttaaggattttgatctgaatgacacttgtaatgatatggaaggctttgaggatcgacaagaaggttcacctacacctgcctttaagacagctgactctcctaattgtgcatcatggatgcagcaagattctactcaaagtccaccgcagactagtggcaactcagattcaacatcaacacaatcattgtcaagctcaaatggagacgctcagtgccgaactgataagattgtcttcaagctttttgacaaagttcccagtgatttacccccagttttgcggtcacagattcttggttggttgtcaagtagccctactgatatagagagccatattagacctgggtgtattattctaacaatatatctacggttagttgagtctgcatggcaagagctttctgagaatatgagcctgcacctggataagcttttgagtagctccactgacaacttttgggcatctggcttggtatttgtgatggttcggcgtcgcttagcttttatgctcaatggtcaaattatgttggacagacccctggcacccagttctcatcattactgcaagattttatgtgtcaaacctgttgctgcaccttattctgcaacaataaatttcagagtcaaaggatctaatctactcagtacttcctcaaggctaatttgttcatttgaaggacgttgtatattccaggaagacacagactctgtagcagaaaatgatgagtatgaggatagggccatcgaatgcctcagtttttgttgttccgttcctggtccaagaggaagaggatttatagaggttgaagatagtggttttagcaatggcttcttccccttcataattgctgagaaagacatatgctttgaggtttctgagctggagagcatatttgagtcctccagtatcgaacatgcagatgctaacgataatgccagggaacaagctctggagtttctaaatgagctgggttggcttcttcacagagcgaacagaatgtctaaagagaatgtaactgatacatctgtagctacctttagcatgtggagattcaggaatcttggtgtatttgccatggagcgggagtggtgtgctgtgatcaaaatgctattagatttcttatttattggccttgtcgatgtgggatcccgatctccagaagaggtggtgctttcagaaaatttgttgcatgctgctgtacggaggaagtctgttaacatggttagatttctgctgagatacagaccaaacaaaaactccaagggaactgcacagacatacttatttagacctgatgctctgggcccatcaatgattacccccctccatatagcagctgccactagtgatgcagaggatgtgttggatgtgctgaccgatgatcctggactgattggaattagtgcttggagcaatgcacgggacggaacaggttttaccccagaagactatgctcggcagagaggcaatgatgcttacctgaatctggtccaaaagaagattgataagcatcttggcaaaggccgtgttgtcctcggtgttccgagcagtatatgctctgtaataactgatggtgttaagcctggcgatgttagcctcgagatctgcatgccaatgtctgcatcagtgccaggttgcctcctctgcagccgtaaggcacgggtgtatccgaattctacatcgaggaccttcctttacaggccagcgatgttgactgtgatgggagttgctgtggtctgtgtctgcgtgggcatactcctccatacctttcccagggtttatgccgcgcccacattcagatgggagttgctggagcgtggacccatgtaagttttaggatgagccttagctgttgtttgtaacttgtaagttgagagttttagcgttgtggctaagatcaaaggaacatgattaccgtgtgaagaagttcatctgtgtttaacgcaagatgctgttgcggctgtaagctttatatacatcgtcgatttcaact

SEQ ID NO: 2439 - DNA, 1560 bp, Zea mays
  Clone ID: 700212431_FLI
ggtttggtggttacctccaaatgtttggaacaaggggtgtgggtttgagtgctcgctttgcattattttttgcacggtgtgtttgggttgagctttgcactattttttgcacggtatggtaacacggagggtgaagccgtggtatcaccaggtgcccacattaggttcttaatagtttagtatagatataaatatagatatagatttgacctcatattctgattatatgttgcacaggtgctaaaagaaagctttaaaatttattgtgcaataaatgatggaatcataaacctcgttgataagttttttgagatgccaagacatgatgcacttaaagctcttgaaatctacagaagggctggccaacaggctgggaatctatctgatttctacgagaattgccggggattagaacttgctaggaattttcagtttcccactctgagggagccaccacaaacatttcttgctactatggaggactatgtgaaggaggctccacgcatggtcccagttcgagaacccctggaacttcctgagaggctgcttcttacatacaaacctgaagaatcagaggaaattcttgagcctgctcctgttgaagaggaaaaagcaccagttgaagaacctgttcttgtaccacctgttactgaagttgtttcacctcctcccaaggctgaggtgcccgatactggtgacttactgggcttagatgatacaaatcctgctgtatcagctatagaggaaagcaatgctcttgccttggctattgttccaacagatggcgcttcaacaactggtaacactgcatttcaagaaaaggggtttgatcctacaggatgggaacttgcccttgttactgcaccaagcaatacaacttcatctacttctgttagtcaattgggtggtggactcgacaagctcattttggagagcctttatgatgatggggcctacaggcagaggcaacaacaacagctgtatggttcagcagctcctaatccattcatggcaaatgatcctttcgcgatgtcgaatcaagttgctcctccaccatcagttcaaatggctgccatgtctcagcagcatcagcaaatcccaacgatgatgcaaccaaatccctttggaccacctatgcatccacaggtgagcatggcccctgcaacaaacaatccctttctggatgctggcttcggggcattcccagcggcgaacaacggccatcagcaacacaacccatttggcagtgcccaacttctgtaggtcacttagtcacaagagcaaatttgtgccccagcagatgcgatttttgtgtgattatatcatgcattgtgctggacctttcttgcatgcgacgcgtgtattatgttatggcttcaccacacggagagctgtgcctatgtcgtgatccaactcttgttgtaaagaaattagtcacctgtgtaacatccaatatatgtcaataaacagtaggcagtgttattacatctataaacaaaagaacagtggaatgtaggaaattcttaatattgtttattccattgctgtttatcttcttgg

SEQ ID NO: 2440 - DNA, 1655 bp, Zea mays
  Clone ID: 700212432_FLI
cgatcgcggggctcaacccgctgtgcatccagctcctgacggagttccccatcaggagcaagctggacccggaggtgtacggcccggcggagtccgccatcaccaaggagatcctggagaagcacatgagcggcggcgccgccatgaccgtggagcaggcgctcgcggcgaagcgtctgttcatcctggactaccacgacgtgttcctgccctacgtgcacagggtgcgcgagctgccggacacgacgctctacggctcccgcaccgtcttcttcctcacggacctgggcacgctgatgccgctggccatcgagctggtgcggcccaaatcgccgacgcagccgcagtggaagcgggtgttcacgcacgggcccgacgccaccgacgcctggctgtggaagcttgccaaggcgcacgtggtgacccacgacacggggtaccaccagctggtgagccactggctgcgcacgcactgctgcgtggagccctacatcattgccgcgaaccggcagctcagccggctgcacccggtgtaccgcctcctgcacccgcacttccgctacaccatggagatcaacgcgctggccagggaggcgctcatcaacgccgacggcatcatcgaggagtccttctggccgggcaggtacgccgtcgagctcagctcagcggcgtacggcgccacgtggcagttcgacacggaggcgctgcccaacgacctcgtcaagcgtgggctcgccgtgcgccgggacgacggcgagctggagctcaccatcaaggactacccctacgcgcacgacgggctcatggtctggaacaccataaggcagtgggcggccgactacgtcaacgtctactacaagtccgacgaggccgtcgccgccgaccccgagctgaaggcgttctgggacgaggtgcgcaacgtgggccacggcgacaagaaggacgagccgtggtggcccgtgctcgacacccgcgacagcctcgcggagacgctcaccaccatcatgtgggtcacctccggccaccactcggcggtcaacttcgggcagtaccacttcggcggatacttcccgaaccgcccgaccaccatccggaagagcatgcccgtggaggaggaggcgggccgggacgaagagatgaagaagttcctgaagcagccggagacgaccctgctggacatgctgccgacgcagatgcaggccatcagggtgatgacgacgctggacatcctctcgtcgcactcgcccgacgaggagtacatgggagagttggcggagccgtcgtggctggaggagcccatggtgaaggcggcgttcgagaagttcggcggcaggatgaaggagatcgagggattcatcgacgagtgcaacaacaacccggagctcaggaaccggtgcggagcagggatcgtgccgtacgaactgctcaagcccttctccaagccgggagtcaccgggaggggcatccccaacagcatctccatttgacccgtccgtcctctccatccaatgggggtttgccttattgcgtgcacgctagctagctgcttggaaataaaaataattaaaataaaaggtctcgtctgtactattgtattgtaccatggatcatatcgtacatgttgtgtcaatgcaaagaggcacgtttgagttacc

SEQ ID NO: 2441 - DNA, 1290 bp, Zea mays
  Clone ID: 700212444_FLI
aagtttattaagcgcattctcgatcctaaccctgataccaggataaaaattgcagaaattttggaagatgaatggttcaaaaaaggctataaaccaccacattttgaacaaggcgaagatgttaaccttgacgacgttgatgctgcattcaatgattcagaggtattatatagaccaaatgttcattttgaatctacgactatcttgaaaatctttccagctttccagaaatattacgtgctttaaaagcatttttacattctattttatgttcacattatcgttcaggttcatagctgctataatatgaacttttttgtttcttcttttttggaaggccaggttgagaaattctaaggacttgatgacacaatagatttcttgttctttttatggctactcaaatgtctcattgtttttatagtgtatataggattcccttgaatatctgattggtgaacattgcagttaaccgataattaattgtaacatacatgactccagttaatcggtcacctttcaatttttacattttaggaccgtcttgtagcagagaaaagagaaaagccagaatcaatgaatgcatttgctcttatttcgaggtcacagggcttcaaccttggaaatttgtttgagaaggagatgatggtaaatttctcatagctttgaatctattatgtcatgtttggaatgtagtaaagattagttacaattatattggagaagtctggtctctggcgttgattgcccacttctgtaaatctcagtcttggtcagggaacaaaatgagtactttcgctgcaaatttttcttgatttcttgctaatgcatgcctttcctgaatagggaatggtaaagagggaaacatctttcacgtctcaatgtacagcacaggagatcatgtcaaaaatagaggatgcatgtgggccacttggtttcaacgtgcggaaacaaaattacaagatgaaattgaaaggtgacaaatccggaagaaaaggccacttatctgttgcaactgaggtttttgaggttgctccttcacttcacatggttgagcttcgtaaaaccggaggagacacattggaattccacaatttctacaagaatttctcatcagagctgaaagatatcgtgtggaaagctgaatctgatgcaagtatgaaacagacgaagtgacacccagggaatctgtgtaacttatgatgtcacattgtgagatagaccaccacctcgggtgataccgcttgtttggtactgtatgttttttttactggtaccacattggcaatc

SEQ ID NO: 2442 - DNA, 791 bp, Zea mays
  Clone ID: 700212481_FLI
agattcaggaagctctcaggtccctaaacgagtacaaaagatcaagggaactcgatggcgtgagctactacgattccttcaagctccaacgtgaggtgcatgacttcaatgcaaacgtgaaaaggctagagctagctggcctctgggacgagatagtggagatgctgcggaggcgtgagctgccggacggcttcgaggctcgtgaggagtgggtgagcctggggaccttgttccgtcgcctggtcgagccgctggacatcgccaactactaccggcactccaagaacgaggacaccggctcctacctctccaaggggcggccgaggcggtacaagtacacgcagaagtggcacgagcagctgcagcgcgttcccgtcgggtccagcctcgagtcctgcttctgggcggtggtcgaggagctccaggccgagatggccgacggtagggcgttcgaggatctgagagaacggttggttaaacttgagaacgatgcgcatggctggtataattctggaagtttgggcaaggacgtgtttctggggagctcgtctttcgtggcgtggtggaggacgctcccagagcagcatagggcggcgtcgagcattgcgaaacttgtatctctataaagggattttggctgaggaactagcgtttctagatctttgtaattatgctgctctatatgtacttcccaagttcaataagaagactagcatagttcttagggttcgtttggatgtagatattgaagatgttagaattaaattatatcaatatcaaatatgtctagt

SEQ ID NO: 2443 - DNA, 1070 bp, Zea mays
  Clone ID: 700212502_FLI
ctacaacaccgagcagcgagaaggggttggtgtccagcacgaattgaatcgtcgccagaagtcatggcggattcggccacttcccgtccaaccgttctcgtcaccggcgccggcggccgcacaggccaaattgtctacaacaaactgaaagagaggtctgagcagttcgtggcaagagggctagtcaggacagaggagagcaagcagaagattggggcagccggtgatgtttacgttgcggacataagagacgcggatcgtctagcacctgctgtacaaggtgtggatgcgctcataatcctcaccagtgctgccccgaaaatgaaaccgggtttcgaccctagcaaaggtggacggcccgagttctactacgaagacggaatgtaccctgaacaggtggattgggttggccaaaagaatcagatcgatgctgctaaagctgctggagtgaagcatattgtgctggtgggatctatgggaggaacaaatcctaaccatccactgaacagcatgggtaatggcaatatactggtatggaagcgcaaagcagaacagtatttggcaaacagtggaatcccttatacaatcataaggccaggaggtcttcaagacaaggacggaggagtgagagagctacttgtggggaaagacgatgaacttctccagactgacacaaagtcgattcctagagccgatgtggctgaggtttgtgtccaggctctgcagtacgaagaggccaagttcaaggcatttgatttggcctcaaagcctgaaggtgtgggcacgccaacaaaggactttagggcactgttctcccagatcactgctcggttttgagcgagctgctgagaagcctactcgagttctagattttatggtgtcacaatccattttatcgtgggcttgtcctcgagatacaaccaggtagcttgttggagctgcggtttggtgcaattgcaagctgtattaaaactgaagaaagaaattggtgcattgtttgcttgtacagtgctgaatgtctagttgccaattgtgtgaactgttgacagccattaaaacaagttatttgg

SEQ ID NO: 2444 - DNA, 967 bp, Zea mays
  Clone ID: 700212508_FLI
gatgcattttagcgaagtcaggtcggcgtatgccaaatgtctcgttaagacaccgctgcagtgcagactgtagagtgcagactcgccgagtacgactcctcacgaactagtccgtttccgtgcgctgctgctgacgagggagtgggagggatcatggtggcgccggacgtgaaggcggagacgatgaagctgatggatcagcggggtgccctagaggcggagatggacgccatcatcgcccgcctcactgcggcaggcggaccgggcatcaccggaggcctcgtcgacgccgagggtttcccaaggtccgacatcgacatcccgaacgtcctcgcccagcgccggaggcttgctgaattgcgaaatgaccacaaggatgttacaaacaaaattggtaaaaatcttgaggttttacactcagcaaagttatcaaggaatgaacaatcaacctcaaggagatctgatacaacagatccttcacactttggatcatctcaaagtgaacctatggaagaggaccatgtgactggacttccttttgccatgattgatgaaatcgctgatggttctcctgcttctgtggatggtttgcaacttggagatgagattgtaaagtttgggaatgtggaagctggtgatcagttgcaggaaaggctcatgtctgaagctctttccaatgaggacagtcaagtatctttagtcatcattcgccagggatcagtggtgaatttaacaattacaccaaggaagtggcatggaagaggacttctggggtgccatttccgaatgctatgaagagcccatcgttcttcagcaggatcgttggtctatcgatgtcatttcagcagcaaagtgaactgatttaaccgaatgtgtgacatcttccaaaatactggttgcgtgtacttaacttgagcgcttgaaacatactggtgtaccaggcggtgttgagacattttacttgtac

SEQ ID NO: 2445 - DNA, 2005 bp, Zea mays
  Clone ID: 700212558_FLI
ttaaagcaagagcacttcatgatcttgggaaagataaagaagctgcacaagaatgtagaatgatattggatattgtggaagcagctgtacctgagggcttgccagcaggctttgggaaaggctgtaaattgaacgaaataatatgcaaggctgtagagttgctccctgagctgtggaaatcaggggggttttcacttgaaaccatttcttcatataggaggtcacttcttaataattggaatcttgatggagagacaatagcaaggatacaaaagaaatttgctgtttttctcctatatagtggttgtgaagcacgccctccaaatcttcattctcagttggacggttcatttgtacctcgcaacaatattgaagaggctatccttcttttgatgattcttttgaggaagtccaatctcaagaggattgagcaagatccctctgtgatgcatcaccttacttttgcactgtccatgtcaggacagctaattccactggctggacagtttgaagaattgttacctggtgtgttagacaaaaaagaatggttgtacagcgttgcattgtgttatttagcagaagaagatgatctgagtgccctgaatctactcaaaattatactaaaatctggagaggactccgttcaactcatagaactgcttctagcttcaaaggcttgcattgagatgagtattcatactgaaggtgctttttatgcaaggagagccattgcaaatatgcagggaggatgcaaaccaatggcaggacttgcaaacctattgcttggtgttgcactttctaatcaggctagaagtgcaatatctgatacagatagagcttcttggcagtgcgaagcactggaagcccttgggaatgctgaaaaaaatatacatgggaaagattctagggcattatacagtctcagccttgaaaatgctgtgcagaggaaattagaattagctgccttttatgcaaagaggctggtgaaacttgaggctggatcagagttgaggagttggctccttttagctcgaatacttagtgctcaaaagctgtttgctgatgctgaaacagttgttgatgctgctctagatcaaactgggaaatggtgtcaaggagatttattgcgaaccaaagccagaattcaggctgcacaggggcaatttagagaagcggttgaaacatacacccaacttcttgctatcattcaacttagaacgaaaagtttaactgctggagtttgcttgccaaagggcaacaaggatgataaaggcctggaaacagagacctggtatgatctagctctcttatacctaggtatggcacaatggagggatgcagaggtttgtgtattgaagataagatccatcagtccttattctgcattggcttggcatgctacaggaaaaatatatgaagcaaaaggtcttagaaaagaagctttgggagcttttttcagagccttagatcttgatcctaaacatgtcccaagtttaatatcaactgccactgttctacaacaacttggtgacaggccattgccttctatacggtgcttcctgactgatgcattacaactggatagaactaatcatgttgcgtggttcaatcttggccttctttacaaagaggaaggtggcaggtcagcagctgaggctgctgaatgcttccaagctgctgcttttcttaaagaaactgcaccttcagaacctttcagatgacatctacaggggctatagatgtaagctgctgtatgtatttttgatatatttcactgatgaaatagtggattacagagttctaaaaatgatcttcttgggagatcacagcattggaaactgttggaaaaaatgtttaacaattcaatctatagttccaattgttgcctgtatagcaacaagaaagacgatgatcttcgccttgtgtaggaacagtgcttactgtgatatatatatatagatagatgaccagtacattgtgtatcttgagtaaaatggtttcacat

SEQ ID NO: 2446 - DNA, 1478 bp, Zea mays
  Clone ID: 700212580_FLI
cctgtctatctctctcccatattctctaaactttttctctttaattcactaatgtagtctaacatcaattaaaccaaactccacggcgccgccctgccggctggaacaccaacacacggaccaaaaccaccagggcacgccaacgaccccagacgcgacagaaacccagcccacaaaagacgcagagcccccaaacaccacggaaaacaagggaagcaaagtgggggaaggggaagaaacaaaagaaaagaaaaaaaggaaagaagaaagaaaaagaaaagaggagggagaagaaaaggaggaggagaaggaaggaaaagaaggagaggaggaagggagagtaaaagagaagaaaaatttttttttttacgcgtgggcggacgcgtgggtgaggcttttgcaggcagagctaagattgtgcacattgatattgatcctgctgagattggcaagaacaagcagccacatgtgtccatctgtgcagatgttaagcttgctttgcagggcatgaatactcttctggaaggaagcacatcaaagaagagctttgacttcggctcatggcatgatgaattggatcagcaaaagcgggagtttccccttgggtataaaatcttcaatgaggaaatccagccacaatatgctattcaggttcttgatgagttgacgaaggggaaggccatcattgccacaggtgttgggcagcaccagatgtgggcggcacagtattacacttacaagcggccaaggcagtggctgtcttcagctggtcttggggctatgggatttggtttgccggctgctgctggtgctgctgtggccaacccaggtgtcactgttgttgacatcgacggagatggtagcttcctcatgaacattcaggagctagctatgatccgtattgagaacctcccagtcaaggtctttgtgctaaacaaccagcacctcgggatggtggtgcagtgggaggacaggttctataaggccaatagagcacacacattcttgggaaacccagagaacgaaagtgagatatatccagattttgtggcaattgccaaagggttcaacattccagcagtccgtgtgacaaagaagagcgaagtccatgcagcaatcaagaagatgcttgaggctccagggccgtacctcttggatataatcgtcccgcaccaggagcatgtgttgcctatgatccctagtggtggggctttcaaggatatgatcctggatggtgatggcaggactgtgtattgatctaaagttcagcaagcactgcctacctgcctatctttgacatgcatgagctagtacaagtgtgatatgtttttatcaatgtgatggtactctgttatggtaatcttaagtagcatccaaccctgtgtgtagtatgttgttttcgtgttggcatatgtttcagaagccatcatgtaagtgccttttactacatataaataaggtaataagcattgttatgc

SEQ ID NO: 2447 - DNA, 1685 bp, Zea mays
  Clone ID: 700212586_FLI
gtgctgtctggatgcctgatgagaccaggagcacgatgatcttaacacatcagctgagggaaagggatataatggacccacagaaacactcgattcctattgatgatccggatgttcaagaaataaaggcaaccaaggatgcaaaagttcttggcccagattcggcgctaggggtttctagccgaagcaagcatgaagcagggcctgtggctgcaataaggatgccgatgttaagggtgtcaaatttcaaaggagggactccggaagtgatgcagacgagctatgctatcttggttctggttttgcctaatgatggttcattagggtggggtcgaagagagttggagattgttgaggtagttgctgaccaagttgcagtcgctctgtcacatgctgcactcctagaggagtctcagctgatgcgagagaagcttgccgagcagcatagggacttgctgcaggcaaaggatgaagccatgagggcaggggacgctaggaattccttccagactgcaatgtacgatggaatgcgaaggccaatgcactcaatccttggtctcgtctcaatgatgcaacaggagagcatgaatccagagcaaaggcttgtgatggatgccattgccaagacaagcagtgttgcatccacactgatgaacgatgtgatgcaaacatcgacaatgaactgtgagcacttgtctttggtcaggaggccgttcaaccttcattccttcattaaagaagttgttggagtggtcagatgtctaactggttgcaagggtgtggagtttgagtttcaagtggagaattctttgccagaaaggatcattggtgatgagaagagagtcttccatattgtcctgcacatggtaggcactctaacagaccgatgtaatgctggctgtatctcattatatgtaaatgtccataatgaggttgaagataggcataatcatgactggatgctgcgaagagcaaacttctctgggggctatgtatgtgtgaaatttgagattaggattagaaaatcaaagggctatctgttgagttcatcaagcagtcagataagtcagggatccaaacccaacaattctgagatggggcttagcttcaatatgtgcaagaagattgtgcagatgatgaatggcaatatttggtcagtatcagattctaaaagcatcggagaaactatcatgctagtcctccagttccagttggaacctgtgactccggtctctggagcgtcctcagatttgtacagatcatccgcaattcccaactttaatgggctcagagtcctccttgcggacagcgactgcaccaaccgagctgtaactcacaggctcctagagaagcttggttgccgagtcctttcggtcgcttctggcgtccaatgcatcagctccttcgctgcggagtcgtccttccagttggtggttcttgatcttgacatgcagacgatggatggattcgaagtagcccgcgcgatcaggaagttcagtagcaatagttggctgccgttgattattgccctagcagcaagaatcgacgacaacatccgggatcgttgccagaggtcaggagtaaatggcctgatccagaaaccggtcacattagccgcgctgggagatgaactgtatagagtccttcagaacaattaaaagagcctgacggttctcatttctttc

SEQ ID NO: 2448 - DNA, 1281 bp, Zea mays
  Clone ID: 700212615_FLI
ggcagtgactcagctcagggcctcgggcccagcacaccaaccctccagtagtatctctgacgtgcgggctccgccagacaacgagctcacgagtcacgatccaaatcccttttccactccgccggacgtcgagagaggcggtgggtgcgggacgcgaaggcgaagccctagccccctccctgccgcggacgccgatggacccacctcgcgccgtcgcctttcttctcatactcctgcccgtgctcgccccggtggcctccggtgtacctttcgtcgtcctacacgggattggcgacgagtgcgggaacgatgggctgtcatccttcaccaagatgcttggggagtggtcaggctccaagggttactgcattgaaattggaagaggagcatgggactcttggttaatgccacttcaagagcaggcaaatacggtttgtaagaaggtcaagaaaatgaaagagctcagtgaaggttacaatatagttggcctgtctcaggggaacttaattggcagggctgtaatcgagtactgtgattgtggacctccggtcaagaatttcatatcaattgggggtcctcatgctggtacagcttcagtgccactttgtggttctgggtttctttgtattcttattgatgatctgattaaatcagagatatattcagactatgtgcaggcgcatcttgcccctagtggttacctaaagatacccactgatatggaagattatttgaagggttgcaaatttcttccaaaacttaacaatgagatcccaagtgcaagaaatactacctataaagaaagattcagcagcttggaaaacttggtactgatcatgtttgaggacgatgcagtattaatacctcgggaaacagcgtggtttggttattaccctgatggagcctttagcccagtgctgccccctcaagagacgaagctgtatacagaagattggattggcttgaagaccctggacgaggctgggcgtgttaaattcgtgtctgtgccaggaggtcacctgcgtatcaccagaagcgacatgaagaagtacattgtgccttacttgacgccggaggcgtcatccaagaagaacatacacatacaccggatgctgtcgctttgagcgagtatctaacaaggtttgtatcggtggccattgtgccctgacacgtgggccatgtgttgacgccttgtaaatacgctgaacacgaagggaggaaatgatagctccttggaagagtggatccgaacttgtgaagtgaagcgtgtttggtcctttc

SEQ ID NO: 2449 - DNA, 1253 bp, Zea mays
  Clone ID: 700212644_FLI
gaacagctcgccgcggctccgaatggcaacttccccgaaccccgcgacgattcaccgagccggcgcccagtgacccttccagaagcttccagaaggtcaccgccatggccgcgcccttcttttccactcctttccagccctacgtctaccagagccagcaaggatctgtgacggcgtttcagatatccggtggagatgtgcaggtcctgcaggtgatgctgaagtctcaggagaagctgactgcaaaaccaggtacaatgtgctacatgtctgggaacatgcagatggacaacaattacttgcctgaaaatgatggaggcgtgtggcagtggatttttgggaaacgtgtaagcagcaccattttctttaattctggatctgatgatggatatgtcgggattgctgcaccatttcctgggaggatactgccggtagatctaacaaactttagtggagaacttctttgccaggcagatgcttttctatgttcggtcaatgatgtctccgtctctagtacagttgagccaaggccacggaatattgagattggtgcagagatgatccttaaacaaaaacttaggggccaggggatggcttttcttgttggtggtggatcagtcatgcagaaaatccttgctcctagagaggtgattactgttgatgctgcttgtattgtggctatgtcggccaccattaacttccagttgaagagccctaaccagcttagaagagcagtttttgggggtgataaccagctaacagcatctctcacgggaccaggtgttgttttcattcaaagtctgccattccatcgactctcacagagaatagccagtagatcagtggcaggcccaagcttgagggacaacccaaagttcttcatccagattgtcatgttcttcttcctggcctatgttatgattgtatcatccataattctgacagatgtttaggcgattcagtgagcttttggtgtattcctagacaagttatcgaagagttaaagctacctccccaatgttaatgtagatgtaagagaacgaatttcacaaactgttgttagaaaccttagccgaaggttcttcgatttttttttttctaacagtttggaggggggcgggtttcttggttagcgtgtaaagagtaagacagcaaaatcaagttgcacagcgtatggtgaatatacagtaattttcctcctctaaactggtgcgatgcattttgaataattgaatcagtgatttggcttgagc

SEQ ID NO: 2450 - DNA, 846 bp, Zea mays
  Clone ID: 700212664_FLI
ggaagaggcacatctcctggaggaccttgcttcaatggacagaaaatttgctgaacattataatgtcttggagcaaattcttgctgtgcttatacagtttgttaaagacaagaaattggagcatcagcaccaatttgatgatctgaagaagacctggcttatcaaaaggtgtcggacaatgaatgctaaactaagctatttggagcatcatctattgcgtgacacttacaacaaggacacagtaccagcactgcacaggatcaggaagtatcttgtagaggccacaaaagaagcatccaattcttataatgaagcggtttcgcggttgcgtgagtaccagggcgtagatccacggttcgatgtgattgcgaggcagtaccacgagattgtaaagaaactggagggcatgcagtggacaattcaccaggtggagatggacctgaaacctcaccatgatcacgcagctgtttaagtccacatctgttggagaccatgtttattacctgaatgcagcgggtgtgagttaggggggttgcagtggatgtgatttgtgtcagagggtttctgtttgtgcatgtttttttttgtgtgtctatccatgttggataatagcaccatcaaagcttgcttagttatacggtcatgtattcggtttgtttgatgacgagaaacactagaagagagcgagacatggaaaacaccagaacaattatcattgtactatccatccactgccatgtcatacaaaacaaggcaagtctagttgacttttattaggaatcctaatggctataatggaacgtagcagccaagatgaaggcttcgtccggaggcatctgttttgcc

SEQ ID NO: 2451 - DNA, 1525 bp, Zea mays
  Clone ID: 700212728_FLI
ctgagtgtgccggagtggtattcgtgttccgccgggtgccgaggtggcctcgcggtcttctgccgtctcatcgtcgcctgctccccgtcgcgttcatcccgaggcatatcttggtcttgtaattgtataaaaagaaggtttggggaatcaggtttatctaaccagtggacatggtatcagttaatcttgggttagttcattatgtactggaccacatatatggaacacttcttcatcgcaccaaactaggaacaccatttttctcaaaaggatggggaggtaccaaacttgatttgctagagaagatggtgaagcagttgtttcccgaggcacgttgccaaaactggccaccaactgctgtgcagccaatgtggaaaacagtatgggagacaaacaattcttgtctgcgagaaggagttttcaggactacatgtgatgagcgactaatcgatgcattgccacctgagagtcacaatgcaagagttgcttttcttacccctaaaaatgttacacctgagaagatgtcatgtgtggtccatcttgcaggcactggtgatcacacatttgagcgcaggcttcggctgggtgggcctcttcttaagaacaatattgcaactatggttcttgagagcccctattatggacagcgacgtcctagcatgcagcgtggtgcaaagctccagtgtgttagtgatctgttacttctagggaaagccacaattgatgaagctcgcagtctcctgtactggctgcagaatgaggctggttacggcaagatgggcatatgtgggctcagcatgggtggagtacatgctgcgatggtgggatccctgcatcctactccagttgccacactgccatttctcgctccacactctgctgtggtacctttctgtgaaggggtctacaaatacgccacagcttgggacgctttgagaaaagatgctgcagtattaactcaagatgtaacacttttggcagaagatgctgcacagaaaagcgggatcaccatcgaacaagtcagggataggttacggtcagtgttgtctttgactgatgtcactcgatttccagtcccaaagaacccacaggcggtcatctttgttggtgcaacggacgatggttatattcccagacattcagtgatggagctccagaaggcatggccaggctcagaggtccggtgggtaacaggtggccatgtctcctctttcttcctccacaacgatgcattccgcaaggccatcgtcgacgcccttgatagattgtaacaccagaaggtgagagagaggccatccttgtgatggcactttatgttgtgtgacatttctgaacttggggttgcggcatgagctgaaccctctgtaactgccaacctaactgctcttagtgacgctgagattggaggtagggtggctgtacatgacaattgtagaatgtagcaccccattatttggcaattgttctgcaaaatatttgtttgtcaccatgtatcaatttgaatgctacatcttctgattgtctg

SEQ ID NO: 2452 - DNA, 846 bp, Zea mays
  Clone ID: 700212756_FLI
cgaccaaccctctcccaacccgactagtcggactcgcagctccgccccaagtccaggtccaagcatggaagtcgcggcggcgtcggcgaggcccgtcctgcgcgtggctgccatctgcggctccctccgcaaggcctccttcaaccgcggcctcctccgcgccgccgcggaggtgtgcgaggactccatcccggggctccgcatcgacgagctcgacatctccgacctgcccatcatcaacaccgaccttgagaccggcagcggcagcggcaccgtcttcccgcccgccgtcgaggccttccgcgccaaggtctgccaggccgactgcttcctcttcggcgcgcccgagtacaactactccatcgccacccccctgaagaacgcacttgactgggcctctagaggaaagaactgttgggcagacaaagctgctgcgatcgtgagtgcaggcggtggctttggaggagggaggtcgcagtaccatctccgtcaggtcggggttttcctggatctccatttcatcaacaagccagaactgtgcgtccaagccttccagcagccacccaagtttgacagcgatggaaatctggtcgatgctgaaatcagagagcggctcaagaaagtgcccctatcccttcaggccttcacgctcaggcttcagaaggaggactgaatcaactcggtaccattgtagtacgtgcttccctgagaagcgtttattgctcttggaagtttgtaacgcgttgctgggtggcctggaagtttgtaataaatccaagaagtgttctcgctgaatatttaagatttgatcgcatctatatataataaagattgtgttctagcgtt

SEQ ID NO: 2453 - DNA, 2139 bp, Zea mays
  Clone ID: 700212771_FLI
cggagggtgagatcaccggcccgctcctcgcgtcgggcgccggcgcgccggcgccggaggcggtgcccccgtggcgggagcaggtgacggctcgggggctggcggtcagcgccgtcctgggggtgctcttctgcctcattacgcacaagctcaacctcaccgtcgggatcatcccctcgctcaacgtcgccgcggggctgctcggctacttcctggtccgcacctggacggcggcgctcgagaggttcggcgtcgtctccaagcccttcaccaagcaggagaacaccgtcattcagacatgcgtcgtcgcctgctacggcctcgccttcagcggggggtttggaagctatatgcttgcaatggaccagagaacctatgaacttatcgggccagattatcctggcaacagggccgtggatgtcaagactccttcactgggctggatgattggattcatgtttgttgttagcttccttgggctgtttagtcttgttgcactacgcaaggttatggtaattgattacaagctgacttatcccagtgggacagccacggctatgttgataaatagtttccacacaactactggagctgagcttgcagacaagcaagtcaggtgtcttgggaagtacttgagcattagttttatatggaactgctttaaatggttcttcagcggtgttggagattcttgtggtttcgataatttcccttctttgggacttgcagcatttaagaatacgttttattttgatttcagcccaacctatattggatgtggtcttatttgtccgcatattgttaattgttctacacttcttggtgccataatatcgtggggtattctttggccatatatctccacaaaagctggggactggtatccagctgaccttggaagcaatgacttcaaaggactctatggatacaaggtttttatatctgtatctgtgatacttggggatggtctttataacctcatcaagatcatttatgctactatcaaggaaataatgaatgcacgggctaagcaaggaagactgccactagcccaagttcaggatggcgatgaaggttcaaatttatcagctgaggaaaagcatctgaatgagacattcataaaggacagtatccctccctggttggcaggatctggttacattggccttgcagcaatatcgattgcaaccgtcccaatgatctttccgcagatcaagtggtaccttgtcctctcggcatacgttgttgctcccctcctcgctttctgcaactcatatggcactggactaacggactggaatcttgcgtctacatatggaaagatcggcctcttcatttttgcatcatgggttggtcagaatggcggtgtgattgctggcttagcagcctgcggtgttatgatgtccatcgtgtccactgcagccgatctcatgcaggacttcaagaccggttacctcacactctcttcccctaggtccatgttcgtgtcgcagttgatcgggaccgcccttggttgtgtcattgctccactcaccttttggctctactggtcggctttcgatattggtaaccctgacggcgcattcaaagctccatatgctgtaatcttccgtgagatgtcaattcttggcgtggaagggttttctgcactgcctcagcactgcctagcgatctgctcgtttttcttcattgcatctctagtgatcaacctcctcagggacgtcaccccaaagaatgtctccagattcatcccaatcccgatggctatggccattcccttctacatcggtgcgtacttcgccatcgacatgtttgttgggacagttatccttttcgtctgggagagggtgaaccgcaaggagtgtgatgacttcgcaggtgcggttgcctctggcttgatctgtggtgatgggatctggactgttccttctgcgatactgtcaatccttaggattgacccgccaatttgcatgtacttcaagccatcccttagcagctaaagttgggacaagtgttatccattttctgtatatcaaaataggacctaattgtgtatatctttaatttactacatgtaaactgttctaggaagaaaagctgtagcctaatgcaatctgttgattcttatttgcgtatgat

SEQ ID NO: 2454 - DNA, 880 bp, Zea mays
  Clone ID: 700212773_FLI
ctccctccccgtcccgtctcccctctcgccctaggggccggggggctagggtttgcttcaccgccggcctccccctccgacgcggcaccggcccccgcgcaccgggcccggatgctatgctgctgagctgcaggaccctctccacctgggtgcgccgcctcgtcgcttgcatgggagcagaggttgctttggatgctgtgctaagccaactccaataatagcagtagacgagccttccaagcggttgaggatccaggggcgatcagtaaggaaggctagcctctcggaggacttttggagcacgagtgcgcatgagatggagaacagcgggatccaatcgcagaggagcatgtcttcgatcagcacgttggctcagtccagcgatcagcatgcgtcaggaagttgcagcaacccgaatgagtttatgaatcaaggtcttatgctctggaaccagaccagacaacagtgggttggaagcaaaaaacgccactctagatctcaacagcctcgagaaccaaagttgagttggaacacaacgtatgaaagtctgctaggaagcaataagccattctcccaaccgatacctcttggcgaaatggtagatttgcttgtggacgcttgggagcaagaaggcctttatgattaggcctgtggagttcattatttgactcggattaatcgcttaatgcagaagctctaggttctcaagcgttatattttctgagcacaatggtgtaccatggatgtatcatgaaacatggcagcatccttatattaagcaattgtaatatattattcctgtcaagcttatgagaacattggatgacattgtacctggtgtttttatatgaaaactttgggtgatctaggcaactggatt

SEQ ID NO: 2455 - DNA, 2024 bp, Zea mays
  Clone ID: 700212780_FLI
caagagcaagatcatcaatgcaccatggcaggcaaggtcaacattttcctctccatggctctgagtttggtattatgaagatgggtaatgggaggtcaaggtttagatccaagtatatgtccactgaagaacttgaaaacattttaagaatacagcatgccgccactcatataaatgatccatacatcgatgattattaccatcaagcttgtctggccagcagatatgtggatgcaaggtcgaagcaccgcttctgcccaaccttgattcgtgatccatcatcctgtacacggagtaaggatgagccacatgcataccttaaggttgatgcccttgggagactgccattttcttctgtacggagaccgcgtccactccttgacgttgagccagcttctgcaactgatgatgacaccgttatttcaaagcctcttgatcaggaacctctgctagctgctaggatcacgattgaggatggactctccctattacttgacatagacgatattgaccgcttgcttcagtttagccagcagcaagatggtggttttgaacttaaaaatagaaggcaatctctacttggtcagctggcagaatcgctgcagttggttgatccactaggtgcaaataaaaacacacatctgtccgcaaatgatgatttggtatttcttcgcattgtttctctacccaagggccggaaactactttcacgctatatcaatctcatggtacctggtagcgatcttgcaaggatagtttgcatggcagtattcaggcacctgaggtttgtgtttggaaatctgccctccgatgacggcgcagctgagacagtaactaaactggctagcgctgtagcatcatgcattcgtgggatggacttaagtggcctcagtgcttgtctcgcagcaattgtatgctcgtctgagcacccaccccttcggccccttggccatgctgccggcgatggtgccactgtcgtcataaagtctgtcctggatagagcaacagagctcctcaccgagcagcctgccgcgccagactatggcgctccaaaccgagccttgtggcaagcgtcgttcaatgccttctttgggctgctcactaagtactgcatgagtaagtttgacagcatggttcacacgatgcacaagctcggtgctgctgctgcaacagcgatacgcaaggaacttccggttgagcttctgcgcgccagccttcctcacacggatgagcagcagcgcagactactgctcgagttcgcccagcggaccgtgcccgtctctggccatggctccgacgggtgacggacggaggggcggctggtggaaccatggcatctgaaacaataccagcttaaggtggtcagcgaatattggtgcgctagatgcggtattttattctatcatacgcagacctgcccaatgaatcgagcgttccttgagctgcagttcagatgggcatgccggcgttaagtggatgtatgtcccaggtttggatccgtctgtttaggctaatagtattctctctgcacggttgcatcgcatcaccactggatagattagcatgattagcttccgtctgcagggctgtgtttcgttggctctgggtgggaacggaacccccctgcacgttccttgaaggcaattgcaagaaaatactgcgagctgttggtgtttcggtttgcagtgtttgtttgtagtggcgtcaaggcttccaaggttctcatctcatcactccggacgggtgccaggaagatgtggtttaacacatgtataaactagcaaatgcttggaaggttgatatttggttctgtagccagccattcgaagattgttgggtggggggttttgtttcctgttatattcgcaactgaatacattatcttgcgaagctgttcagtctgtaacgagttcattgggaattccactatatatccttgttatggatggtcaggagctttgtatttttgtgattctgggtattacccttgtgttccataaaggacgctttcttcctcgctcctg

SEQ ID NO: 2456 - DNA, 867 bp, Zea mays
  Clone ID: 700212795_FLI
gctcacctagaacctactagaaggcgaaccaacccgcacattcacttctcttcccatccgtacgaactcgcagatcagagagaccgaggcgcccgcggttctgctttccttccttgccccgttcacgagagaagtttctggagtcttcgactcgagcagggttccgatggcgctgcaatggatgatcctggcgtgcgtggtggcggtggaagctgcggtggctgcgctggtcacgctcccggtgccccgcgctgtgcggggccagatcgtcgcgctcacgtccttgttcctgcagcccctgtccagtgtgatacccttcgccgccttccagatcctcgatctctactggaagaaggagcacagactgatgtgcacctcggagatttgcaccgccgaagagcgcattcgcttcgagaaatctatgtttaaagctcagagaaatgtcattctttgtgtttcagcatgtctcctttattggtgcatttatcgtattgtaaaattgaacaaggatattaaggctttggaagagaccgagaagcgcctcaaggaagagtagatctattgtgttttaaggtggctgttgtctgctcctggtcttcagaagatattgttaaaatatcatggttcataggatatctagtgtatagtcttcttgcagcaaagaagataatgttttgctgtttcagcaaacatctgaagtatgagtcttattattaagaggtcttttctttaacttatggcgagtttagcatcggtcagttatcaaacagttaaagcgttttctgaaatcttgtttgaatatccgcagtcctttttttggtttggcatgccgaattattctgaaatgtttagtacccctttgttcgt

SEQ ID NO: 2457 - DNA, 1857 bp, Zea mays
  Clone ID: 700212808_FLI
cgccctttcccctcttctgcgactcattccggagcgcgctgcctccgatccgcggcaccgcgtcgcgtctgccgatgacgagggcgcacctgccggcggcggcgcagcggcggccgacggtggcgctgcttctgggcctggcgctcgccttctgcctcgccgtcctctccatccagtcctccttcttcgccgccccaggggcgccgggcaggaggctggatctggacgccgacgacgtgcgcgagctcgcggggttccagtcccgcgtctagcagtgcgtggctagcagaggacttggtctcacagcacatattattgatcactgcaagctggtccttaaatttcctgaagggaccaacagcacctggtataatgctcagttcaagatttttgaacctctagaatacaaatatgatgtctgtgaaactatcctattgtgggaacagtaccgcaacatgacaactgtattgacaagggaatacttggatgtgaggccggatggatggttggattatgcagctaaaaggatcgcacagcttggtgctgataaatgttacaaccacactctctgtgatgaacttcttagcattttactgcctgctaaaccccctttccatccacgccagttcgcgacatgtgcagttgttggtaactcaggagatctcttgaaaacagagtttggacaagagattgatgcgcatgacgccgtgtttcgggacaatgaggcacctgtcaataagaaatatgcaaaacatgttggattgaaaagagactttcgactggttgtccggggtgctgctcgaaatatggcaccaatactgaagggctcctccgatgaggcacttatcattaaaagtttgacgcacaaagaaatcaatgcggtgataaaggaacttccaaatcctgtctacctttttcaaggtatagttttaagaagaggtgctaaagggactggcatgaagtccatagaacttgccctttccatgtgtgatattgttgacatgtatggttttacagttgatcctgggtacacggaatggacacggtatttctcagcccctaggaaagggcacaatccactgcaaggccgagcttattatcaacttctagaatgccttggggtcattcgtatccattcccccatgagagcacagagagtggaagattggtcagacataccaagcaaagaagagatcagaagggcacacaccatagcttttcgtctaaagaagcatgaaactggccagctagctgaactggggccatttagcaactgcaaggtatggggaacagtcgacccagactacggaccggtatcaggtacttcagacatgagcgagacgcgcaagaattcaaactacagcaagtgggagttgcttccgtttgagaagctgagaagagaagcgcaagaacaccatatccaaatgggtggcgtgtctctatacaagatggacggaaacaagttggatgatcttgtctgtgtgaggcatcagcgttcatcaagttaagaccgtggccgcctaagcctagttgtttggacgctgaattgatttcatggtggatctgaaaggatgctagacagcaagagccagaagatccgatgaagcagctctgctgtacccacttgtaaaattacatgagccatcgggttcagagcgaggcagccctctacctggaatatggaattcttttattggttgttttgggacttgtagccttctaggaatagctacttaagctgtctaggggttgttatgcgcacaccacatgacatggttttcacttcttttaacacagctgtaactgatgcaaatgggtcttgccatttctcaactatgaggtgcagttttgttaccg

SEQ ID NO: 2458 - DNA, 1383 bp, Zea mays
  Clone ID: 700212862_FLI
gggctagacatctcaattaattagctaatgagcaagcggctgagctgcactcaagacaaactaccatggatcagtcaaacattagcaacaagcacatgacgatgacaaccctaatgctcctcctctgtgtcatagccattgcagattgcatttgccacgccgcagtggcagcccgggtggagccatccaccaccgtcggcagaactacaggaggagacgaggcgatgatgatggcgaggtacaagaagtggatggcgcagtatcgccggaagtacaaggacgacgccgagaaagcacaccgtttccaggtattcaaggcgaacgcggagtttattgacaggtctaacgctggaggaaagaagaagtacgtcctagggaccaaccagttcgccgacctgaccagcaaagagttcgcggccatgtacaccggtttgaggaaaccggcggcggtgccttccggggccaagcagatccctgcagctggttccaagtaccagaattttacgcgcctagatgatgatgtccaggttgattggaggcagcagggtgctgtcactcctgtcaagaaccaaggccaatgtggctgttgctgggcgttctctgcagtaggtgccatggaaggtttgatcatgataacgacaggaaacctggtctccctgtcggagcagcagattctagactgcgacgagtcagacgggaaccagggctgcaacggtggctacatggacaacgccttccagtacgtcatcaacaatggcggcgtcaccactgaggacgcctacccttactctgcagtccaagggacgtgccaaaacgtccagccagccgccaccatcagcggcttccaggacctgcccagcggcgacgagaacgcgctcgccaacgcagtcgccaaccagccggtgtctgttggcgtcgacggcggatcgagtcctttccagttttaccagggtggcatatacgacggggatggctgtggcacggacatgaaccatgcagtgacggcgatcggctacggcgccgatgaccagggaacccagtactggatcctcaagaactcctggggcacaggatggggtgagaacggtttcatgcagctacagatgggcgtcggcgcctgtggtatctccacgatggcctcctacccaactccatgaacacaaatcttcagataaagcgtagtatataccagtccatgcatatgactgcagaataaagcatggaagattaattacatgcgtgcatcaaggcatgctacgtactgtattaaaacttcggtactggccagatatatacacaaaggtagaatgtttgtgtgataatatagtaatgcttgtacgaatgcaaagaacatgacctttcaataataaataagattaggct

SEQ ID NO: 2459 - DNA, 813 bp, Zea mays
  Clone ID: 700212957_FLI
ccgtttagtgcccaccgaaatctttctaccacccacgttccggcatccatggctcgtctgttcgcggcgcgagcccttacgctggcccgcccctcggcggcgccatccgccctccgcttctgcccctcccgcgcgctgtcggacaaggtggacttcatcgagatcgacctctccgaggagtccccttcctcttcatccggaggaggaggcgcgggcgaccccgccacggttcaggcgcagatggggtcgcggcgcctggaggacgccatccatggggtgctcgtgcggcgggcggcgcctgaatggctccccttcgtgccgggggcatcctactgggtcccgccgttgccgcgggcgctcggggtggcggagcttctcagctcggctatgcacatcacgaggggcgccgaggcgatgacggaggaggaggcattgagcttcactaccgtgcgggggtggccatccgcggcgtactttgtggcaggctcctactgaagaggcagctggggacagtgaaggtcttctgatgggttgtagttataacttatagtaatagacagctagggagcccctgcaacaatggatcccctcaagctgtcaagcatcttcggatggtgtgctcacagctggtaaaatgacactggtacaatcttatgtatttgcagaacccggtgcgctagcacctggacatggtgggtgtatggtccacggaacccagccgtggcgcataatgtaatagagtttgtagtttgtagtttgtaccatattttttcctcttgaataaaggcatgtgttacgctgaacacctgtggc

SEQ ID NO: 2460 - DNA, 486 bp, Zea mays
  Clone ID: 700213002_FLI
cctggtcattttgctagagagtgcccatctggggatggtgggagaggggacagatatggtgggagagatgacaggtatggtggcggtggcggtggcggtggcggtcgttatggttctgaccgtggtggtgaccgatactctggccgtagccgagatggcggcagctatgggggtggcgatcgctacagccgtgaccgatcaggtccttactgatggccttagttcttgattgagaagtatgtgccatccaggtatgaaagtctatctactattataaggcttgttattgtgtctggaactttgttatcctgtagttggagtcgacatgtaccgtgagaaatcagctgctttgttatagaccgtattactgaccggtttattatcgtttcctgcttgccaggcatatgacttggtcatagtgcttggcgcttggatcctgcatgtttgcttgatgtgctatttggctattaaaagatggattttgtc

SEQ ID NO: 2461 - DNA, 965 bp, Zea mays
  Clone ID: 700213026_FLI
ctccctccctctccccgcgggccgccagaggcaatttcgccctcgattcgaccccgattcgtccgcccgcgaccgggattccctccgccaagcgcggatctgaacgctgcgctccgtgtcgccgctcgaatccgccatgaagggggccaaatccaagggcgccgccaaggccgatgccaagctggcggtgaagagcaagggggcggagaagcccgccaagggcaggaaagggaaggccggcaaggaccccaacaagcctaagagggctcccagcgctttcttcgtgttcatggaggaatttcgcaaggagttcaaggagaagaaccctaagaacaagtctgtcgctgcggtggggaaagctgctggcgacaggtggaaatccctgagcgagtcggacaaggctccctatgtagccaaggctaacaagctcaagctcgagtacaacaaggccatcgctgcctacaacaagggcgagagcactgcagctaagaaggctcctgccaaggaggaagaggaggaagatgaagaggagtctgacaagtccaagtcggaggtcaatgacgaggatgatgaagagggtagtgaggaggatgaagatgatgacgagtgatggagctcctcgagacaatggaccgtgcttcatccaacaatggagcggctacacaaggccccgtggcgatcacaaaaaaggagcctatatccatgtactagaattattcagtttcactccacatcgtgatgttttatttttacttttgtcgtgctataacggatagcgctcctcgttggcgccactggcgggtggttctgcctctggtctggtgtgtttgtgtgtggtcacacttgccagccagcagaggcgcctgcttgtacctagattactgtttccattgtcgtcatcatcggctaacattgtcataatgtcagtttgggtaatgttagattaagtaattattgtgttctgt

SEQ ID NO: 2462 - DNA, 825 bp, Zea mays
  Clone ID: 700213038_FLI
gggaaccgggagaagcagagggagagcagtcaccaaaccaaaaccgctctcgagtctccatccattctctccgctcatccgcagctctcgagtctccagctctagctagccttagcctcgtccaagggacgaaggggccaccatgagcgtggtgatcctggacggctccacggtgcgcggcttcgtggcggacgaggcggccttcgcgcgcagcctggacgcgcggttcgccgcgctggacgccaacggcgacggcgtgctgtcccgcgccgagctccggcgcgcgctcgagtccttccgcctcctcgacggcggcggcttcgggtccgcccagccggcgccgctccccgccgaggtcgccgcgctctacgacgccgtcttcgagcagttcgacgccgaccacagcggcgccgtcgaccgcgccgagttccacgacgagatgcgccgcatcatgctcgccgtcgccgacgggctcggctcccagccgctccaggtcgccgtggacgacgagggcgggagcttcctgctcgaggcagccgagcacgaggccgctgggatcgccgccaagatcgaagccaaccgcaaggcggaggcggaggcggaggcggccaagtgacgacgtgtccctcgtgcgggccctgcgcttgattttctgggtgtttgctactacgtactagtactacttacctggcggccgatgtgccgccgcacgtgtacggtatactacgtaactagaagcggccagcaccagctactcaaatcactgctgatgctacttgtgaacggaataaaacctgtcaatcattttagtggtcttgcttgcat

SEQ ID NO: 2463 - DNA, 886 bp, Zea mays
  Clone ID: 700213041_FLI
ctggttagtactccgcatgttcgtttttttacgccgacggaaatcaacctgcgccgctgccttctccgttctcgccgtcgcctccgcctccgctgccgccgcgcaggtcagggtcatgtcgatcttcgagtacaacgggagcgccgtggtggcgatggtggggaagaactgcttcgcgatcgccagcgaccgccgcctcggcgtgcagctgcagacgatcgccaccgacttccgacgggtgttcaaggtccacgacaagctctacatcgggctctcggggctcgccaccgacgcccagacgctgtatcagcggctggtgttcaggcacaagttgtaccagctgagggaggagagggacatgaagcccgaagcctttgccagccttgtttcagccctcctctatgagaaaaggtttggaccatacttctgccaaccagttattgctggcctaggagacaacgatgagccgtttatatgtaccatggactgcattggtgccaaggaactagcaaaagattttgtggtctccggtactgcttcagagtcactttatggtgcttgtgagtccatgtataagccaaacatggaacccgaagaacttttcgagacaatctcgcaagcattgcaagcatctgttgatcgcgactgcctcagcggctggggaggttatgttcttgttgtcacacccactgaagtgcaggagagagtgctgaagggaaggatggactgatgagtgctgccatgtagttattctaggagagattgtttcttcattcgccctgacatactcgcccctgtcctacggcgtacataattcagagaacctgtgcaccacgtttacttctcattctgaatgaacattgattcagtagttgccttcgccttt

SEQ ID NO: 2464 - DNA, 891 bp, Zea mays
  Clone ID: 700213045_FLI
ggggaagaacttcaagattggttcactgcagatgttcatggacaacaatggaagcactgaagatatgggtcctcgaccttttcctgtcaaggaggttcataaaatagcagtactagatattaggttagctaatgctgatcgtcatgctgggaatattctagtgtgcaaggagagagaaggtggcaactacaagctgattccaattgatcatggttactgcttgccagagaaggtggttaatatctgttacaatacgtatttggttcatctgcttgcaccttatttgtttcatatggctgattagaaacttacgtcgccatatgctgtgcagtttgaagattgtacatttgagtggctctactggccccaagcccgtgagccattcaatgatgaaaccattgaatacatcaaatcactcgatgctgaagaagacatcaagcttctcaagatccatgggtgggagctgcctccacggtgtgctcgtgtcctgcgcatcagcacaatgcttttgaagaaaggtgcatctcgtggcttcacgccctatgacatagggcgcatactatgcagggaaactgtgaatagggactctgagattgaggtcatcattcaggaagcagaggatgctgttctcccatggtccagtgaaaacatgttcttagaaactttatctgaaatcatggaccgtcacctccacaaggaatgagtttagaaattcagaataacttatctagttgctccagctgtatccggtttgttgtaagtattgtagacaaggggtgtcaagggactaatgatttcatttgtttgtatcctctcaaatgatttcacttggttgtaattgctcgagtactttgcttatgcacattttgtgaataatatatttgtttggtt

SEQ ID NO: 2465 - DNA, 897 bp, Zea mays
  Clone ID: 700213061_FLI
ggcaactcagcagaagcacaccactacggccggttcgtcgtccctagataagctggtgcgtctcgcggcgtggtggatcggaggagaggtgggacaggcaggcacccatggcggggctacagaggtcggcgaccacgttcagaaggtccgggtcctcgggcctggtctgggacgagcggttcctgaccgaggccgaggccgaggcgaaggcgaaggccggcggtggcgccgccgccgccgaggacccccagccggagctccggcactccaggagcgtcgggagcatcggcatgctgctccgtggtggagacagcgacgacggcaataagaaggcgaaggaggtggagaaggcgcgcggcgggcagcagcagcgggtgttccggaccaaggacgtggcccccgacatggacccgccctcgccgagggtgtccggctgcatcctctgcgccatcctgggcgggggctctggcggcggcaaggcacgccgccggtccaagcccaagcccaagcccaagcctaagcctaagcccaggaaggatgtagcgacgacggcggcgtaggcgcgtagcagcacgtacgtacgtcgcgttgtctttccgctgtaaaaaaacaagtttgggggtcatggttgtgtgagagtgcacatgtttatacatactggcaggggcgaagccagacaacaaagtcattggggtcagctccattaatcatcatctaaatacattagttaagaatatatttgtacaggaattgacatgttttataggggtcagttgaccccaataactacaagtagctccgcccctgcatactggtagcggtaggcagcgtcatatgagcttgctactcgatgtaatgtatgtacaccatttttagtcaggttagtttcctctcttt

SEQ ID NO: 2466 - DNA, 1162 bp, Zea mays
  Clone ID: 700213134_FLI
gccgagcatacaccatgcactccctgcggtgcgcccttcgctaccccatccccagtaccgccgcctctttatccacctccggcctccgccgtctctcctcccaccatctcactccaccgccgctccgctcagcgaccaccggtgaagacgagtggaacgacgcgtgggagaccgcatggcttccaggcgactcccccgcctcctccccagcgcccgccgcgccatgggagtctcccgcctcggcttcggagtccgccatcccggtcatctccgccgaggtggatccagacactaaggccttcgtggcagacatggacgagcgctgggccgagcgccgcatcgcgtcgaggcggggccagcagcagcgcgcgtctcgcgcggcggaaggcggggaggggggcgtcgtggcgaggaagaaggcgcaagcggatgattacaggaccaggaagcagcgggtgcacgccgcgctttgggtgaaggagatcgagaagatggaggaggcgcgactcggcggtgggggaggtggcgctgacgatatcgaccggctgctcgactcgtgctcagatatctttgattctggcaacactgattttggtgattccaagatcccgaacactactgagatcaaaaccaagcctgatggttgggaaactacttcaagaggacaggatgggaacatatgggatatctcacagcgagaagatgacattctaatacaggaatttgaaaggcgaattgcttttagtaaacagcagattgctagcttcatcaaaacccacatttttagtcggaggcgtcctatcgatggatggaagtacatgattgaagaaattggccccaacgcaagaaaaggaaaggggagtgtgcaaagattaccaagtgtcagtgatcctgcaacccagccttacagggaagaaactcctgcaattgcttctagttcctccttcagaggcaatcggccatgatggtgttcgataaaccaaatcttttgctggtttcaccggcatagtttatacaggcattttccccttccttttggcttcaaatgtatggtggatgactccttgcgaagaacatgacgaactttccttctgcgttgtataattttgtaatgaatgtgacgctttctgatgaaccagcaatggaagcgtttaagttttct

SEQ ID NO: 2467 - DNA, 763 bp, Zea mays
  Clone ID: 700213140_FLI
ggatggtgctcgggctcgggacgggctccacggccgccttcgccgtcgccgagatcggcgcgctcctggccgcgggcaagctcgagaagatcgtcggcgtgcccacatccaagcgcaccttcgagcaggcgcagtcgctcggcatcccgctctccacgctcgacgacaacccgctcatcgacctcgccatcgacggtgccgacgaggtttgaccctgacctcaaccttgtgaaagggcggggtggtgctcttcttcgtgagaagatggttgaggcagcatcggacaagtttattgttattgttgacgagacaaaactagttgatgggttaggaggtagtggtctagccatgccagtggaagttgtgcagttctgctggaagtacaaccttgtaagattgcaggaactgtttaaggaggaaggagtcgaggcaaagctaaggtttgaaggcgacaagccctatgttactgacaactcaaactacatcgtcgatttatacttcaagacgccaatcaaggatgcgttggcagcaggacaggaaattgcagctctggaaggagttgttgaccatgggttgttcttgaacatggcgagttcagtgatcattgctggaacggacggtgtcagtgtcaaaacgaagtgagtttttgagttgctttgttgtttgtgttgagttttacaatttaatgtacaagctattggtgtaaaagcagctgataagatgcttcaataaaggtgttcccccaatgtggggattgactatc

SEQ ID NO: 2468 - DNA, 806 bp, Zea mays
  Clone ID: 700213144_FLI
cgagatcgtgcgcgcctccgagatctccacgaagttgtggtaacatggggcttaccttcacgaagctcttcagccggctcttctccaagaaagagatgaggatccttatggttggtctcgatgcagctggtaagaccaccatcctctacaagctcaagctcggagaaatcgtgaccaccatccctacaatcgggtttaatgtggagactgttgaatacaagaacattagcttcactgtctgggatgttggaggtcaggacaagatcaggccattgtggaggcactatttccagaacacccaaggccttatctttgttgttgatagcaatgacagagatcgtgttgttgaagcaaaggatgagctccacaggatgctgaacgaggatgaattgagggatgctgtcttgctcgttttcgcaaacaagcaagatctaccaaatgcaatgaacgctgctgagatcaccgataagcttggtctccattccctgcgccaacgccactggtatatccagagcacttgtgctaccacaggagaaggtttgtacgagggtcttgattggctctccaacaacattgcaaacaaggcctgaatggacaattctgctgtttcacggagcacatctgcacatggcgaggcatggtcattttgaccctcagacgatcattgtttcattggaaagtatcgtatttctatgctaggcttttcagagagattactctctaagaaactgatccgatattaagacactataattggcattggcactagtagatcgtttactgagtaatgcagtttattttaatgt

SEQ ID NO: 2469 - DNA, 1161 bp, Zea mays
  Clone ID: 700213152_FLI
gcgaaacgccgagagaggcgtgcgagcgggagcaaggagatggagcgggcggcgccggtgaggagctcccacacctccacggccgacctactcgcgtggccgcagccccagggccccgccccagcaacgccgtcgccgccgcgccggcccggtcagccgtcggaggctatcaggaaggtggtgttcgggggtcaggtcaccgaggaggaggccgacagcctcaccaagaggaagccgtgctccgcgcccaagtggaaggagatgactgggagcggcattttcgctgccgggagcaatggagacgctggggaggcagctgctgccgcgaagcccgcccgaacctcctcgcgccaggcgagcagtactgtaagccacatctcgttcgctgaggatggaaccgatcctcccaaaaagcccacatcagtagctgaggtggcaaagcagcgtgagcttagtggcactcttcaaagcgaggcggatagtaagacgaagaagcagatctcaaatgcaaagtccaaggaactcagcggccacgacatctttgctgatactctggattccaggtctaacagggcaaggaacccatcgaacggcagcacagcctcacacgcacctgccaaaaatacaaacgcgagcaccttctcgtttggagatgccaacactgacagcacgccaaagacggcaaggaagataaccggcaagaaggtcaacgacctcaccggcaacgacatcttcaagggagacgcgccggcagcttctgcagagaagcatctgagcaccgcgaagctgaaggagatcactggaagcaacatttttgcagatgggaaggaaccaatccgcgagcgtgtgggcggaaaccgcaagcctcctggcggtgagagcagcatcgcgctgatttagcataatccgggactcagtgtcgacccctagaggaggatttccaccagcaccaggcagcaggctgttggatcgtcagtttggtgtcttgttcctgatcaaggtgcggcagtgaagagccccgttttagtcttgatgatgtttattaactgttggtgtgtgcatgtttggtttggctgtgagataccaatgccgtcctcatcatggcagtgtgtagtgtgtacggttgatgtgtttttacaaataatagctcgagtctgaacc

SEQ ID NO: 2470 - DNA, 1994 bp, Zea mays
  Clone ID: 700213155_FLI
atgaagttacatgctactacggtttaatcattcttgagtacctatatattctaataaatcagtacgtttttaattattttgattttactggtacttagatagatgtatatacatgctctaacatgtttagatacatcatataacatgcacatgctgctacggtttaatcattcgtgaatacctatatattctattatatcagtatgccttttaattgttatgattttgatgtacttggacggctgcttatgcagcagctatgtgtagattttgaatactcagtgtgatgagcatgcatggccctgccttcatagttcatatgctgtttatttcctttgagactgttcttatttgttgatagtcaccctgtagtttggtgattcttctgcagatgcagatcttcgtcaagaccctcactggaaagactatcaccctcgaggtggagtcttctgacaccattgacaacgtcaaggccaagatccaggacaaggagggcatccccccggaccagcagcggctcatctttgctggcaagcagctcgaggacgggcgcacacttgccgactacaacatccagaaggagagcaccctccaccttgttctccgcctcaggggaggcatgcagatcttcgtcaagaccctcactggaaagactatcaccctcgaggtggagtcttctgacaccatcgacaacgtcaaggccaagatccaggacaaggagggcatccctccagaccagcagcggctcatttttgccggcaagcagctcgaggacgggcgcacgctggccgactacaacattcagaaggagagcaccctccacttggtgctgcgtctcaggggcggcatgcagatcttcgtgaagactctgaccggcaagactatcacccttgaggtcgagtcttctgataccattgataatgtcaaggccaagatccaggacaaggagggcatccctccggaccagcagcggctcatttttgccggcaagcagctcgaggacgggcgcacgctggccgactacaacattcagaaggagagcaccctccacttggtgctgcgtctcagaggtggcatgcagatcttcgtgaagacacttactggcaagacgatcacccttgaggtggagtcctcagacaccattgacaacgtcaaggccaagatccaggacaaggagggcattccaccggaccagcagcggctgatcttcgccggcaagcagctggaggatggtcgcaccttggctgactacaacatccagaaggagagcaccctccacctggtgctccgcctcaggggtggtatgcagatttttgtgaagacattgactggcaagaccatcaccttggaggtggagtcgtctgacacaatcgataatgtcaaagccaagatccaggacaaggagggcattccaccggaccagcagcgcctgatctttgctggcaagcagctggaggatggccgtaccctcgccgactacaacatccagaaggagagcaccctccacctggtgctccgcttgcgaggtggtatgcagatctttgtgaagaccttgactggcaagaccataaccctggaggttgagagctccgacaccatcgacaacgtgaaggcaaagatccaggacaaagagggcatccccccagaccagcagcgtctgatcttcgctggcaagcagctggaggatggccgcaccctagcagactacaacatccagaaggagagcactctccacctggtgctccgcctccgtggtggtcagtaagccatggttcatttaagctgctgctgtacctgggtatctgcgtcgtctggtgccctctggtgtacctctatatggatgtcgtcgtctaataaacatctgtggtttgtgtgtcatgaatcgtggttgtggcttcgttggtttaatggacctgttgtgtcctctgtgttgtacccaaaactcttctgcagcagtatggcttgaatccttatgaagtttgatgtttgaactt

SEQ ID NO: 2471 - DNA, 1759 bp, Zea mays
  Clone ID: 700213183_FLI
acggcaagtatcacccccttcccctcttctcctgccacacctccgccagcgctagggttttatttttgcattgctgttgctggtggtggttaccttcttctctctctcagtcgtctccctcgcagctgcagtcgtcgtagcagatcttatctcaaaccctaccgaccaacagctgcttgctcgggacgggaaccggagttggattgcgatggcgctgcagtacgtggaggcgcagcggcaggcgcgcccggacctcgccgactggtatgcttccctcgccgacctctaccagcagaagctatggcaccagctcaccctcaagctcgaccaattcctacagctccaggccgcacagaccggagacactatcattcagctctacaacaatttcatcactgattttgagaccaagattaatctgctcaagcttgcccattttgcggtgatagcttctcgccagtaccctgataaggatgctgcaattaccttcttagagggggtgatcacaaagctgcgtgatacaagagagtcacggattaatgaaccgattctctatgtgaagatgcaaattgcagctattaatcttgagaaaggaaaccaaaaagagtgcaagaattcgttggaggatgggaaaaccaccctggatagtatgactgatgtcgatcccacagttcatgctagcttttactggatatcatctcaataccacaagtcatgccaagaatttgcagagttctataagaacgctcttctctatctggcctacacaactgtggagtctctatctgagtcattcaagctagacttggcttttgatctttctctagcagccttgctgggtgataacatttataattttggagagttattagctcacccgattatcaatagtcttattggaaccaaggtggagtgggtttatcatatgttacaagcattcaacacgggcaaccttgctttctaccaagaactttgcagggttcacaatgctgctcttactgcacaaccagctttggtgcaggatgagaggaagctgcttgagaaaatcaatattctttgtctgatggagataatctttagtcggccatctgaagatagaactattccattaagtgttattgctgagcagactaagctttcaatcagtgatgtggagtatctccttatgaagagcctctcggttcatcttattgagggaataattgatgaagtggacagtacagttcatgtttcgtgggtccagcccagagtgcttggaatcccacaggttaaggctttgcgcgaccgcctggatgcctgggttggaaaggtgcatactacattgctttcagttgaggcagaaacacctgatcttgttgctgcctaatttagcacctgttacacttccgcgagaggcttggtcagcaaggtgatgagatgcattgtgacacttgtagtcattttctggataatgaacctgctgccctgagcgtttgtcagcctgcgtcctgatcggggcctgtaatttcttttttgatgtcctctggacatggatgggtacaacttcacgcagtgtcacggaaacgggaccaaatgattgaaatttttatactagtagggtgttactgtagttttcccagttgaatttaatttgtaactgagtttgtactctgctggacatggatgcaggagaatcttgctggaaatttagttgtgcttgatgtttgcatgttgcattgcgataagacgtggatcatcattaatgtattcttattctcag

SEQ ID NO: 2472 - DNA, 906 bp, Zea mays
  Clone ID: 700213225_FLI
gccccggagcctctccttcccggtctcctccgcccgttgccttcgtcccctccatctccggctgcgtcgccggcgagcccgacaccgcgaatcggatccgccgacaaggtgagagggaagagatggggctcacgttcaccaagctgttcagccggctgttcgccaagaaggagatgcggatcctgatggtgggactcgacgccgccggaaagaccaccatcctctacaagctgaagctcggcgagatcgtcaccaccatccccaccatcggattcaatgttgaaactgtggagtacaagaacatcagcttcactgtctgggatgtcgggggccaggacaagatcaggccactgtggaggcattacttccagaacacgcagggtctcatctttgttgtggacagcaatgatagggaccgcgttgttgaagcaagggatgagctccaccgaatgctgaatgaggatgagttacgtgatgctgtgttgcttgtttttgctaacaagcaagatcttccaaatgctatgaatgccgctgagatcactgataagcttggactgcattcacttcgccaacgtcattggtacattcaaagcacttgtgctacaacgggtgagggattgtatgaaggcctggactggctgtccagcaacattgcaaccaagtcctaaattgtcaagcgaggtttggatcatctaggagcttttggatgatgatgatgatgatggtgctggatatttagggttgggttggtatttccgtatgtaagatgtatgcccctgagctcggcagtttttgagctctgcttaagattctcacagttaaattgttttatgtaatttgggccttgagatgtttctgaaccaaacagctaaaagagttcagttgagttaactggttgccattatt

SEQ ID NO: 2473 - DNA, 1039 bp, Zea mays
  Clone ID: 700213232_FLI
tgctcatctggagaatgagctgaagaaaaagagtgggcagcttgacaggagtaatgcaacagttcagaggctggaaatggagaatgcagagatacgtgctgagatggaagctgcaaaactgagtgcatcagagactgaaaaacaatgccagggtctcttaaggaaagagaagaaggatagcaaaaggcttgaagtctgggagcgccagaaagcgaagctgaaggaggacattgctgaatgcaagacaaatattacacaagctgaaagggagcttgctgaggtcaacaaggcaataaaaaatatggagaagaagatgcgagaagacacaagggtcaaagaagaaaacatggtgcttttggaagatgagcgcaggaagaaggaagctgcaaaagcagacaatgaccgccgacttgaagagcttcgtcgcaagaaagaagtcgaatccgagtgctacaaggatgacctacacaggctccaggatgaactcagccgcctgcagaagtcagcaggtgcaactcaaacagctgtcccatcagccaactttcctggcacagctaaccgaagcgcggcgcaggcagccaagcagcaggccatcctgcggccacaacctgcatctaaccggtcgctgccaccaccagcccagaagccaagccgccgccgggactgtgttgcctgcaagaaggcggcggcgtgtgtgatcctactccagtgtgcccaccaggtcctctgtgttggctgcaataagctgcatgaagataaaggcatcactcgctgcccctgctgcagcgctgaagtcgaagagagaatcagggttttcggagcgagctccaactgaggcaccaggtcggggtgaactgcaacttgtggttgagttttcctttttcttttacctccgttaatgtgaagaaagggttatagccttataggtgtcgcctgagcggttatactttgctacagcatccatgcatgattgcttagctgaattgcgacttatcttgggtattatatgagtataatcgagacctttctggagacaggc

SEQ ID NO: 2474 - DNA, 2204 bp, Zea mays
  Clone ID: 700213241_FLI
cctcgcatcgtccctctctccgccgactccaaaccctaacccgcgcgcttacctcctcgtcccctcaggccatggcgtcgtcccctacccccaagaaggtgctggtcccgatcgcgaatgggacggagccgatggaggcggtcatcaccatcgacgtgctccggcgcgcgggggccgatgtcgccgtcgcttccgtcgagccgggggcgacgtccgtagctgcctcatggggcatcaagcttaccgccgacgcgctcctcgccgacctcgcggacgatgagttcgatctcatctctctaccgggagggatgcctggttcttcgacttttggagagtgcaaagttttggagaaaatggtcaaaaaacatgtagagaagggcaagctttatgctgcaatttgcgctgcaccagcaatgactctaggaacttggggtttgctcaatggcttaaaggcaacatgttatccttcgttcattgataaacttccttcagaggtacatgctgtggaatcaagagtgcagattgatgggaagtgtatgaccagtcgtggaccgggaacagccatggagtattctgttattttggttgagcaactatatggaaaggaaaaagctaaagaagttgctgggccaatggaggactgtctcattatattaagaagaaagaaggttatggggccagaaaacagcccaaacacaggagcctccttacggaggatgaaaacatgaaaacataaaaggactcataaggaacctataaacaacatcctcacatcaagtaagacagggagagagaaactagactgcagggtgccgggcagccaaggcccaagttgtttcgactaaaaaggctttgttgtgttttcttgcaactttcctgcatttgattcctgtttccatcatattagttttgaagtagtagtttttttgttgacatttgcaacatctcttgttctttgtttttttactatagttgatgtatttttgacagctgttaattctattcaactaagtgaatattacctttcaggttatgcgtcctcagcatggtgtggaattctctatgaaagaggtgaattcaactagttggaatgttggtgaaacaccaaatattctagtaccaatcgctaatgggacagaggagatggaagcaactatgataattgacattttgcgtagggcgaaagcaaatgttgtggttgcctccttggaagacaagctagagattgttgcatccaggaaggtgaagatgattgctgatgtgctgttggatgatgctcttaaggagcaatatgatctcattctgttacctggaggtctgggtggtgcagaagcatatgcaaaatctgataaactaatggatctgatcaagaagcaagctgaggcaaatagattgtatggagctatatgtgcctcccctgcgattgctcttgaaccacatggcctactaaagggaaagaaagttacatcctatcctgctatgtggaacaaacttgcagaccaaagcgaatgcaacaacagagttattgttgatggtaacctaatcaccagccaaggtcctgggacttctatggaattctcgcttgccatagtggagaaactctttggacgggagagagcccttgagctggccaaatccatggtttttatttgagttgaaatggtacgtgtacgtattaggtttctggagtatgtacttgtgtaaatcgaggcatgctatgttctttttcttgtggaatgtacttcaaatccccttttaaatagaaataagacgaacgcttgtaatgtgtttcatatgcagtaaaaggtttgaggcaaacattaagcgaaacaaaaaaaaaaaaaaaaagaggaggctcatggacgcgcttgtcggccgcatcgtcgacgccttggactgaagttgtggcacaaaggtgtctcctcgaggtttcttgcttgtcctcgttgcatgctagcttgcgagtttaggagtttcttagcgctgtttatgtgtagtagctgtgatggatctgtgatgtagttgaagcggacaagccttagtgttttcccacccttgtatttgcttaaaaggggagtttcttatgtagaagaggttgcacgtctgttgcctatacctacttgcttctttgctctcaacaattatgttttggggctttggactttaatttcttgaaaagaaagaaaacaaattgtcgctgctgc

SEQ ID NO: 2475 - DNA, 3281 bp, Zea mays
  Clone ID: 700213246_FLI
aaaattccaaatgcttttctgatcagagagtcagattttccatgttataactctgccttgccagtgaagttagatcaggaagcctgtattcattctaagttctgttctgagtgtgtcgaatattcatgtgctgtggaaagacaaggcactacatcaatggttgtttctggtaaagaagatcgcgtggacaaggacgagacaccaggagtagatttccatttaaattttctcgagttttccaatgataacagaagtcctgaattaaatatgctctccgttccagtggatttacggcaggaactgcatggcttgcctgaagttgattctcgtgatagttcccctttgctgcataaggagaagactagtgaagaatgctgcttttctttaagcaacaacgttgttgaagtgaaacaagagctggaaatccgtgctgaccttgttccacattcttctattaatgaaaaagtagatggattagatgaggctgtaccggtggaaccagaggcccatgcctgtgccttggatgaatatgacaaccaagatgtcccacacatttcaactagtgagaagaatgaaacccttactttgggcaaacctgttttagtccaggggccagaagtttgtgcctttggtggatttgaatgtgatcctccaatcattccatcaccttcagttgatgagactaaggacaatctagaagtcagaatgaatatgatcctccaatcattccatcattctttgaggacttcttttcaagcagaacagaagtcagaatgctacacctcaggtgaacatgattctcaaaccgttccatttcctttgcatgatgagaatatcaatgaactggatgatcctcctttgagcaatgctgacgaactggaccgggaatcaaaagcttgtgtttccacatgaatgtgatgctcaaatcgctccatgttcaactgatgaggatatacatgaattggatcaccctcctttgagcagtcccgctttagtggatcttgaatcagaagaccatgtctcggatgaccgtgattccgaagtcaccccatgtttggttaaagataagattgatgaatctgtagatgctcaaccaaacctgcttcctggggagctagagcaggaaactcatgcaccccctgaattagactttcgagttgctccacaatcagcgaaagaatctgattgctcaactgaatttgattcccaggccgcaccatgttcttcaaatataccagtactagctaacacaacagtgtcgacttgtatttctgccatgcctagcagtgaggaaacgtatcagttgtctcctgttccaccacctactgtacaatttcaaaatgattcctacaaagatcctcaagctctactcgctgattcctacaaagatcctcaagcgccaccccctctccctcctctccagtggaggcttggaaagcctcggctaggacttctgagtagaaaaggctgtatgactgaacctgcaagggtaatagatcctgttttgcagatatcaagccaagagatggatattaggccaggtttgcttgatccaacggatagatctatagaaccagtatcctgtcaagaaatcaaagaagatagatgtgagagttctttgatagatcataatgatcaaaatgtggattttgatagattatcgaccagggttgcagtaactgatgttgcaaggactgaacacaggctatccttagagacttcagaggacattaagcaacaggggcatatttcttcatcggcaacaggagttggggaacacctggatgctgggttcacatcaacaatggcagatgaggaacatctggatgattctgggatgacacatggaacagctctatacttatcagaccctctgtttccattacctacatatgaactgcaggaccctcaaccagatactcgagaaaatagcgagcatcccagtcaaacacatggagctgcatctggggatgataagtcaatggatgctgttggcagcatggaaagcaccctaacaaaaggacatgtttctggaaataggtgctaccagcaacctcagcatggtgaatcgtcctcagagacttcagaccataaagagcatattacaaatgcatcagaggatggtgttaagcatcagtcaggtacaagtgaggcaccttcagacacagcaaagcattctgcaccaggcacgctgttgaaagggaatgtccaagagagtcaaattttacaggaacataatgtggggagttccgaggacgatcaaccaggaggcctgttgtacagcttagaaccagtggcacctcaaggggaaaacaaaaaccaggttaacaacccaggcctgttactggaatggcctggagatacaagtgagttggtcactggccttgaaaaaagttgctatgcgcatgctgagcagccacctgtgatgggatggactgttggacctcagatgcttcatcctaaatatggtattttagaagaagagagccaatttgagcctaatatcgccgacaatcatttaatcaggaagcctatttcgataaaaaacatcccaaggaatccactggttgatgctgttgctgctcatgatagaagctcgatgagaaaggtttcagagcttgcaccaccgactgacaagccgaagcctaacgagagaaacatgttgctagaacagataagaaacaagaccttcagcttgaaacctgttgctccagctcagcaaacagcaatgagatcccctgctagaaccagtactagaaacttgaaggttgccgctatcatagaaaaggcaaatgccatacgacaggcagtgggaagtgacgacgaagacgcagatagttggagtgatacataaatcccccaccgtttgccctaccctcttggtgcttctttccatggcagaaaggtaccgattcatcaagagcattggggacaggatggggatgcacaaccatgtcatcgtttttgtttgccctaccctcttggtgcttctttccatggcagaaaggtaccgattcatcaagagcattggggacaggatggggatgcacaaccatgtcatcgtttttgttagtaatataatgctagtcttgtgtatagtatacgcccataatccttttcattttttgtatgtgtattctttcgaccgattgtttgtatacctgcctctctctcccacagcagcaaaggctgttgcggttggcatgatcctaggatagcatgcatggtctatgtaaattaaacagtagtagttaagtaaagaattgttccatcttttctgg

SEQ ID NO: 2476 - DNA, 1591 bp, Zea mays
  Clone ID: 700213266_FLI
gctcgccgcgcggtggcgggaggtccacggcagcaacaactgggagggtctgctggaccccatcgacggcgtgctcctccaggagctcatccgctacggcgagttcgcccaggccacctacgacagcttcgactacgaccgcttctccccctactgcggcagctgcaagtacccggcgaagaccttcttccacgacgtcggcctcggcggcatcggctacgaggtcacccgctacctctacgccacctgcaacgacctcaagttccccaacttcggcatcaagacggccgccaacgccaagatgtggagcgagtccggcacgttcatcgggtacgtggccgtgtccaccgacgaggagacggcgcggctcggccgccgggacatcgccgtggcgtggcgcggcaccatcacccgcctcgagtgggtggccgatctgacggccaaccagatccccctgcgcgagacgggcgtcccctgcccggaccccgacgtgaaggtggagcgagggttcgcggcgctgtacacggacaagggcaccagctgccgcttctgccggtactcggcgcgggagcaggtgctggccgaggtgcgcaagctggtggatctgtaccacgggcggggcgagcaggtgagcgtgacggtcacgggccacagcctgggcagcgcgctggcgatgctgtgcgccttcgacgtcgcggagacgcgcgcgaacgtgtcgccgggcgacagggtggcgccggtgtgcgtgttctccttcgccggcccgcgcgtcgggaacgtcgccttccggaggcggttcgagcgggagctgggcgtgcgggcgctgcgcgtcgtgaacgtgcacgacagcgtgcccaaggtgcccggcgtgttcttcaacgagtcggcgttcccggagctcgtcctgcgggcggcggacaggctgggcctcggcggcgtgtacacgcacctgggcgtgctgctgcagctggaccacaaggtgtcgccgttcctcaaggagaccctggacctctcgtgctaccacaacctggaggcgcacctgcacctgctggacggcttccgcggctccggcgcggggttcgagccccgcgggagggaccccgcgctggtgaacaagtccaccgacttcctccgggaggaccacatggtgccgcccgtgtggtaccaggcggagaacaagggcatggtgaggacggaggacggccggtgggtgctgccgccgcggcagagggtgctcgacgaccacccggaggacactgaccatcacctccagcggctcggtctcaccgcgtgaagctcagcaatactctgatagtagcgttaattagtgcgtgtggcgttcgcgtacgtgcgcggggcagtcggttactctgttgccgcgcgcggcagctcagtggcgcgttcatggcgtgcatgatgcgggtgacgtgcgggatgggcacgtcgctgcctgagaagctcgcgccgttggcgttcgtgtggctgcagaaaggtcatcttggattgtaattctctctacttatttttgtaaattgacccagaaaagctgctgcttgcagcgcaaaaaaaaaacgattttcatctttctgtt

SEQ ID NO: 2477 - DNA, 994 bp, Zea mays
  Clone ID: 700213291_FLI
cgcacacggcacacacaccttcttcgtccccttcacccccctgccgctaggctctccctcccctcggtcgtagccatggagaccacttcccctgcctcttcacctgggcacatctccctcccagctgctgcaggtaggactaagtagtaaatagccatatacataggttgagtggatcgttaagagagggtagccatatacataggagtactggatagtatacaagaacggtagatacagggcaggggacatgatgctgggaaagagatctgggcgcccgtcgccggcgtcgcggcagcacatgcggcggaccacgagcatgacggagttcgcggcaccgcacgtgctggtagacgtcgcggaggaggaggaggacgaggagctgcagcttctgccggcgcacgccgaggccgcaggggaggcggccgagcaggaggacccctacgggtgggccatcggcggcgccgcggcggccgggcgcgcggactggctggcggcgtaccgcgcccgcgcggctccggcactggcggggctacgccggaactcggccgacttctcggctgccgagaccgccgcgttcctccgcgcctgcgggctctgcaaccgccgcctcggacccggccgcgacaccttcatgtacaggggcgacacggcgttctgcagcctcgagtgccggcagcagcacatcacgatcgaggagtggaaggagaagtgcgcgctcgccacgccgccgacggcgccggcgtccgacccggtggtgccgctgccgcccagcggcgcgggctccgacaaaccaggcacgctcgccgccgcatcctgattagtcatgagggagggggtccgaggcgatcgatgatccggctaagctagcagctctggcctcgccaccacacacatcacatgcatacatattatctatctttctatatatgtaatatgctcagatcactcttgctatgttcatctgcgtgctccaatcatatcattctttttc

SEQ ID NO: 2478 - DNA, 1689 bp, Zea mays
  Clone ID: 700213309_FLI
cctctggctgcctcgtgtactggtcgagctcaagcgccccatttcgggctgggtccgggaaccacgaatctatctcctaaccctatcaagctagctagctgcgatgccgagcttccctccgccgggcgccgtcaccatctgcgagatcaaccgcgacctcgttgcggcggatgccctctccgacgaccgcgccaaggacgcctatggggatgtcctcgggatggtgttcgccccgattccgttccagccggaggctcttcttctcgccagccgcgagcctgctgctcctgccgcggaccaagtcgagcctgctgacactgtgcccaccgctggtttggcagccaccatatcggacttcttcaggcggatggtcttccctccactagacccaaatctgctagaagaatttgacatgcagaaagtaagttggaatccatacaagcattgcttagcattcgtgtctgggaagaaccaggttactgtccaagactttgaggactcagatgctaaagaaccatgcattttaacaaatgatcatcaaacggatgttaaggctgttgagtggagaccaaatagtgggaagatgattgcagttgcctgcaaaggagggatatgcctctggtcggcatcatatcctggcaatgtcccattcatgaaatctggggtcacttcttcctttagtgccttccctagaggttctggtggtcagtggatacttgtggatgttcttcgtggctcttctgctgagctcattagtgcactttgttggaaacctgatggaagatacttggcatctgcctcatgtaatagttcatctttcacaatttgggatgtgtctcaagggttgggaactcctatacggcgtggattaagcaatatatcattagtgcggtggtcacccagtggagattaccttctagttgctaaatttgatggtacttttcacttctgggagacaaacacatggacttcagaaccctggtcttcgtctaatggatatgtgtctggagcaaattgggacccagaaggtcgagttgcattgttatccttttccaactcgacgacacttggttcaattcacttctcgtcgaagccaccatctttagatgcacacctcctaccagttgaacttccagaaatttcctccctgattgttagccgaggcatagagaaattagcatgggacgcttcaggggaacgtctggcactgtcgttcagagatggaaacgaaatgtaccgtggcctgatcgcgatatatgacgtgcggagatctccactcgtctcactatcactagttgggttcatccggggacctggagaaggagcaaagccgctcgcctttgcttttcatagcaagtttaagcaggggccattgctttccgtgtgttggagcagtgggtggtgctgtacgtatccgctgatacttcgtcctcgttgaatccagtcgtagcacctcactggttcaggactgaatgttgctggcgacttggaagaccgaacgcttcgatgtgcctgctaggagaaatgcaaagctcgagttgctgcattgtgacgttgtggctcgagaaatggcgcccttttggacagtcatctccagatgtgtttgattggatatgtatgtatgcttatgctgattttaccgggggttttttttccccctctggccatacatggatcgcccttttggac

SEQ ID NO: 2479 - DNA, 1218 bp, Zea mays
  Clone ID: 700213356_FLI
gagagaattccctccgaagattgaagagatttaaatcccttcctagttatttttgactaagagaggatttaatgtcctctaatctctttctggattggtcacgggaatgggggatcggcgccattgccgtctctaccgaaaatccagacaaagcacgagctacgcacgcccccgctgcctcctttctgccgtcccaacgccgccggagtctgtcgccaccgtcgctgctctcccgccttcaccgcgcccaactctcgtccttgcctcccctgcgcgcttcagccgcttcactccccatcgttttcgcctggccaggatctactgggaccatggatcaagaaaaaaaactagaagtatctaataccagccatacttacaagcatcattgtagcgttggagttgacgtccacgagatctttgttaagaggagcagattgcgggttgttctgtcatacattggcattattttccttcttgtgaatgcctgccaaccattgctgacaaaggagagcctatctcttgggtctgtttggaatattacctttgctgttctggtcgccaaatgtttgcaatacaaacctgtgaagagagaatcagtagtgataatgccagcttttggaattcagctagaaatacatttttggagtggaagagttgatcatcgttttgtgcccgttggcaagattctcaagccaatgataaatgagtgcgtgacaccggtgacctgttactggagcttggcgctgcttctgcgtgatgaagaggaacttctgctcgttttccagagatctcgtcctcctgtcaaaatgttggttccaatatggaaagctctctgcacgttgacaaactctcaacacccaagcccttctcaaattcctaaccatgacccttgaggaacatgagttagctggggcgttgtgtagatgtacgtatcatcagaagaggcacctgcagttgagccagattcagataggaactgttgatgccaccataggacgtaaccagtgctaggggcattgattgttagggagtgatttcggctggaagtgtatacggataaacactagcaatttgtgacactgaatactctcctttacttgcatgcttcattttgttggatatctgaatgaggtgctgaatataagcaaatttaagtgaaactttggtatgtacgtaaagatgcaaacttttgttaaacaatatcttgtctcgtgtgcc

SEQ ID NO: 2480 - DNA, 699 bp, Zea mays
  Clone ID: 700213382_FLI
ggcaccgccgccgccgccgtcgtcgccgccttcccgcacatccagaggtgcaccgtcatggacctcccccacgtcgtcgccgaggctcccgccggcaccgccggcctgtccttccacggcggcgacatgttcgagcacatcccgtcggctgacgcactcatgctcaagtggatcctgcacgactgggatgaggacaagtgcatcaagataatggagcgctgcaaggaagcgatcggtggcaaggaagcaggggggaaggtgataataatagacacggtgctcggatctcgggcagacgacgacgacgacgacaagacgtgcagggagacgtatgtgttggatctccacatactgagcttcgtgaacggggcggagcgggaggagcacgagtggaggaggatcttcctggcggctgggttccgtgactacaagatcacgcacacccgaggcatcccgtccatcatcgaggtcttcccgtgatgatcatggatcgagagtcgatcatatatgcatgtttgtacgtgtttgtgtcataataaatcgatcgatcatgttgtttaccctttttatttcggtatctagttgcatctgtgggcgggctaaaataaatcacggccggccgggcttcatcaagcccatgtatccagctgtgtgtaataatgcaatggaaaccgaccccaaaaaaatgtttcctttccc

SEQ ID NO: 2481 - DNA, 2217 bp, Zea mays
  Clone ID: 700213387_FLI
tttaacgcatctggcattgtgttcatgggagacaacatgaagccaaacttggaatcaggctccattaatggagaggcaaatggcgaggatggagctaaagctgatcagaagtccagccagcagatgggatctcatgctgcatatcctccatgggcaatgcatcctccatctggtgcagttgtttacccaccttatcctatgcaaggcatgcctttttatcctggggtgaatccatactaccctccatatcctccagtggatgatcccaggtaccactactcaggaaggaaatcttcgaggaagcactcctcggatagtaaggactcagaaactcttgacgttgaaagtgaccattgcagttcagatagaggaagttctcatggtcgcaagtcacatagaaaggggaagaggtccggaaagaaaaaacctagtgtggttgttatcaagaatgtgaatgtaacatctaaaaagcatggctcatcagagagcgaatcacaatcaagttctgaagttgagtctgcggacagtgacaattcacactccaaatcaagtgaaaggaagcataaaagctcaagttcaaagaaaaaggagggtaggagaactacttttgcctccggagatgaatatagcaaggatgaaatgtcaaatggccacgatgctgagcaaggaaactggagcgcattccaaaatttcttgttgagagcagaagaaaaaacaagatctagtgatgcagacctgtttgctggtgagaaagaacccccatcaaggagaaaacagaatgtaaacacagcagatcctattcttttagctgagagagatggtggcattgtccatgagcggaacatagtaggttttgattcagccaatgggaggactagagctatccgggtcatgtccaatgatgaacttgttatgtctggagaagggaggaactatatgcatagtgaaataaaggagattgaagctggtggaggaaggtacaggagagggacaggtgatgactacatggtttatggtcagggaagtcagatagccagacatagtttgttggatcctcttgcagaggcccagtacaagaatcctgttcagcaggacaagaataggaatggtgtggcggacgagtcctttatgatccctcttaggtccagcttacatgataatatcggagcagaaagcagaactactattgacatagatgttgagcttccttctagaattcataaagcatcagatgaaaaggctggacatcagcttttttacgaacctgacgaattggtgccagagcgtggatctgaagatgtttcatttggatatgatccagcaatggattatgatagccacatgcagactactgtgaaggtggaagatgaaaaaacagaggatgacttgccagttgctgacaatgatgtacagaaggtagagaaagagaagctaaggaatgcaaaggatggttcagataaacgaaggaaagatgccttattgaggaggttatcggcgccaaggaccccactgaatgatgcacaaaaacgtgcacagaacctgcgtgcatataaggcagaccttcagaaactgaagaaagaacaggaagaagagcaaataaagcgattggagaggctcaaattggagcggcaaaagaggatcgccgcaagaggtaatggaaagggtccagggaatggttctcctaaagcgaatggtacgaatggactcagtaaatcagttccaaccttcactgggttgaaaaaggagaaaaatggaacaactgaatcactcagcgatcgactgaagaggctttctgaacccaaaagcattgctggggcagagcattccttgaatccaaagtcaactggcgcagaccattcacgaagaagaagcatggcgtgagacggagaaccgagcatcttgaatccatcgtaccactcgctagctcagcaaccatgaatggcatatcaaaaggcttcttgtacagaaagaggaaatggctggcgctgtagcactgcctgcttccaagatttgtgatggaaaatcaagttaccttttcaatggcatggcgttgtacttccaattttaacataattatttcattcttttattgaggatggcttgtaatagctgtaaacctggatttttcggcgacgcggagctatattttggtttttggctgtatttatggaatggattgatcgttgtttgagatatattgtggtatttatacagtgt

SEQ ID NO: 2482 - DNA, 987 bp, Zea mays
  Clone ID: 700213407_FLI
acggcccacccactgcacgcgcaagcgagagggcggctccgcctccgtcccatggatggccgccggcgccacctcatggtgttcacggccgcggtcactgctaggtggtggtcccggcgtgctagatctcacgcctccagggcaggctccctcacatgggtcaccgtttcctcatggtgttcacgggcgcgctcatcgctcgcagcgtggaggcgtcgatctgcatctatgatcgggagctcttctgcgaggtggacaatgcctcctcctctctggccaatacttctctaccagtcgcctgctcccgaggggaggggcgctgggatacaggcccgcagatggcgtcgactgtgcaggcggccatgatcgacgaagcctcctcagatccgtgctcatcgccaccagggtgatagcctttgtatctcgatcctgctcagcatctcggtggtcgtgcggtgccagctggttcggtcggggtagcaggcgctcctggcacccgcctatccccgagggcgcgaccaaagggagtccacgatgaggaagcgacagggccgaaatcagacatgaatgccattggagggttagtactaaattcttgttgatatttatagttttctctatttacataggtacaataagccggcgaagtttcgtggtggaatcagcggggtgcccatcggccggcgaggccccggctgcccggccggcccagccagtcggagtcgagccgggtggtctccatcgcagggctatcaactttagatcttgaacatgggacccaaatcactggcctggagcacaatatcaagaaaactagcttatgattgcagatctcacccatgggtttaatgagtcaaaaaatcaaaattttcacggaaggtcgatgatgaggtatatgatgctttggccgaacaccttctttctatcttggaggatattgaaaatttgattcaaagtaagcctttcctgttggtgctgtttcgggac

SEQ ID NO: 2483 - DNA, 2231 bp, Zea mays
  Clone ID: 700213413_FLI
ggttttgactggacatcgacgcactccttgggtggtcaggtatcatccattacattctgacatcctggctagcggaagtttggatcatgaagttcgtctatgggatgctaatacttcagactgtattgggtcacaagacttccatcggccaattgcttccattgcatttcatggaagtggggagattttggcagttgcatcaggtcacaaattgtacatatggaactacaataagagagatggcacttctgtaccagccatcatactaaaaacccgccgctcgctgagagctgttcattttcatccgcgtggggctccatatcttctaacagcagaggttaataatatagaatctgcagactcaccgctgactctggcaagatcctctggatatctaaattacccatcggccctgctggtgacaaacactaattctagattctgtacacttcctgagtccaatgtggtgtcaccttgcttactgtggcctgcatacctcagagatggtggaattttacatgtgctcggcaatgacagtagttcaaccattgtgcagcagagatcatcattagttcaaccttccacatcagatactgcaaatgtacagcttgaacagtttgctacccctatggatgtatgtccgggagagccaacttcatctaatgacatacccgatgcagtaactgttcctacttcaaatggaaatgaaatgcatggtgctggaggccagtctaactcaagactgcagggcagcagctctactagtaatcttgagaggttcagtgctagagatgatttgcaagtgtcttccctgagcaggactgacccaatcccattaacagcagggccttcaggatccgatttacaccgtgctatgccactaaatatgctcctcactggcggattagatgttcaaatgttcctaagaaatgtaggaagtggacagcaggatcattctctcttcggcgactcacgtaactgggaggtaccatttttgcagggtttcttgatggccccaaaccatgcaggtgcttcatcttcgattccccttaccactggcagttctaggggaccaaatcgacgctatgcttcacgctctgtacctggggttgggaatttgctcctaggtcctcaaattgacgaagctgaagctcatgctgtttcactaggtgctggttctgaaatcactgcgtccatgcttgctcctggtactgaattgccttgtacagtgaagctcagaatatggcggcacggtaccaatgaaccatgtgttcctttagaacctgaggcatgctgtctgacgatttctcatgccgttctctgcagtgaaatgggtgcccatttttccccatgtggacgatttctggtagcatgtgttgcgtgtttgttgccacaaacagaagacgaccgtggtagccaattgcctgtgtcttacgaaggggctggatcatcaccaactcgtcacccgcttccctctcatcgagttatttatgagctccgggtttattcccttgaggctgagacatttggggatattcttgcttccagagcaatacgggcagcacattgcttaacatccattcagttctcacctacatccgaacacatacttttggcatatggtcgtcgtcatagctcgctccttaggagcatagttgtggaaggcgaaaatggggttcccgtatatactattttggaggtatatagagtttcagatatggagcttgtgagagtgcttcctagcgctgaagatgaagttaatgttgcatgctttcatccttcaccaggaggtggccttgtttatggcactaaggaagggaagctcaggatccttcagcacaatggcgcagacatgacaaacatgggggtgggttgcttcattgaggaaaatatggttgagatccagaggtacgcattggaatgctgaagaagcttcaccacaccatgtgtttttaggcttacttccatggaatttttttctgcaggcttcatctgtgtgatccatccaaggggaaacattagatccatctctaactaagtgccttggggattggtctgtgcagaggtggtaggagatgtaaatctacatggccatcgtcgtggctgccataacgatgctgtaattataccgttgtacatgtatttccaattagcttaactcgattgctgttgtatttcagaaagttgacgatgctaatccttttaaagtcaaaagttactttttgttgtat

SEQ ID NO: 2484 - DNA, 1098 bp, Zea mays
  Clone ID: 700213420_FLI
aagagattgaacggctgaaaagggacaagaatgttcttatgcaagagcttgtaaggctgagacagcaacagcaaacaactgaccatcagctccagactttgggcaagcgtcttcaagggatggagtcacggcagcaacagatgatgtctttcctggccaaagcaatgcaaagtcctggtttcctagcacagtttgtacagcgaaatgagaacagcaggaggagaatagtagctgcgaacaagaaaaggcggctgcccaagcaagatggtggactcgagtccgaaagttctgctgcttcgttagacggtcaaattatcaagtatcagccttcgatcaacgaagcagccaaagcaatgctaaggaagatcctaaacgtagattcttcgcataggtttgaatctatgggcaattcagataatagtaataataataatattctgctggaggattatatgccggccgcccaagcttttgagagctcttcgtcgacaagaaattctggggtcacccttgcagaggttccagcaaactcaggcttggcgtatgtcggcacgagctcggctatctgttctcctccagcggcccctgaaatgcagtgcccagtggtgctggataacaaggcgtacaagcaagtggccagcatgagtgctgtgcctcctgtttcaagtgacatgggtattattccggaattctcagatctggcagacttggtctctgtggatattcttggaggggcctttgagatgatgcctggtcctgagttccccctgccagaagaaggtgatgatgggaccaccatgtacaacaacaacgacgaggaggctcagagccttccaggcatcatcaactccatctgggagcagttcctggtaggcagccctctatctaccgataatgaggaagttgattcagcaggcggactatatgcgcaggaggatggatggagcaaagtggggaacatcgctaatcttacagaacagatgggacttgtatcatcaacaaatcaccgggactcagggaatgggctgtactagtatcttaattaatacagtagactgaggattctggtaataagtgttgcatgctcttttcttattt

SEQ ID NO: 2485 - DNA, 1356 bp, Zea mays
  Clone ID: 700213449_FLI
gggaatatacccggttgctcccccttggatccttgtttgcttcctgctgcctggccttctctcctccccaaaatcaatccctcgccgacaaaggagagccagccaaatcttccacctcctccatttccagccccgtccccacaccagctcgcgtaacctcctccccatggctggaggcggcggcgcaggcgcaggctcgtcgtccggcggcggcggaggggcggcagggagggcgactgggactgcggcagctgcggcaaccgcaactacgccttccgctcgctttgcaaccgctgcaagcatccgcgcctcctcgtcgaccccaacaccccgcgcgactccaagtggctaccccgcgccggggactggatctgcaccgcagcaactacttgcaaatgcaaactggccctatgggatggctggtagatatgggatgcaatcttctggttggccatttggcaacggcaacccaaatcagtttttaggtgttccaaaggattggcgtaatggagattggttctgcagctgtggatctcataactattcatctcgtactcagtgcaaagagtgtggtgcacctgtaccatcgggcattccctccacaacaatgaaagctacatctgatgcctcttccacattaggaactaagcggttggcttcagaggacctggccaatgactgggataataaaaggctaaatccaggaaatgacaattatccactttcaacaggagctgcaaataatttatttttgggtattgagcaaggagctggaagcagcaatggtcagtctgcctttcccaagtttgacaatgggagctcagtggcattaccatctgggcagggaatgtctggtcttatgggaaaaggggcaaaatggcgtgacggggactggttgtgcaacaactgcaacaatcacaactatgcatctcgtgcgttttgcaacaggtgcaaaactcagaaagaatctgcagttcaccctggtgtgttatagcttgctgttggattatattgttccaggatatgttgctgcctgttctagctccttcctcaaggctgcggtttgagttttttcgattctgcagtgtttttgctgctctaaaatgtttgtctcgatatttcattagtgcttgttgaagttccccatttgtttatggtataagcgcttgaataaaatgtttctggaaagtaccggcctacaatctggattttggcaaaataattgaattagttgttgtacaatgaggcaaattgtcttacgttgtacttgatgaactctggagtattatcactcgtcgggttgaaaaggggaactatacaatgtaatttcagtacagattattattttttcctgag

SEQ ID NO: 2486 - DNA, 386 bp, Zea mays
  Clone ID: 700213505_FLI
ttggagtagcagcaaagcagagcagctcggccagccagccagtgggtctgttcccgaggcacacacacgcacacacaggtgctgaagcacacggcagttgccttgcctgttcgattgctgcttccttcctcctccctcgagtcttcttctcagcccagagagacagacaccaaggaaaagctggtaggtgccgcttgctctgcctccaatccaacccaacccaaggcggcagcagcagcggcggcgggtacgttcttctcggccatgcatggaatggaacgaggaccgcccaccgccggcgccgcctagatctctgcatccggtggccgccattggcggttcttggctccgattcggtgctgcctggtgacgagaaaaagccaagg

SEQ ID NO: 2487 - DNA, 1489 bp, Zea mays
  Clone ID: 700213563_FLI
gaagctttggttggttgactgctccatccacccaccccctacagttcagttcagttcagttggtctaggccatggccatgtccgcttcctcctcctcgcgcgccctcctccgccggatcggcggcgcgctcctccgccgctccttctcctcctcatccgccgcctccgcagggtaccacgtcgcgggcgggcccagctacatgcgcggcgccgtcttctgggagcccggccgcccgctcacgctcgaggagttccgcatgccgcggcccaaggccggcgagctcctcatcaagaccaaagcctgcggggtctgtcactccgatctccatgtcctcaaaggcgagctccctttctccacgccctgtgtcgtgggccatgagatcactggagaggtggttgaccatggcacgcacactcctgttgagatcatcaacaggttcccagtcggaagtcacgtcgtcggcgccttcataatgccatgtgggaactgcttctactgcgttaagggccaagaagatctgtgtgagtctttcttcgcgtataatcgtgccaaggggacactctatgatggcgagacacggctgtttctaaggggcaatgggaaaccggtgtacatgtatagtatgggagggcttgcagagtattgtgttgtcccagccaatgcgctagcagttctccctgactcactgccatacacagaatcagcaattttaggatgtgcagtgtttaccgcgtatggtgccctgaggcatgctgctgaaatgcggcctggtgattcagtagctgtgatcggagttggaggggttgggtcaagctgtttacagatagcaaaagcctttggagcttcccaagtcattgcagtggatgtccttgatgagaagcttcagaacgctacaacacttggagcaacccacactgtaaatgcagcaaaagatgatgcagttgaaaggataaaggaaattactgatggtaggggtgtagatgtggctatagaggcacttggtaaggcgttaacattttcccagtgcgccaagagcgtgcgtgatggaggcaaagctgttatgatcgggcttgctgcaacgaacgtaatgggagaggttgatataacccgtcttgtccgacgacaggtgaaaatcattggctcatatggcgcaagggctaggcaagaccttcctcagatagtgaagctcgcggagagtggtgccttcaatctccaaaacaccatatcaaggaaatgcaaatttgaggaggcgaatggcgcctatgaggatctcaatcagggcaagatcgtaggacgagctgtggttgagatcatggagtgatgacggacaaggtaatcaatcctgtggttccaagtctgggtcacacaacaataaagttttgcgtgctctttcacagcattgtcaaaatctgtagatgaccaaactgcattgtgtgtgtgtgtgtgtgtgtgtgtgacagtgtgttgttggaattaacatttgccctt

SEQ ID NO: 2488 - DNA, 776 bp, Zea mays
  Clone ID: 700213637_FLI
cgcacggcacctctaccattctccccacctctccctcgttccccttcgaaccaaaacccaaacccaaacaccaccatcaccaccacctccaccactcatacagcggcagagcgagagccgagaggcgagccgcattgccaaaccgggcgagccgcagtgctgcaaccgcccaccgcgcacgcgccggggaggcgccgcccgccaccctacgcgcgagcccagcagcgggaggaggaggcgagattccaaagggaaaaaaaggcggcgggagcaaaaggggaggcgaggtgtggaggggggaaaagcggcagtgggcagctgggagggagtccagagtccagtccagtccagtccaaaccagccggaccacggccgacgcggcagggcagctgtgactggctggaaggcaagtgtgctcggcaagcgacgcacgccacgccaccgacaccggcaccggcacccccgcccgcggtgatcggacccgcgcgccagatccgacaccccggccggaatcgcggcggactccagcgcccgcggccccgccccccggatctgcattccgcgcaggggctcctcctggccgccgcgcgccctcgtctccccagatactctgcaagcaatggatcgacgcagctggccttggaagaagaaatcatctgacaaatcatcaaatgcggatgtgctgcagaattttaatcatgcagaacaggaagataaagctccaaaatttgtgcaaatttcacctgaaacatatgcacatcttaccgagtcagagg

SEQ ID NO: 2489 - DNA, 862 bp, Zea mays
  Clone ID: 700213744_FLI
ggtcctaaaaatcaattttctcctcggggactccactcggttgccggccatggcggagaatttggcccccgagaagcgccacaccttcgtgcacaacgggcagaaggtgttcgagtgggaccagacgctagaggaggtgaacatgtacatcgagctccccaagggcgtgcccaccaagctcttccactgcaccatccaggccagccacgtcgaggtcggcatccgcggcaacccgccatatctcaaccatgacctgatgcaccccgtgaagaccgactcgtcgttctggacaatagaggatgctgagatgcatataacactgcaaaaaagagagaaggggaaaacatggtcatccccaatacaagggcaagggattttggatccatatgctgcagatcaagagcaaaagcggcttatgctccaaaggtttcaggaagagaacccagggttcgacttttcgcaggctcagttcagtggaacctgccctgacccaagaaccttcatgggaggaatacgctctgagtgaagctccctacctgcccatgttggtgttgtattcccggttggtgtctatcatggaaataatcgtgatgtgtaaccattttgtgtgcaagctcattaattggctgtaaacccttttggcaacctttgcgtgctaaattctagttatagttgtgatcgtcattcagtgttcgtttttagatgtatattaataatatttaggaagagttgatggcaacctctgcatgctaaattctagttatagttgtgatcatcattcagtgctagactgctcgttttttgatgtatttatatttgggggtgagctcatgactaaggctatcttcaaccattctccctc

SEQ ID NO: 2490 - DNA, 1441 bp, Zea mays
  Clone ID: 700213773_FLI
gggatgcttcagtcagcagatgagcaggtccggagcttgaagaagcagagcaccttccttagccagctagcagctaagacaatcccaaatggcatccattgtctttccatgcgcttaacgattgattattatcttctctctccagagaaaagaaagttccccaatagtgagaacctggaaaatcctgatctttaccattatgctcttttctcggacaatgttttggcagcatcagttgtggtcaactcaaccatcatgaatgctaaggagcctgaaaaacatgtatttcatctcgttactgacaaactgaactttggggccatgaacatgtggtttttgctgaatccacctggggatgcaacaatccatgtggaaaatgttgatgacttcaaatggttaaactcttcttactgccctgttctgaagcagcttgagtctgcagccatgaaagaatattatttcaaggctgatcgtccgaaaacactctctgctggttcttctaatctgaagtatcgaaacccaaaatatttgtccatgctcaatcatctaagattttacctcccacaagtctatcccaagctgaataaaattcttttcctggatgatgatatagttgtccagagggacctaactggactctgggaggttgatcttaatggaaatgtaaatggagccgtggaaacatgtggagagagttttcaccgatttgataagtacctaaatttctcaaacccaaatattgctcagaattttgatcctaatgcatgtggttgggcttatggaatgaacatgtttgatctggaagaatggaagaagaaagacattactggaatttaccacaaatggcagaacatgaacgagaacaggctgctctggaaactggggacattgccaccagggcttctaactttttacaagctgacacaccctctggacaaatcatggcatgtgcttggcttagggtacaatccaaccattgagcgctcagagatagacaatgctgctgtcatccactacaatggtaacatgaagccctggctggaaattgcaatgataaagtatcggccttactggacaaagtacatcaattatcagcattcctacattcatggatgcaagatcagccaatagaaaccaccctcagatattcttatgtgatgaacattgaagttggatgggactcaaaatgaaatcagtataactatcacatgttctttattcgtgttatattagatttgttagttatcatgtgtatgtagtttcgtcgcccttttgtggtgctttctcccctagctcattgttggttcttgtctctttttgtcatgaaaagaacgatgagctctatgattctcatcagctgataaatgtaatgtctgaatttctgtcggtgacaaattaatgatcccattcaaacggtatcaagtgttcgaacattcatgct

SEQ ID NO: 2491 - DNA, 1242 bp, Zea mays
  Clone ID: 700213777_FLI
ccagcaagaggcaggaggaggaggaggaggccatggcgcgcgctgcgggcgtggaggcgcaggcgcggcggcggccacggctggtggggtacgaggagctgccggagtacctcaaggacaacgagtacatccgcgggcactaccgcgccgagtggcccgtccgcgacgcgctcctcagcgccttcgcctggcacaacgagactctcaacgtgtggacgcatctcggagggttcctgtttttcctggcgctcgcggtcgccggagggtggacggaggccgccgacgaagccgctccggggatcatgagattcgtggtgacaccaccagctaacgcttcgtggggaagcgcccagcattcgggtctgccaagccacgacggcagggcgtcgcagtccggcgtgccgcggtggccgcggacggtgttcctggtgggcgccatgtcgtgcctggccatcagcgcgacggcccacctgctggcgtgccactcgcggcgcgccagcgtggtgttctggcagctcgactacgcgggcatctccgtgatgatcgtcgcctccttcgtgccgccggtgtactacgccttcctctgccacccgccggcgcgggcggcatacctgtccgccatcgcggcgctgggcgcgctcgtggtggccgcgctgctctccccgtcctgctcgtccccgcgctaccgccgcctccgcgcggcgctgttcctggccatgggcctgtcgggcgtcgtcccggcgctgcacgcgctgtggctcaactggggccacgccgcctgctacctggcgctcggcctcgaggtcgccatgggtctcgcctacgccacgggcgcatggttctacgtcagccgcgtgccggagaagtggaggcccggggtgttcgacgtcgtgggccacagccaccagatcttccacgtgctcgtgctcgtcggcgccgtcacgcactacgtcgccgtcgccgtgctcatccactggcgggagaaggtggctgccgcctgtggcgcggcgtcgtaggcggggcttgctgctcctggcttctgcagcaagccagctgaggtgtttgatcatccagagattcaatgtgccactgcgatggattcaacaagcgttcgaatcggcgaacgaagtagttgcagttgcagttgcagcatagatcggctctagagttcgacgatttgtaatttaattgatgggatgattgagtatggtggttcattaatttatgatgagatttatctgt

SEQ ID NO: 2492 - DNA, 832 bp, Zea mays
  Clone ID: 700213781_FLI
aaaaacttgtctcagaaggatctacaattaatagcatcttccgtcttacttgctgcactatctgtggcaccttatgacaaaaaatatggtgcatctcatcttgagacagagaatgagaaggagcgtaacatgaggatggccaaccttgttaacttctcgcttgattccaagcgtgaaaatagggaaatgccttcaagagcatctcttctatctgagttggcctccaaaggagtcctttcatgtgcttcccaagaagtgcgagatttgtacaaccttttggaacatgagtttctacctctggaccttgcatcaaaagtgcagccacttctttcgaagatttcaaagatgggagggaagctttcatcagcttcttctgttccagaggttaagttatctcagtatatttcagcattggagaagctgacagcattgagagtgttacaacaggcctcttgtattttccagtcgatgaagattgatatgctctcaagaatgattccgttctttgacttttttgttgtggagaagatttctgttgatgctgtgagacgcaattttgttgctataaaagttaaccatttatcaggagctgttcattttggtactgtggacatagaatctgatggcttaagtgatcaccttagtgttgttgcggattcattaaataaagcgaagattcatatttgtccaccagttaaaaagccatctaaactcggtgaaagtcttattagtttggctggaatagtggagaatgagcataagaggcttcttgcaaggaagtccataattgaaaaacgcaaagaagagcttgagcgtcaaatattggagaagg

SEQ ID NO: 2493 - DNA, 1433 bp, Zea mays
  Clone ID: 700213782_FLI
cgcgaaggtcttcctccccgcgctcccgccgccgcccctcctcactgcccccgtcttctcgcggtagccggccgacgaatcggggtgccggcgcggcggcgatgtcggctgcggcggctgcgccagcgcaggctccaaggaagtgggagggactagtggacgaggtgctcgagagggaggtgctgggagcgtgcctggaccaggcccccgagcgccgccgcatccgcgaggctttcaaggacgttcagctcagcatcgaccattgcctcttcaagggacaatatagtggcatcagaacaaaggagtcatgtgagcataactctaggggtgtggagattttctcaaaatgctggtttccggagaatcgtcgaatgagagcaattgtttgtctttgccatggttatggagacacatgtacctttttttcttgatggagttgcgaggaagattgcttcagctggatatggagtatttgcactggactaccctggctttggtctttcagaaggacttcatggatatattccaagttttgatacacttgttgatgatgtagctgaacacttctctaaggtcaaaggaaatcctgaatatagaggactaccgagctttctgtttggccaatctatgggtggagcagttgcattgaaggttcacttcaagcaaccaaatgaatggaatggtgcaatactggtggcaccgatgtgcaagatagcagacgatgtggttccaccttggcccattcagcaagttctaatttttatggccaaacttctgccaaaagaaaagcttgttcctcaaaaggatttagctgagttggcattcaaagagaagaagaaacaagagcagtgttctttcaatgtgattgcctacaaggataaaccacgtttgcgaacagctctggagatgctgagaacgacacaagagatagaaaggcgtctagaagaggtttctttgcccttgatcattttgcacggtgaggctgatatggttactgacccggcggttagtaaggctctgtatgagaaagccaagagccaagacaagaagctgtgcctctacaaaggtgcgtatcacgctatcttggaaggtgaaccggaccagacaatattccaagttctcgatgatatcatatcctggctcgatcagcattccacaaaagaaggtatatcgttgtgaatcaggtagcgctgttcgccaggattgggtgaattcctttggcaatgctgtatcgcttccggttggggatcccagattcaacggtggggattccatttttgatatgaccctgtaaaattcttagttcagattattgatgtctccgtcatgtacctgaacgatgtagacgtacatatatgtaactgattaatgtgtatcaattgaccacgaattatttgggaaaacctcagttgcaaaacgccttttattttatc

SEQ ID NO: 2494 - DNA, 622 bp, Zea mays
  Clone ID: 700213785_FLI
ggccaaactgctagctgatattatgattcgtgacgaaaagatgaagcaaatggatgaccacctaaatcagcttcagttagagcatgccaagctgatggcagaatttgacaatgcacacaggtccttgtcagagctgcatgcgcaggtttctgagctggaagacgaggtagagaagcagaagcttgtgatatccgagagtgcagagggaaagcgggaggccatcaggcagctgtgcttctccattgaacactaccgcagcgggtatcagcagctgaggcagctgctgcaaggccacaggaggccgttggtgatggcaacctgataaatgaacaaagtccgtttgccaacaaattgcgcagttgcttgtctctgggcgtgttctatttgtagctctgttctttcacaacttgtgccgtgtagtttatgttataaagaattctgtgtggtatgtgtgtagaatgtaatgggatgggatatttatgttgttccttcatactcctatggctgtttttttccttgctgtccgctgatgaatgttatgatatgcttgaacctggtcttttcagtcacgactttatgtggtcaataactgaactgcacaatggaactcccttttcaatct

SEQ ID NO: 2495 - DNA, 976 bp, Zea mays
  Clone ID: 700213806_FLI
tcatttcccaccgcccttctgatgccagcggtcaagggattgttctgtcacttcaacatccaagatcaggagatgaagtagggtatctatttattgatggccaactacaagagatcaactggtttaaggagcgttatggtgcttggttcttgggagattatgtttgtgaagaacgataaggatccaggaaaattcagacaattggatgaaatattgtatgttgagggatatcctggttatcagcagctaatgaatgtagctaaccaccatatggaattggtttgtgaagtaaaagaagtatctaacatgaagttctttaggctggacaactccaaggtcttatcttggttgtgctgcaaggtatacgacctaaaggaggtcttccccaagttgggtaaaaattatgccgcccaaacagaaaaagaaaaattgaaggaggctgtccaaatgatccgtgaatatctgaaggacgaaccatggttagcattactatgcaagaagctgcagctggatatcaatgcgatcactgttgatgcgaccaccaaaactgctgaagcttcggtttatgcggacagttgtccggcacctgccctcccctctgagagtaagactgcgaatggtggtgccaagtcaagcaaagggaggccagcgaagaaagcaaagacagaggtaggatccaagaacatcaaagatatgttccgaagggtcacgaggagtggatcaggatcatgatgccttcctggaactttcgtgtgactgacgcctgttttgatgcatttggtccagcattcccttgttgaaaatctatgtatctgagttgctgtgtctaacaacagattgggattatattgtagcgttaattgttgattcaggcagtgaactctgctagtgtacaaccctccctcccgtcccggatgtatttgtaccacagttgcttgtagtgccgttgtctgcagtagtctatccaaagtttatt

SEQ ID NO: 2496 - DNA, 621 bp, Zea mays
  Clone ID: 700213808_FLI
catttcgtcgcagtagtcggcagtcgaaaccctagtcccctcgctttccttccactcgccgtcgcggcgccgatagagccagagctgaaaggcgtaggaaaagctggtggaggaggggatggaccggatcgtaggcagcaagtacaagctgggtcgcaagatcggaagcggttccttcggggagatctacctcgcgacgcacgtcgacacctacgagatcgtcgccgtcaagattgaaagcagcaaaaccaatcatccacagttgctatatgaggccaaactgtacaatgctcttcaaggagggactggtatcgcaaacataaaatggtgcggcattgacggcgatgaaaacattcttgttattgatttactcggaccaagccttgaagatctgtttgtttattgtggccggagattctcactgaagacggtcttgatgctagcggaccagatgataacaagaatagaatttatgcattctaaaggctatctgcacagagacatcaagcctgataacttcctcatgggccttggtcgaaaagctaaccaggtttatgtaattgacttcgggcttgcaaagagatatcgtgattcagccaccaaccgccatataccttatag

SEQ ID NO: 2497 - DNA, 944 bp, Zea mays
  Clone ID: 700213874_FLI
gattctgtgtcgaattatgagtgaaacagggcacactgtacaagtcactaacctctcgagcagagtatctgaaagtgatcttcatgagttcttttcgttctctggtcctattgagcatatagaacttatcagatcagaaggatacggtgccactgcttatgtgacattcaaggaacgctttgccttggaaactgcagtattgctcagtggggctactattgtggatcagccagtatgcataacctattggggacaacctgagggaacttttaatttctgggacaggccaacttgggaggttgaagaggaaatcgaatacaggaactaccaaacatgccagtacaacactactccgcaggaagcttttacagtggctcaagatatcatgaagacgatgctagaaaaggggtacgtgctcagcaaggatgctttggctaaggctagagcctttgatgagtcctatggattaacagctgcagcagcagccagggctgcagagctgagcaagagaattggtttaactgatagggtcaatgctggtgttggtgcaatgcgatcagtcgatgagacatatcgcgtaagagagacaaccaagacggttgctactgccactggaagaacggcagcaaaggtggtaaatggcatcgtcaccagcagctacttctctgcaggagccatgatcttgtctgatgctcttactagggctgccaaggccgcggcagatctggccgctcatggtaggcagaattaagtgaaaaatagacataaagttcatccttgcagttactaaacatgaggacgaacaccttcaagtgatgttgcttgatgtatatttatgacacaacagtgtcgtaaattaaaaggagacgatcactgcgtttggaacaaattgtttgctctgataagtttgattattgcaaatgtagtcaagtgatcgtgcagtc

SEQ ID NO: 2498 - DNA, 688 bp, Zea mays
  Clone ID: 700213881_FLI
ctacaccagcttcgcgcaccacctggtttcggctcccaagcaggtggccctgcagctcgcggagggccacacgtgcctgaccgagcagtgcccgtccgtggaggccgagggcgcgcactgcgagggcctggcgttcgacgtgcacctccgggtgcggaacgcgggcgagaggtccggcgggcacacggtgttcctgttctcgtcgccgccggcggtgcacaacgcgccggcgaagcacctgctgggcttcgagaaggtgtcgctggagcccgggcaggcgggcgtggtggcgttcaaggtggacgtgtgcaaggacctcagcgtcgtggacgagctgggcaacaggaaggtggcgctgggcagccacacgctgcacgtcggggacctcaagcacacgctcaacttgggagtctgatggccgagagggaaatggctaccaagtaccaacgtgaaggcagttggaatttggagggctggatgggtcggaggcagtgggaagagaaggttgtcagaattggttcggcaggtgtctaataaaggcttcctgttgggaaagaattggatccacgggcagcttttagtcatttgtttggaggcattggattcattggagggtcgatttgtgattgtaatcacgattaatgtaatggattggaaattcggaaggggccagatctctttttcatac

SEQ ID NO: 2499 - DNA, 1639 bp, Zea mays
  Clone ID: 700213924_FLI
gtttgggaactgcttggcatccatatctgatgagttacctcctcacatatttgaactgctacaacaatgcatcgacagcaatgcagatttgtctggggatggagagatagagattgacatccatgctgtcagtgatgacttgttatttgagctgaagaaacatgttgacaagtatttgcaagagaaagagcagagccagcaggtgaaatctgagccctccgagaatgaagctgtgaatgtatctggccttagccactcttctacaaatccttgcaaaggcggcgaacctatcgaagaggatgtggacatctgtggcaatgcctcacctatcatgctagacaaagatgcacaaatcaggaatagcaagtgtggtagtccaagtagttccagcagcgactctgaatcatcttctagcgattctgattcaggcagtgactctgaaagcgaatcagaaaaagttggcagccctggaaagcttgcgaaggggactaagaaacctgatcagctggtggagcaagaaaagagtgatgttattagtccagctgatgccaaccgtcctgctgctattgtggggcttcatggggaggacagtgagtcaaagcctgcaccagggggggaaaactcagaacccgatacacaagtctcaccagacaggctattgcgagcagcccttttgaggagccgttatgctgatgtgattgtcaaagctcgtggcattcttagtcagggtggagacaaacaggaggagctggaaaagctacagaaggaagagaaagagcgcttgttggctgaaggtactgcagccatggaggcttgtagagccgaagctgaagctgaaaagaagcgtaaacggaattttgagagggagaaggctcgtcaggccctacaggagatggagagaactgtagaaattaatgataacctccatctcaaggatttggaattgcttggaacagccacaacagaacatattgtaagctctgttgatgagactagtccagaacgctctcatgatggcatggccggctatcatccaggagctgtcaatccttggagcaacttggactgttcataaaggtagacgatgaggaagacgacgagcagtgttccctgcattaaagaaagaagagaaaggagaaatcagctgatggtgctgtgtttttccatgccctgtcacgggctaggggctggtgccaacctattgatccaaagtgatcacctgttgcgggccatcatgtgtggcaatggttctaaactggggtggtgagagccgtccattttgttaaaaatatgcatgggaaggatgaagatcatcttgcatagtcatttgcttccaggaggcgcacaggaggtggagtaaaaacgaacgtatttatggtgcctagaggacggttttttcagccactgccaaaacggcttgaatgacgccaccgaagtagtggagttcaaatggctcattgtttgccgcaacctcaatttcaagcgggtttgttcagcggcttatagcttcttctctccttttgttgtctcatctgttttagattgtagaatttgggctagttgcttcctgctgtaaatccgaattttgatgtagtgacggaagtgctacctttttgttgagcatgatcgaaaagtttac

SEQ ID NO: 2500 - DNA, 1409 bp, Zea mays
  Clone ID: 700214015_FLI
cgcagcgctagggttcgggggttgcgatggcggcggcggcgaggcagcgggggacggtgaagtggttcaacgacaccaagggcttcgggttcatctcccccgaggacggcagcgaggatctcttcgtgcaccagtcgtcgatcaagtcggagggcttccgctcgctcgcggagggcgaggaggtggagttttccgtctcggagggtgacgacggccgcactaaggccgtcgacgtgaccggccccgacggatccttcgtcaggggcggcggaggcggaggaggcggcggcggcggcggctacggctcccgcggcggtggcggatctggcggcggcggtcgcagctacggtggtagctggggcggcggccggagatccgcgcccgacgccgctttcggctccgtcctctccggcaccgccggcgacgccgcccccagcgaccagtggttcgtcgacgcgctcaacgcccccgcgccgcaccccatcgagcgcgtccgatccgagtcctcctcgatcgtctccgacgtccccgactacctcttcagcctcgacagcccgtccgacgaccccagccccggcccctcggcggctcgcgccaagtccgaccccgcggagactccgcaccaccacggcgacgacgtgccgccttccgctcgacagataccgcacgtcgcaggaggagcgtcatcgtggcccgccccgccgccgccgtacatggcgcagcctatgtactacttccccgtgccgccaccggtccactacctcgaccagtctgcgcagagtggctacatgcctcgcccgatctaccacattgtcggtggcggaggaagcgaggcgcctggcggagatcttcacgcggccggcggagtctacggcgtctcgcaccacatgcaggggttcccgccgatgatgtacgcgccgccgcgcgcggtcatctacaactacaagtcggaggggatgccatcgctgcctccggaaggtggggcacactcttcctaggtgcatcggctacttcacatctctgaatcctgattattgttgcagatgcctaagctaaggagttttgcgtggtaatttttttatcgattcgtctagagtcttgttcgttgttttgtatagatggaggggttgatggtgatggatagatattaatgcagttttcgtctagtggaaatatattcgtgaaatgtatatcatactaaatagtatagtatttggtgtgattaattaatattctagttaatgtaatgtgggattcatataatctaggtggttctggtcttatagaaaccatttttgggcattttatatttacataaactggatgttgggtgaatgttctaagcagtatgtgctgtgttgaacctcaatcacttatgagtggttactaaatttgaatttgatgtcttc

SEQ ID NO: 2501 - DNA, 202 bp, Zea mays
  Clone ID: 700214053_FLI
gcgatactagaactagtcgcgcgtaaagcgtaataactcgcggacacggctgccagccagccccagccgcccgtgaggccgcgtgacgcgaaacgttccttcctcgcgcggcttaaagcgtttcctctctttcccctcgcagatctcacccaccgtctacctctcagtttcgatcgccgtcgagctccaccacgcttaattg

SEQ ID NO: 2502 - DNA, 962 bp, Zea mays
  Clone ID: 700214077_FLI
gctagccccacgcgatctgcctgtcccacgaggcgaatcagtagcttcgctccggcctccgggggctccgcggctccgctagtccgctccggcgccacggcccggctcggaggggcgtttcggggagggcgaagcggacgccagcgtttccgtttggttggcgtggaggcgaagctgctgctggagcgctacccgggtttcctccgttcactagcgctcgcgatctgatgatcgttggctagttgctctgccagagtcccagccagcgctcctccgccatgatccaggcggtgatggtgatcagcacccaggccaagccccgccttctcaagttctacagtttccagccacccgagaagcatcaggacctcgtccgctgtgtcttccaattactctctgcaaggcccgagagcgcgagcaattttgtcaaggtggactccatctttggcccgggaacaaaaatggtctacaagcatttggccacactatactttgtttttgtctttgatagctctgagaacgagcttgccatgctcgacctcgtacaagtgtttgttgaaacattggacagatgcttcaagaatgtatgcgagcttgacatcgtatttaacttcaacaagctgcacaccattttggatgagatgatatcggggggacaggtgatcgaaacaagttcagaacagataatgaaatctgtggaagagattgaaaggctggagaaacaatcgagcacaaccagcttcatacccaagtcgattacagagcgttttacccgttgagcttccactcgtttccagaacaatgtgacatttaaggtgtgaacagaactgagatatactattcagtctcattttagttctccgataagaccttgtatgcccccgccccccggctgtattctgtaagcctgtaacctggatatgaatgcggcatctgcagtccaataatactgcctgcgttat

SEQ ID NO: 2503 - DNA, 513 bp, Zea mays
  Clone ID: 700214091_FLI
gcggccgcggcaagaagtgcgccgtcctgatcggcatcacgtacggcggcgcgcgccggggctgcggcgagctgcggggccccatcaacgacgtcaagtgcatgaggcagctcctctgccagcgcttcgccttccccagcgacggcatcatcatgctcactgacgaccagaaggacccgttccgggtgcccaccaaggacaacatccggatggcgatgcagtggctggtgcaggggtgcagcagcggcgactccctggtgttccacttctctgggctgggcgcgcaggtcgccgacgcggactgtgacgagcaggacgggtacgacgaggccatctgcccggtggactcgttccagaagggccccatcctggacgacgagatcaacgagaccatcgtccggccgctggtgcccggcgccaagctccacgccgtcgtcgacgcgtgccacagcgattccgtcctcgacctccccttcctctgcaacatgtccaggaccgggaggtcgaggacgg

SEQ ID NO: 2504 - DNA, 451 bp, Zea mays
  Clone ID: 700214115_FLI
gttttcgcgccgccgccgccgccgccgccgcagccgcaacaatgccgtcgcacaagaccttccggatcaagaagaagctggcgaagaagatgcgccagaaccgccccatcccctactggatccgcatgcgcactgacaataccatcaggtacaacgccaagcgcaggcactggcgccgcaccaagctcggcttctgagcgtcgggattggccggctgctgcgtcggaaggctagggtctaagagctatcttccttctgttttatcaatgtgtcagtttttctgtaagctagcaagtgttgctatgacgcttttattaagattctggtgagcggtgatgttaagagaaaattggcactactgtggtgtaccccaagattccttgcagcattgctatgctaagtaaagaaccctttatcttattatatatgtagtgttgcattgattgaggtc

SEQ ID NO: 2505 - DNA, 972 bp, Zea mays
  Clone ID: 700214122_FLI
gtgattttagccgccgccgctgctcatctcacatccctcgagaagacgcctgctcctcgccgatcgatacgatggccgtcttctccgacctccacaccgccgacggcctcaagtccctcgaggctcacctcgccggcaaaacctatgtgtctggtgactccattactaaggatgacattaaggtcttcgccgcggtgccgtcgaagcctggcgctgagtttcctaatgccgcccgctggtacgagaccgtctctgcggctgtagcctcaagattccctggtaaggctgttggtgtaaatctgcctgcgggatcagctcctgcggcagctgctcctgcggatgaggctgaggatgatgatgaccttgatctttttggtgatgaaactgaggaggacaagaaggcagctgatgagcgtgccgccgctgccaaggcctcttctaaaaagaaagaaagtggtaaatcctccgtccttatggatgtcaaaccatgggacgatgagactgatatgaagaagctggaggaggctgtccgcagtgtccagatggagggtctgacttggggagcatcaaagcttgtgcctgttggatacggcatcaagaagatgactatcatgttgacaattgtcgacgatcttgtgtccatcgacactctaattgaggaccaccttacgcaagagcccatcaatgagtacgtccagagttgcgacattgtggctttcaacaagatctagagttcagtttctgagattgggcaacggcagcggctcagctcgtcaagtttgtgctgggatgccagtttatcccttctagtctattacagaaatgttgttcggagctgagtctattataaacatcttggtctgagtttattgttgagtggtgccagtttttttcaatatacatttatcttaaaaacagcggtactgatgtttttttgtctaaagttaatgagtttgcaatggttctgagtct

SEQ ID NO: 2506 - DNA, 2261 bp, Zea mays
  Clone ID: 700214295_FLI
ggccggaatctgaaccgaatgaagtctagtgcagtggtggtggtggtagtgtagagagccctgcccttccgatccggtccggtccggctggattcctcactttagttttttttttcgcttcttctctgatcagatgcaatctcgccgttgccgtccgtagcaaccgcacgcttcctcgctcgccgcgaaccctagagagcaggtgtcggtgtcgcggctcgaccatggccttctggtggccgctgctggtgctcgccgccgcatacgcgctctgtcgcctgctcctcttcctcatcccgcccaccgtcccatccatcgacgtcgacgcctccgacgtgttggccaaggaggacagcttcatctacataccgagacggggtaaatcaactcagactgacaaggtccaatgctatgaaccagcgaccatgaaatacttggggtacttcccagtggtgactcctgatgaggtcaaggaacatgttgcacaatccaggaaagctcaaaggatatgggcaaaaagcagcttcaagcaaaggcgccagtttcttcgaatcgttctcaagtatatacttgaacatcaggatctcatatgcgaggtatcatctcgggacactggaaagactatggttgatgcttcattaggagagataatgaccacctgtgagaagattacctggcttttggatgagggcgagaagtggctgaaacctgaatacagatctactgggagatcaatgctgcataagagagcaaaagttgagttttaccctcttggagtgattggtgcgattgtatcttggaattatcccttccataatgtttttaatccagtgctagcagcagtattctccggtaatgcagcagttataaaggtctcagaacatgcgacttggtcgggctgcttttattttcgtattatacaagcagctctttcagctgttggtgcacctgagaatctggtgcacataataactggttttgcggaaacaggccaagctcttgtatcatcagtagacaaaataatatttgtgggatcaccaggtgttggaaaaatgatcatgaaaagggcgtcggagactctaatacctgtaactctggagcttggtggcaaagattcatttattgtgtgtgaagatgtagatttacccagtgttgttcaagttgctactagagctgctctgcaatctagtgggcagaattgcgctggtgctgaaagattttatgttcacgatgacatctattctgcctttgtttcacagatagtgaagacagtcaaatctataagtgttggccccccattatcaggcagatatgacatgggtgcaatctgtatgattgagcactctgagaaacttcagaatcttgttaatgatgctctagacagaggtgccgaaattgccgtcagagggagctttggcaatcttggtgaagatgcagttgatcaatttttcccaccaactgtcctggtgaatgttgatcacacaatgaaaattatgcaagaagagacatttggacctattataccaatcatgaaattcagttctgatgaagaggctatcaaacttgcaaacgactcaaaatatggtcttggctgtgctgttttttctggcaaccagaagcgtgccatcagaatagcgtcccagttacactgtggggtagcagcaatcaatgattttgcttcaagttacatgtgccagtctttgccattcggtggtgttaaagacagcggattcgggagatttgctggcgtagaaggcttgcgagcttgctgccttgtgaagtctgttgtagaagatagattgtggccatatattagaacagtgatcccgaagcctatccagtatcccgtctcagagcatggatttgagttccagcagttgcttgtggagactctgtatggctatagcgtgtgggacaggttgcggtcccttgtgaatcttataaagatggttaccgagcagaattctgccccggcttcaaatgcgaccacgaagaaaaggcgatgagacgaatgcccggggggttcattgaatctgtttatggtaagtctgatctctggacgctgtaaacctccccaagctgctgtaatcggccttgtttgctctctgaaacaatctcgagcctgggagcttgtgtattcaagcgctttagctttcatttcagaaccttcttttttttttctctctctccctctctccctttcttattaacacccacatgcgtgggcaatggaaatgaaattccactgtggatgtgctagg

SEQ ID NO: 2507 - DNA, 815 bp, Zea mays
  Clone ID: 700214317_FLI
gaagatcgtcgacccagacaccagcgcgtcgctgggacggaaccagccaggcgagatatgcatccgcggcgaacaaatcatgaaaggttatctgaatgatccagaggcgacaaagaacaccattgataaggacggatggctgcacaccggggacattggttatgtggacgatgacgacgagatcttcatcgttgacaggctgaaggagataatcaaatacaagggcttccaagtacctcctgcggagcttgaagcccttctcatcacacatcctgaaatcaaggatgccgctgttgtctcgatgaaagatgaagtcgccggcgaagtcccggtggcattcattatacgcagtgaaggctctgagatcagtgagaacgagatcaagcagtttgttgcaaaggaggtcgtgttctacaagaggatcaacagagttttcttcacggattctatcccgaagaatccctccggcaagattcttaggaaggacctgagagcgcggcttgccgcgggcatcccaagcagtgacaacacacagtccaaaagttgatacgtactttcgtactattcttttctagctgtgccaaaaatcatgctgtgctctattcatgagatggcaatggtatacacaaaacgccaagcggtcgttatcgattcttctagatgggcaagggtaaggtatacttcgtttgtgtccgacatattatgtatttgtatcatgtatagatacgttttgttgacaacaagtgctaattataatgtataccatgtttgggaacctattgttcttgttaataaagagtcgacccctgtcctgg

SEQ ID NO: 2508 - DNA, 807 bp, Zea mays
  Clone ID: 700214572_FLI
ggagagatccggcccttggcgcggtcgccggagagagcggcatggggctctgggactcgctcctcaactggctccggagcttgtttttcaagcaagaaatggagctctccctcgttgggttgcagaatgctgggaagacgtcgctggtcaatgccgttgctacaggtggctacagtgaggacatgattccaacggtaggcttcaatatgcggaaagtcaccaagggaaatgtcacgattaagctttgggatcttggtgggcagcggagattccgcactatgtgggagcgctattgccgtggagtttctgctattctgtatgttgtggacgctgctgaccgagatagtgtcccaatcgcgaaaagtgagttgcatgatctgctgacgaaacagtctttggctgggattcccttgcttgtccttggcaacaaaattgacaagtcagaagcgctttcgaagcaggccttggttgatcaacttggactggaattgataaaggaccgggaggtttgttgctacatgatctcgtgtaaggattctgtgaacatagacgtcgtcatcgactggcttatcaagcactctagaacagcgaagtaggctttctgtgtgtttgtatcgcttgatgcacggtgttttatcttttgtgaatctgcgcttcccagaagcctggttccttggtccccatgttaaaagcggccaccttgtaatttatggtttctttggtgtcacagacgaactgcatggtatctagactagaaacatgtattccctttgtaaatcctttgaacctttgattattcttactgtg

SEQ ID NO: 2509 - DNA, 1334 bp, Zea mays
  Clone ID: 700214635_FLI
gtcgcatcccatctgctatccttggttgccgcttcctccaaagccactccaaacccccgcttccagaaccttctcgaaactctccgcctcctcctctactcgctccgatggcgaaggaaccgatgcgcgtgctcgtcactggcgccgcagggcaaattggatatgctcttgttcccatgattgctaggggagttatgcttggtgcagaccagcctgttattctgcacatgcttgatattccgccagcagctgaagcccttaatggtgttaagatggagttggttgatgctgcatttcctcttctgaagggagtcgttgcgacaactgatgttgtggaagcgtgcactggcgtgaatgtggccgtcatggttggtggattccccaggaaggagggaatggaaaggaaagatgttatgtctaaaaatgtttcaatctacaaaacccaagcatctgctcttgaagcccatgcggcccccaactgcaaggttctggtggttgccaacccagcgaacaccaatgctcttatcttgaaagaatttgctccatcaattcctgataggaacgttacttgcctgacccggctggaccacaacagggctcttggccagatttctgagagacttagtgtccaagtcagtgatgtgaagaatgttatcatctggggtaaccactcgtccactcagtaccctgatgttaaccatgccacagtgaagacttccactggggagaagcctgttcgtgagcttgttgctgatgatgagtggctcaatggcgaattcatcacaactgtccaacagcgtggtgctgcaatcatcaaagcgagaaagttctccagcgctctctcagctgctagctctgcttgtgaccatattcgtgattgggttcttggaacccctgaggggacatttgtttccatgggtgtgtattccgatggttcatatggtgttccttccggacttatttactcattcccagtaacatgcagtggtggtgaatggaaaatcgttcaaggcctcccgatcgacgagctctcaaggaagaagatggatgccactgcccaagagctgtcggaagagaagtcgcttgcttactcatgcctcgagtaaattataccacacacccagagagcaattgctaccccctgtgttttgaataaaagaaactccagctccgtccatagattctcactcagaactgctgcacgtcgctgtgcaggcgtgttgctggcttcgcccagcgtgtacgagactacgagggcttgtagcccctttttggcctgatgacttgcgagacatttattgaaaaaaaacttgcaattgtaccggttgacgatg

SEQ ID NO: 2510 - DNA, 2351 bp, Zea mays
  Clone ID: 700214676_FLI
cgctgtccgagaccgccgagttcgcgcgccgctgggtgcccttctgcaagaagttcgccgtggagccgcgcgccccggagttctacttctcgcaaaagatcgactacctcaaggacaaggtgcagccgacgttcgtcaaggagcgccgcgccatgaagagggagtacgaggagttcaaggtgcgcatcaacgcgctagtggccaaggcgcagaagaagcccgaggaggggtgggtcatgcaggacggcacgccgtggcccgggaacaacacgcgcgaccacccgggcatgatccaggtctacctcggcagccagggcgcgctggacgtggagggccacgagctgccgcgcctcgtctacgtgtcccgtgagaagcgccccgggtacaaccaccacaagaaggcgggcgccatgaacgcgctggtgcgcgtctccgccgtgctcaccaacgcgcccttcatcctcaacctcgactgcgaccactacgtcaacaacagcaaggccgtgcgcgaggccatgtgcttcctcatggacccgcagctggggaagaagctctgctacgtccagttcccgcagcgcttcgatggcatcgatcgccacgaccgatacgccaaccgcaacgtcgtcttcttcgacatcaacatgaaggggctggacggcatccagggcccggtgtacgtcggcacggggtgcgtgttcaaccgccaggcgctgtacggctacgacccgccgcggcccgagaagcggcccaagatgacgtgcgactgctggccgtcgtggtgctgctgctgctgctgcttcggcggcggcaagcgcggcaaggcgcgcaaggacaagaagggcgacggcggcgaggagccgcgccggggcctgctcggcttctacaggaagcggagcaagaaggacaagctcggcggcgggtcggtggccggcagcaagaagggcggcgggctgtacaagaagcaccagcgcgcgttcgagctggaggagatcgaggaggggctggaggggtacgacgagctggagcgctcctcgctcatgtcgcagaagagcttcgagaagcggttcggccagtcgcccgtgttcatcgcctccacgctcgtcgaggacggcggcctgccgcagggcgccgccgccgaccccgccgcgctcatcaaggaggccatccacgtcatcagctgcggatacgaggagaagaccgagtggggcaaggagattgggtggatctatgggtcggtgacagaggatatcctgacggggttcaagatgcactgccgggggtggaagtccgtgtactgcacgccgacacggccggcgttcaaggggtcggcgcccatcaacttgtctgatcgtctccaccaggtgctgcgttgggcgctggggtccgtggagatcttcatgagccgccactgcccgctctggtacgcctacggcggccggctcaagtggctggagcgcttcgcctacaccaacaccatcgtgtatcccttcacctccatcccgctcctcgcctactgcaccatccccgccgtctgcctgctcaccggcaagttcatcattcccacgctgaacaacctcgccagcatctggttcatcgcgctcttcctgtccatcatcgcgacgagcgtcctggagctgcggtggagcggggtgagcatcgaggactggtggcgcaacgagcagttctgggtcatcggcggcgtgtccgcgcatctcttcgccgtgttccagggcttcctcaaggtgctgggcggcgtggacaccagcttcaccgtcacctccaaggcggccggcgacgaggccgacgccttcggggacctctacctcttcaagtggaccaccctgctggtgccccccaccacgctcatcatcatcaacatggtgggcatcgtggccggcgtgtccgacgccgtcaacaacggctacggctcctggggcccgctcttcggcaagctcttcttctccttctgggtcatcgtccacctctacccgttcctcaaggggctcatggggaggcagaaccggacgcccaccatcgtcgtgctctggtccatcctcctcgcctccatcttctcgctcgtctgggtcaggatcgacccgtttatcccgaaggccaagggccccatcctcaagccatgcggagtcgagtgctgagctcacctagctaccttctttgttgcatgtacggacgccgccgtgcgtttggacatacaggcacttttgggccaggctactcatgttcgacttttttttttttaattttgtacaagatttgtgatcgagtgagacagagtgttgggtgtaagaactgtgatggaattcactcaaattaatggacatttttttttcttc

SEQ ID NO: 2511 - DNA, 2249 bp, Zea mays
  Clone ID: 700214692_FLI
gggcgacttcctcgctggtagcgacgaaggaagcgagggtggtgactctggactggagtcagacgagtctgatgacctcgaggcaaaatcacgagcaattgatgagcagaaactcaaggcggaagaagatgcagaggaggaacttcaaaccaacataagatcagaatctgatgagttcagattacccacaacagaggagctggaggaagaggcacacagaccacctaacctaccaaatctcaaaaggaggatttcagaaagtacgcacatctaataataccgttcctatttaccatgtttcatgtatttctactattattacgccctatcggatttgtagaatacaggttatattgtgctattttattatgagcattgagcagatattttgcactgactgctttcacatatactgatactgattttcttatctagttgttcgagtgctctcaaacttcagcaagctgaggcagaaagatgttccacgaaaagattatatcaaacaactgaaaactgatatcatttcatactatggatataatgattttctagttgaagcattaattgagatgttcccagctgttgagcttgttgagttactggaagcctttgagaaaaggccgcccgaatgcttgcggacgaatacactaaagacccggaggagggatcttgctgctgctcttataccaagaggatttaatttggacccgataggaaaatggtcaaaggtaggattagttgtctatgactccaccatttcagctggtgctactactgaatatatggctggtcattacatgaaacaaggtgcaagttcgtttttaccagtgatggcacttgctccacaggagaaggaacgaattgttgatatggcggctgctccaggtggtaagactacgtacattggcgctcttatgaagaataccggaatcatctatgcaaatgagttcaatgagaaaaggttgcatggacttttgggaaatatccatcgcatgggtgtgacaaataccatagtttgtaactatgatggtaaagagctacccaaagttcttgggatgaattcggttgacagagtattgctggatgctccctgcacaggaactgggaccatttggaaggatctacaaattaaaacatcaaaggacattgaagacatcaggaactgtgcctttgtccaaaagcaattgctgctagctgctattgatttggttgatgccaactccaaaactggtggttacattgtttactcaacgtgttcgataatgattccagagaacgaggcagtaattgactatgcacttaaaaagagaaatgtaaagcttgtgccttgcgggttggattttgggcgtccaggattcatccggtaccgggagcatcggtttcatacttctttagaaaaaacaagaagattttatcctcatgtcaataacatggatggattttttgtagctaagctgaaaaagttgagcaatacaatcccggtgacgtctgagccgtctaaagcatctgaagaagcagctaaggttgatggcgaagatgagaaagctatttctaatgaacaagagactggtgttcctgataaagatgagaaaactgttgagataaaaaatcataaaaatgtgactaatataagaacaagtgtcaccaaagagaatggaagccataaacgtgaatccaataagccaggaaagcatctcaagaaaaataagaataatgctaccaaagaaattgatggctctgagagcagtgaaacaaatagaggtgggaaagaagagcatcgcgaacaaaccaagaaaatgagtcacaagaggaagtttgcttctgatagatccaaaaaatctggccccgagagcttctcgggtgtcaaagagaagagacaggtcagtgacaagaagcggaaaaagaaatggcaattcaagctgaggcgtgattgggaagctgaaaagaaaggtgacaagaggaggaaggtatgaaggagtattcagatgtccacaggccccaatgaaatttgatgggtgtgtaagggcaaccgagaattttgagcaagcacgagtttggagccaacgaaaattttgatgtatgaaatagcgattgtagtttattattttttattcggtgtacgtctcaagttttatctttaatgagtgacatatctggcagggaaactgaagcatattattatcttgctgaatgctatgtgaatcctgctgtatgtgttataaaaaaatcatatctgagctactagctgc

SEQ ID NO: 2512 - DNA, 734 bp, Zea mays
  Clone ID: 700214790_FLI
agccaacgtgatcagagagggatatatagctagctagctagcatagcatggcgcttgtagccgacgacgacgccgagctcaaggccaaggccaaggccaaggccgaggtctactacggcgacgaggcctgtcagttgtgcgcgcagctcctgctgagggaagcaggcctccccaacggcctgctgccgctggaggacctgacggagtgcggctacgtccaggagaccgggtacgtgtggctgaagcagggcaggagggtcgaccacgtcttccggagcctcggacgcctcgtctcctacggcgccgagatcaccgggtacgccgagaagggccggatcaggaaggtgaaggggataaagaccagggagctcatgctgtgggtgcccgtcgaggagatcgccgctcttggcgacccggcggctggcgggaagcttgtctgcaagagcgttgctgggatcaccaggaccttccctgcgtctgccttccatgtccctgagaaggcggcggcggcggaggaggtgaaggtggactgtgccagggcgccgcccgccacaccggtgctcgtcctcatggacagatcaggagctccaccagttgttaagaacaactgatgcttgcgtgcttacgaacgaaagcgaaccatgcatgaccccccaaccaagttcatttcatcctttcatgcatgtactatgtatgtagctctacatatatatatattgctactactatcaagc

SEQ ID NO: 2513 - DNA, 1023 bp, Zea mays
  Clone ID: 700214818_FLI
cgaaccgaatcctccgcaactcgccgccgccgggaccgaccgacccggtcctatcgatcgaggatgtcgtacgcctacctcttcaagtacatcatcatcggcgacacaggcgtggggaagtcgtgcctgctgctgcagttcacggacaagcgcttccagcccgtgcacgacctcaccatcggcgtcgaattcggcgcccgcatgatcaccattgaaaataagcccatcaagctccagatttgggacacggctggccaagaatcattcagatctattactagatcatactacagaggtgctgctggtgcccttttggtttatgatattactaggagggagaccttcaatcatctcgcaagttggttagaagatgcaaggcagcatgcaaatgctaacatgactgtgatgctgattggaaacaagtgtgatctttctcatagacgtgctgtcagctatgaggaaggtgaacagtttgccaaggagcatggtctggtctttatggaggcatctgctaaaactgcacaaaacgttgaggaggcattcattaagaccgctggtacaatatacaagaaaatccaagatggcatatttgatgtatcaaatgagtccaacgggatcaaagttggctacgctgttcccaactcatctggaggtggtgctggctcgtcctctcaggctggtggctgctgcagttgagtggtggcagcaagtcatacaaatgcacaaggttctccctgcagtatcttgatgtttgcctatagctggacccggatgatttgttctttcagccatcatgtttcaatccataagcaaatcatcttcagtgtttaactgtccttttgcaattcacgattactgctccctatgtgtcttctgtaaccaaattgaaatcagttttatggtattcatttgttcaacatgtatatatgcttctctggctagtcatgttttctgcaaccctatctcaagttgaaaattggcagtgctggacaatctctccttgactgcattacttgattctgt

SEQ ID NO: 2514 - DNA, 767 bp, Zea mays
  Clone ID: 700214944_FLI
ccattcccgagtctccagccaaccacatccagtccaccccatccccctcgaccccgacaaccccgagtcccgacccgatggcgcccaaggccgagaagaagccagcggagaagaagccggcggccgaggagaaggcggagaagacgaccgcaggcaagaagcccaagtccgagaagcgcctgcccgcctcgaagtcctccggcaaggagggcggcgagaagaaggggaagaagaaggccaagaagagcgtggagacctacaaaatctacatcttcaaggtcctaaagcaggtgcaccccgacatcggcatctcctccaaggccatgtccatcatgaactccttcatcaacgacatcttcgagaagctcgccggcgaggccgctaagctcgcccggtacaacaagaagcccaccatcacctcccgcgagatccagacctccgtgcgcctcgtcctcccaggagagctcgccaaacacgccgtctccgagggaaccaaggccgtcaccaagttcaccagcaattgagcagcctgcagcgtccacggatttgttaggtctccccttcttacaagggttcttcgtcgtgtcctctacccctccccctccccgcctatgtatgtgctgtgaaattgttgatgttctcgtcgggtgaacaaaggccagtagctagcttgcctgcttcataaatcgtgccggattgtaatgggcctcttagatttgacgcccctgttttggaatatagttgtatccgtgccttccctgcttgct

SEQ ID NO: 2515 - DNA, 695 bp, Zea mays
  Clone ID: 700214966_FLI
ggggccgccgttaaaccctaccgctgctctcgtcaccatctctccgactcacccctctgtcctcgcaagccgccgccggccaagtcctgtccctctcccttgtctggttcggatcgtcgttgctagccaggtgctggatccgtagcggcggcggcggccatggacaagagcatgctcggcgacctggacggcctccccgaggaggacaagatgcggatggccgccatgatcgaccagctccagatccgcgacagcctgagaatgtacaattcgctggtggagaggtgcttcacggactgcgtggacacgttccggcgcaagaacctggacaagcaagaggagtcgtgcgtccgccggtgcgcggagaagttcctgaagcactccatgagggtcggcatgaggttcgccgagcttaaccagggtgtggccacgccggactaagaaacacgctgccgctggctggctgctctcgttgcgcgcccgccgccaggtttctggctttcgctggcacagatttgtagccgacaaaaggatttcagcacttcccctgcctgagatatatgcgttttagagccgaacgctgggtgtcagattgaataaaaactgccttgagaagtgttgtatttcgtttcatacttgtgtcaacgatttcttcttttttttacgagccacataagtgcggtttttttatatat

SEQ ID NO: 2516 - DNA, 643 bp, Zea mays
  Clone ID: 700214976_FLI
ccaagacctcctcagacccgagaagcgcagctgcggccatggacgccaccggcactggagctggagggaaggcgaagaagggagcggccggtcgcaaggccggcgggccgaggaagaagtcggtgacgaggtccgtgaaggccgggctccagttccccgtcggccgcatcgggcgctacctcaagaagggccgctacgcgcagcgcgtcggcagcggtgcccccgtctacctcgcggccgtcctggagtacctcgccgctgaggtcctggagctcgccggcaacgctgccaaggacaacaagaagacgcgcatcgtcccgcgccacgtgctgctggcgatccgcaacgacgaggagctcgggaagctgctgaccggcgtgaccatcgcccacggcggcgtgttgcccaacatcaacccggtcctgctgcccaagaagacggcggagaaggcgtccagcggcgggagcaaggaggccaagtcgcccaagaaggccgccaagtcccccaagaaggcatagggtttggaggcggatccgatgttgtcatgtgtaggttgtaagcgggcaatgtgattggctgtgtatctgcttcgctcaagttgctttatgtcattcctaatggaataggaaatgccgtgtttctt

SEQ ID NO: 2517 - DNA, 1405 bp, Zea mays
  Clone ID: 700214985_FLI
cccaatccaaaccagacaagcaaggaatcccccgatggctcatcgcgttctcctcctcctctctctcgcgtcggccgccgcggttgccgccgccgtcgacgcggaggacccgctgatccggcaggtggttcccggtggagatgacaacgatctggagctgaacgcggagtcccacttcctgagcttcgtgcagcggttcggcaagtcctacaaggacgccgacgagcacgcgtaccggctgtccgttttcaaggccaacctgcgccgcgcgcgccggcaccagctgctggacccgtcggcggagcacggcgtcactaagttctccgacctcacgccggcagagttccgccggacctacctcggcctccgcaagtcccggcgcgctctcctcagagaactcggggagtcggcgcacgaggcgcccgtgctccccaccgatggtctccccgacgatttcgactggagggaccacggcgccgtcggccccgtcaagaaccagggttcgtgcgggtcgtgctggtcgttcagcgcgtctggagcgctggagggtgcgcactacctcgcaactggcaagctggaggtgctttcggagcagcagttcgtcgactgtgaccacgagtgtgattcatcggagcctgattcatgtgattcgggttgcaatggtgggctaatgacgacggcattcagttatctccagaaggccggtggccttgagagtgagaaggattacccttacactgggagtgatggcaaatgcaagtttgacaagtccaagattgttgcttcagttcagaacttcagtgttgtgtctgtggacgaggctcaaatttctgctaacctcatcaaacatgggccattggcaatcggcatcaatgctgcctacatgcagacatacatcggaggcgtgtcatgcccatacatctgtggcaggcaccttgaccatggtgttctccttgttggatatggtgcttctggtttcgcccccattcgcctgaaggacaagccttactggatcatcaagaactcgtggggcgagaactggggggagaacggatactacaagatatgcaggggttccaacgttcgcaacaagtgcggcgtcgattccatggtctctaccgtgtccgcagtccacgcctcgaaggagtagactctggtcagcggtgataatcgtgattccatatattgtagaactataatccctgctagtaatccatttgtgctgtttatgtatcgaaggcagcaaagatgtgtgaagcggcaatgggatgcttgctgtaaggtaatatgtttggcttgctaggcatgctacacgctatttggatgtagcaacgttatcaccagctgtatacgctttttaatcgacaacatttgaataatatgtacataacattatgttgtgctc

SEQ ID NO: 2518 - DNA, 719 bp, Zea mays
  Clone ID: 700215048_FLI
gtggagcagtccgtgtccccgggcggcggcgcgtggctgggcgggcagctgttctcggccatggtggtgcgcaggccggcgcacctgttcctggacgagctgggcgtgggctacgacgaggccgaggactacgtggtggtcaagcacgcggcatgatcagcgccgtgcccgggatgaaggcgctcgacatgaacgccgccgaggacgagatcgtgcgcctcacgcgcgaggtcgtgcccggcatgatcgtcaccgggatggaggtcgcagagatcgacggcgccccgaggatgggcccgacgttcggcgccatgatgatctccggccagaaggcggcgcacctggcgctgaaggcactgggcaggcccaacgccgtggacgggaccatcccagaggtgtcgccggcgctgcgcgaggagttcgtgattgcgtccaaggacgacgaggtcgtggacgcctgagcgagcatccacgcgccagcatgcaagcagcgtcttatctgggccggcgccatcacggggtttcttcttttaatctgggactttgttgctgttggacgaatgaattcccttcgatcggttagctttaatctgtctcgttagtgtgtcgtgttcgtgtagcaccatgccacacaccagccgtgtgctctgtcacgtgggggccactcgtggggtctcctgctgctgtcagaacgaataagagaagatggaattgtgatg

SEQ ID NO: 2519 - DNA, 913 bp, Zea mays
  Clone ID: 700215132_FLI
cctcgttcctctagccgtctcgcgcagccacagcctccatttctcctccgacggcggtgcggctagctcaaccatggcggactccaaggccacctcggcggtcaccctccgcactcgcaagttcatgaccaaccgcctgctggcccgcaaacaatttgtgcttgaggttatccaccccggccgcgccaacgtctccaaggcggagttgaaggagaggcttgccaagatgtacgaggtgaaggaccccaacaccatcttcgtcttcaagttccgcacccacttcggtggaggcaagtccactggcttcggcctcatctacgataacctcgagtctgccaagaagttcgagcccaaataccgcctcatcaggaatggtcttgctactaaggttgagaagtcccgcaagcaaatgaaagagcggaagaacagggccaagaagatccgtggtgtcaagaagaccaaggctggtgacgccaagaagaagtaaacagtcatttatatttctgtattactgtcctgaactctgggtggtcgtctagttgcaatgtcataattatggtcgtgttaggttttgttccgcactcagcagtaagtgaagttttgtaattcctggatgtgaacctacccggattggctgtagcatgttgtgagatgagaaggctattttgtcatgcagttgtgtcatttgcaagccaatccattttgtcatgcagttgtcatttgctcacctctgatccatatcagctttgatcgtgctgcatttgcgccagtgaacagtgattgctcatgaactagttttgggttgcagttcggtagttgtttggacctttgttttcaaggctagtctatttttcttacatttgtgaatgccttaatggcatgatgttatcagttgttggaacaagtatttgtt

SEQ ID NO: 2520 - DNA, 1225 bp, Zea mays
  Clone ID: 700215178_FLI
ctgattgccatgatggtggccgccctgtcctcccgcattgctccggccgcctccgccccatctcaactcctcgccgacctctgcagcgtcgagcagcgcgccgggtcccaactcctacaggacctctccccgtgcttccgcgtcgccctccacgccgccagcgccgccatcgtcgaagcggtgggcgaccaccgcgccatccacctcgtcgacttcgacgtcagcttcccgcagcacgcggctctcatccagtacctcgccgaccgacgcgtgcagggcaggtccctgaaggtcaccgccgtcaccgacccgagctcgccgttcacgcagtctctaaccgcatcgctaccagccatcgaggagcggctgaagaagctcgccgagcgagctggcgtggagtaccgctttacagtggtcagctgcagagcagcagagctggatgcgtccaggctgtgctgcgagccgggggaggcggtcgcggtcaacctcgccttcgcactctcccacgtgcccgacgagagcgtctctccggccaacccccgcgacgagctgctccgccgcgtgcgcgcgctgggcccgcaggtggtgaccctcgtcgagcaggaactgaacaccaatacggcaccgctggcggcgcgcttcactgacgcgtgcgcgcactacggcgccatcctggagtcgctggacgcgacgctggcgcgggagattgcggagaaggccagggccgaggcggccctgtcgaagaaggcggcgaacgcggtcggccgggatggccccgaccggctggagcggtgcgaggtcttcggcaagtggcgcgccaggttcggcatggcgggcttccgcccggtgtcgctcggctcgagcattgccgaagagctggtcggcgcccgcgtcggccatgtaccgcccgggttcacagtcaaggcggagaacggcgtgctccggttctgttggatggggcgcgcggtgaccgtcgcctccgcgtggcgctagaccacggcgggcggccgaccgcccgcccgggccattattgccgtcactaaattgtcagttacataattcgagctattgctttcctcgttctcccttcttcctttttttttaccttgattgggtgaggagtgatgagtttgccatgatctggtaaaaatccttcctagctgtagcgactcataattcttataactgctcatagtagtatatggaaaagagtaagttatatcgc

SEQ ID NO: 2521 - DNA, 658 bp, Zea mays
  Clone ID: 700215195_FLI
caatctccctagcagcagatcctcgtgcaacgcaaagcgctagccttcctactgtcccgatggcccgcacgaagcagacggcgaggaagtccactggcggcaaggcgccaaggaagcagctggccaccaaggcggcgcgcaagtctgccccggcgaccggcggagtgaagaagccccaccgtttccgccccggcaccgtcgcgctccgggagatccgcaagtaccagaagagcacggagctgctgatccgcaagctgccgttccagcgcctggtgcgtgagatcgcccaggacttcaagaccgaccttcgcttccagagctccgccgtcgccgcgctgcaggaggcgtccgaggcctacctcgtcggtctcttcgaggacaccaacctctgcgccattcacgccaagcgcgtcaccatcatgcccaaggacatccagctcgcccgccgtatccgtgtggagagggcctaggcgtcgtggcggtggaggtcgaagtagtagtcgcagtttctgtcatcaccgtctggctagaaggtgtagagatgtgccgggttctggagtttgggttatcggtcgaatcatgatgtagttggttcttcacagctgtaatttaactatgacgatgccatggcaatgaagttctcagctatgagttcccg

SEQ ID NO: 2522 - DNA, 1115 bp, Zea mays
  Clone ID: 700215279_FLI
gcagcctcgctccaagtccaagccgcggccaccttgatgcaaccggccaagatcggcggccgggcgccgtccgcctcgctgccgtcgtcccgcccgtcgtcgcaactcgccagggcgttcggcgtcgacgccggcgccgccaggatcacgtgctccctccagtccgacgtcagggacgtcgccagcaagtgcgtcgacgccgccaagctcgccggcttcgcgctcgccacctcggctctcctcgtctcgggcgcgagcgcggagggcacgcccaagaggctgacctacgacgagatccagagcaagacgtacctggaggtgaagggcacgggcacggcgaaccagtgcccgaccatcgacggcggcgtggactcgttcccgttcaagcccggcaagtaccagatgaagaagctgtgcctggagccgacgtccttcaccgtcaaggcggagggcatcgccaagaacgcgccgcccgagttccagaagaccaagctcatgacccgcctcacctacacgctggacgagatcgagggcccgctcgaggtcgcctccgacggcaccctcaagttcgaggagaaggacggcatcgactacgccgccgtcaccgtgcagctcccgggcggcgagcgcgtgcccttcctcttcaccgtcaagcagctcgtcgccaccggcaagccggacagcttcggcgggcccttcctcgtgcccagctaccgcggctcctccttcctcgaccccaagggccgcggcggctccaccggatacgacaacgccgtcgcgctccccgccggaggcagaggcgacgaggaggagctccagaaggagaacatcaagaacgccgcctcgtccacgggcaacatcacgctgagcgtcaccaagagcaacccggacaccggcgaggtcattggcgtattcgagagcgtgcagccgtcggacaccgacctcggggctaaggcgcccaaggatgtcaagatccagggagtctggtacgcgcagctcgagtgattcgttttaactgttagaggcgtcggaccgtcatggagaacttttgagagaggaggaggaatcgtgtatgtaactattaatgcaaattcgggctgttggtttttaatttc

SEQ ID NO: 2523 - DNA, 1547 bp, Zea mays
  Clone ID: 700215291_FLI
gggctagcagtagcagctgtggtcgtcctcgcttgcttgcttgctaccagggtttgtgtgagtgtgttagtgagagagaaccatggcgacgcagcggttcacggcggcgctggtggcctgcctcctcctgctcctggcgctgccggcgcgcgggcgcaacatcacggccatcctcgccgggtacaaggagtacaagctatacaaccagtacctgtcggagacgaaggtgtgcgacgagatcaactcgcggcagtcgacgtcgatgtccgtcctggtgctgtccaacgacgccatgacgacgctggcctccgacgccggcgactcgctccccgccatcaagaacgcgctgcgcctccactcggtgctcgactactacgaccgcaagaaggtgaagaagtacggcgacgagagcgccgccacgctgtaccaggccacgggcgacgccgccagcaccacggggaacgtcaaggtggtggaccaggaggacaagaactacggcttctcggccgccacgccgggcgccaggatctgcaccgtcaccaaggaggtggagacgcaccctttcaagttcgccatcctcgaggtcacggcgcccatcgagttcgacggcctcttcgacaccccctccaccgacaacctcacccgcctcctggagcgcgccggctgcaaggtcttcgcgtcgctggccgcctccacgggcgtgctcaagacgtacgaggccgccatggacaagggcctcaccctgttcgccgtcaacgacgacgccttccaggccaaggacgcgcccgacgtcaaggccatgtccaaggccaacctcaccaagctcctccagtaccacgccctgccttcctacaacaccaagacctcgctcaagtccgtcaagggcccgctccgcacgctggccgccaaggccgacgtcacggtggtcgccaagggcgacgacgtctcgctcgacaccggcaagagcaggtcccgcgtcgcgtccaccgtcgtcgacagcgtcccgttctgcctgctcaccatggacaccctcctggtgccgccggagctctacgtcggcgccccggaggcggcaccggcgccggcgccagcggacgcgccacaggggtccccgcccgcggcggacgccccgtcggtggccgcggaccacgccgaccacaagtccaagaagccgtcggcgtcgtccgccgtcgcgtggcgaccggccggcgcgctcgccgcggtggccgtgtgctccgtcgtgctggcctccctcttgtgatgcattgttgcttgacagctcctccgacctctgcttcctccgatccaagcagatacccgtttctctgtgatctctctcccccgctctgttccggtccttgcttcattgaatctgttggtgcattgccatttccacatgtaatttgagcaaacatgtacatttcccccttttttcatgatagtttcagaacacaatattctaagcagctgcgccattccatttcgcgcaacggctttctctcggatcctgagacccattcatgtagtgaaaggagaagtcaaacgag

SEQ ID NO: 2524 - DNA, 720 bp, Zea mays
  Clone ID: 700215532_FLI
ccaaaggttattccccaagcacaaacctctgagtctctgacacaccgccgccgcgccgcatccgctacaggctaccctcaccaccgcgcacaccgaagtagtagcaggcggtgccgcccccaatggcggcagactggttgtgggcgcgtagggtgtgggagaagtgggccgcgaagcacatcggcacctccgggaagccggtccaggctgcgctcctgctcaactacgacccctccgggccatctcgcctccttcccgtcgtagcagagcaagagggaacacaactttcagctcttgatatgcaaccactcctggactttgtcaagaggggtaatctgcagactgaattgttctctgttgggctgaaccaacatttggtcacctcaatccatgaaaactggttttgcgcccgctgcattaacagcacaaaaccagaaggtgaaggagtaatagttatgcagattggagcttgcttattagtcactatgtatgctggttctcttgctgcagcttcgcaagcaatggtggctgctgatcagtttgcaatacagtttaaccggaggagtcactaatttccagtatagtttcatgagtgatgttgatcgcaatttgttagtgtttgggatgatagtgctggaatgccgtagatgaccttatgtaacttgtaatgttacgatattctcggccgtagttatgctaatataatagcgaatattgact

SEQ ID NO: 2525 - DNA, 1397 bp, Zea mays
  Clone ID: 700215623_FLI
cggaccacactagaactagaaccctctctacggctctactacgctacgccccatcccgcccggaccggaccggacccaccttcctccacctctctgcccgccgccggccgacccgaatgggggcgggaaccaataatggcctgagcaacggcgccgccgcagggcagcgcgcggacgacgggaccacggtgttccggggcacggcgtactcgccgctacggaccacggtggcgctcgcgctgtggctcggggccatccacttcaacgccttcctcgtcctcgcctcgctcttcctcttcccgcgccgcgtcgccgcactggtgctggcgacgcagctcttcttcatgttcctgccgctcagtgataagagcagactgggccgcaagatcgccaggttcataagcaagtacgtcattgggtattttcccgtcactttgcacttggaagactatggcgcctttgatcccaacagggcttatgtgttcggttatgagcctcattctgttttgcccatagctgttgggatcctcggggaccttgttggattcatgccgctaccaaagatgaagattcttgcaagcagtgcggtgttctacaccccgttcctaaggcaaatatggacatggttggggttggctcctgcgtcgagaaagagtttctactcctaccttggagctggttatagctgtattatagtgccaggaggtgtgcaggaaatacttcatatggatcatgattcagaggttgcttttcttaaaccaagaaaaggttttgttaagatagctattgagatgggttgccctgtagtccccgtttttgctttcggacagagctatgtttacaaatggtggaggccaggtggcaagttaattgtcaagattgctagagcaatcaaattttctccaataatcttctggggaaaactggggactcccatcccttttgcaacaccaatgcatgtgattgttggaaggccaattgaggttgtaaagaatcctcaacctaccattgatgagataaaccaagtccacggacagttcgttgttgcgatgcaagatctgttcgagaaatacaagagcagaactggataccctgatcttcagttaagagttctttgatggcgtgctgttccaatgaaaagctcttatcagctaggtttaagggataaaatggctgttcagacccatcgactcaattgatcgtagcatttgggctataatgtttttgagcacaggtccattattgaaattctgtaccccattccaaattagaagacgtttttttaatatgtagcttttctatgcagttgcatacatactatgtctaaaaatataaaaaaatatatgtctagaaagggaatatatcatctgtaaagcaagcagtcatgataatttttt

SEQ ID NO: 2526 - DNA, 1089 bp, Zea mays
  Clone ID: 700215674_FLI
gtttaaatacagcagcagcagatggccgaacgaacgaagccacaagcagcgccgcgagccacagctagcaccaccaccttgcaccgcacccgcaccgagacgaacagatcgaccatggctgccggcggcgacgacaccaccatcgcgcaggtccacagcggcatcgacagcagcaacaagacgctgctcaagagcgaggccctctacaagtacgtgctggacacgtcggtgctgccgcacgagccggagagcatgcgtgagctgcggctggtgaccgacaagcacgagtgggggttcatgcagtcgtccccggacgaggcgtcgctgctgcggatgctgatcaagctgagcggcgcgcgccgcaccctggaggtgggcgtgttcacgggctactcgctgctggccacggcgctggcgctgcccgccgacggcaaggtcatcgcattcgacgtgagccgcgagtactacgacatcggcaggcccttcatcgagcgcgccggggtggcgggcaaggtggacttccgggagggccccgcgctggagcagctggacgagctcctcgccgacccggccaaccacggcgccttcgacttcgcgttcgtcgacgccgacaagcctaactacgtccggtaccacgagcagctgctccgcctggtgcgcgtcgggggtaccgtcgtgtatgacaacacgctgtgggcgggtactgtggcgcttccccccgacgcgccgctcagcgacctcgaccgcaggttctccgccgccatcagggaactcaacgtccggctttctcaggatccccgcgtcgaggtctgccagctcgccatcgccgacggcgtcaccatctgccgccgcgtcgtctgatgtgatgatgatccgacgaccaagatcgtatatcattcgctcgtcgtctctgtcatctttcaactgcctgcccgctgccgtcgtcaactaataatgcatggttctgctggttcttttttttttattttcttttgtgcttgcattgtgtgtgttgagttgaacatcccccgcgatgtactgcaacaactggaatgcaatgcaacatcatgcgtgcagctagctttaact

SEQ ID NO: 2527 - DNA, 2063 bp, Zea mays
  Clone ID: 700215676_FLI
gtgacgatagaagtggaattaatatgattcacaatgttgcatataattgtggttctgatttcagtcgtttagacttcagtggtttctatgcatttatcctggaacggggtgatgaagtaatagctgcagcatctgtaaggattcatggaactgatttagcagaaatgccattcataggcacaagaggcatgtataggcaccaagggatgtgtcgtcgactactgaatggaattgaatcggccctcggttccctcagtgttcagaaactagtagtatctgctgtgactgaaatggagaatacttggacaactggttttggttttaagcctgttgcaccttccaagaaacaaagaatgaagtcgttaaatctcttgattatgaatgggaccggtctactagagaagaggttgctgccaacacaaacagttgatggacagatcactaccaagacagctaatgctgttggatctgataagatggatgctaaaatgcttggtgaagcaagtggatctgtgacacccattcatgtttctagtgaacccgatgcctctgacaatcatgaaattaatcgccatgagagtcctcatcctttaggaaactctgcaggcttgacattggaccagtctcctgctgcagacgaaaatgaagcgaaaataactacagaaaggacacccccagtatctataggtgatgctaagacagtcaaggtgaatacacttcctggagctacttgtggagttaacttgcagtgcatggttgaagcagagaacattcaacaagagaaatacaaagaaaccaatgggagattgattgctgaaaatactatttcagagcagaagtgtgaagatagatctaattccagtcgttcaaattcatgtgctactccggtgactgtggatcaatgttctcatttatctaatgagattgggaaaggtgacaactgtttatctagtgaactttctgttggagctgctcccataacaggcaaaactgaatctagtttgacatctgttcattgcgctaaccaagaggatgagaaagcttacgcagcccctgtggacactaaaatacctttagtcattatggatgaaaagcctgataagcatgagtttaaaactatggttgtagggtgtagtcaaggctcaatggaacctaaaagtttggaaaatagaactagtattgtaaatggaacctcaatggacgcctatagagataaaagtactaatgaagatcacagtgcttctgcagttgacactggagtatctgtgaagctatatgctcagcaaatggagacgattgaggaaaaaactggctcagttttaccagattcggaacactcttctagttgcaaagatgtgttggtgaccttgactgagtcaaagccacttaaaaatgacatgcttgaaacggatgatgcaattattaaggtaggaatgactggtcagagtttcaatgaagcaggaataacagctcctgcgctcaacatttcagatcctgttggtgaaaatgtggttaagcctactcaaacttgtggggagggtcaacttcgtggagaggatgtcatatacagtaataacgtcatggaagatgacctaacttctagagcatgctgatgtatgatcattgtattttctgctagaaaaggccctgatcattggtataaaggagaggtcgttgggctggcgactcgcatggatgaatttttactgtgtgcgaggcacttctgggagcgcggggaccgtccgcgggaaggcattgacacagttggctcttaagctttcctgacttttggttcttctacattgaggctgttgaccatggagcctttttttttttgagtagtagaagtatgcaaattgaaccatggaagttctatacgacccacaatccgggtcaacattttgttgtagatataccatgtctggtagttttctgttgtcctcctggtcgacccgaactccttattaagagctgatacttggtacccatggtatgcatgtgaaattctgctccatgtacagagagtagaaaagaaaatgaaagccgtgctagctgttataagc

SEQ ID NO: 2528 - DNA, 2131 bp, Zea mays
  Clone ID: 700215729_FLI
gtcgtccgctctgcgcaaccaaaccggcgaaaccgcccccctttcactccccctcctcctccagatccatccgcctctcctcgaaaccgtctctctgtgcgtccggagtccggggagagggtggcggcggtggagatggagagcctggcgcagcgcgcggcgctgctgcgggagtcgctgcagaagagccagcaggtcaccgacgccgtcgtctccatactcggctccttcgacagccgcctcaccgcgctcgactccgccatgcgccccatccaggtgaggacgcacgccgttcggaccgcgcacgagaacatcgaccgcacgctgcgctccgcggatgtgatcctcacccagttcgacaggacccgagaggcagagcgtgaaatacagaaggggccgcatgagaaccttcaaggtttcctagatgcagttgatcgcttgagaagtattgagcgtttctttagttcaaatcggagttaccgtagtagcgatggggtgctcaaccacgtaaacgcgctcctttctaaggcccttgtcaggatggagggtgaattccagaatcaattatcccagcgcagcaaaccgatggagcctgatcgtctttttgattgtcttccaagtacacttcgaccatcgtctgaatctcagcccgaaggtgggaaaaacccatccgagaatcagcaaaacccagaggctgttgtatatagtcctcctgctcttattgagccaaagtttgttccactactctctaaattagcacaacagttggttcaagctggatgccaacagcaatgctcagaaatatatagtgaagctcgttcttcagctttagaatcaagtctgaagaacttgggcgttgaaaaacttagcaaagatgaagtgcagaaaatgccgtgggaaattttggagtctaaaatagggaattggattcatttcatgcgaattgctgttaaacttctttttgctggggagcgccaactttgcgaccaagtttttgagtgcagtcaatcgttgagggataagtgctttgctgcaataacaaagaacagtttggctacactactcagttttggagaggctattgctatgagtaaacgatcaccagagaaactctttgttctgttagacatgtacgagataatgtgcgagcttcaaacagagattgataccattttcgttggagaatcaggttcgcaaatgcgcgactctgcactgagtttaacaaaatgcttagcacaaacagcacaaaagactttcagtgattttgaagaagctgttgaaaaggatgcaacaaagaatattcatactgatggaacagttcatcctttaacaagctatgtgatcaactatgttaagtttttgtttgactaccagtcaactctaaagcagcttttccaggagttcaaggaagatgggacaggttctgagctggcagctgtaacaatgaaaatcatgcaagccttacaaaataatttagaagcaaaagcaaaacaatacaaggatcctgcattgatgcacatatttttgatgaataacattcactatattgtcaaatctgtccgcagatcagaagccaaagatttgttgggtgatgactggattcaaaggcaccgaaggattgtacaacaaaatgccaatcagtatagaaggattgcttgggcgaaggtgttgcaatgcctctctggtcaaggtttgacttcatcaggtggtagtggtcatgtaggaagtgatggtggcaatagcagtggagcttcaagaacagctgtgaaggagagattcaggtctttcaatgtgttgttcgaagagatctaccacaagcaatgtggctggtccgttccagacactgagctgcgcgagtcactaagactcgcggtcgctgaaatcctgttgcctgcctaccgatcattcataaaacgttttgggcctctcattgagaatagcaaagcacctgggaaatacgtgaagcacactcccgagcaactcgagctgctgctaggcaatttattcgaggggaaacaagaacgtgcttgatagtttggtaccgcccgcagcaaggatgtgctgctcttcagcttctatgtaaaatacaaaataataaaaataaaaaagatctggaggccctgttagcgtt

SEQ ID NO: 2529 - DNA, 529 bp, Zea mays
  Clone ID: 700215981_FLI
ggaaagtgttcgtcctcatggcgccgccgcagccgaagtcgggcctcttcgtgggcatcaacaagggccatgtcgtcaccaagcgcgagctgcctctgcgcccgtcccaccgcaaggggaaagcaacgaagagggtgtccatggtcaggggcctgatcagagaggttgctggctttgctccttatgagaagcgtatcaccgagcttctgaaggttggcaaggacaagcgcgctctgaagcttgccaagagaaagcttggaactcacaagagggcaaagaagaagagagaggagatgatgggcgtcctcaggaagatgagatcggctggtacgcacactgacaagaagaaataaagcatttcaagttcatgaatgtggcagccagagattatcaactgtgttttttccctacctctagaaactagacatggcaaagtatttttgaccgaaacattgtttgttagtaatgtattgaaccacctcgtggtattttgccccaacttccaatgcatcaatggtttgttaatctt

SEQ ID NO: 2530 - DNA, 1763 bp, Zea mays
  Clone ID: 700216043_FLI
gcgcgagctgaactggctcgctcttttattgagccagaaaaaaactccgctcgaccttgttctaagcacagtttctggatcggaggagcatccccgcctaggtctctgcagccatggttcgcggatcgctcggcaagcttgcatcgcgcgccctctccgtcgccgggagatggcagcaccagcagctccgccgcctcaacatccacgagtaccagggcgcatagttgatgggtaaatacgggatcaacgtgcccaggggcgcggcggctgggtccgtacatgaggtcaaggacgccttgaagaacatgttccccagcgagaaagagatagttgttaaaagtcaaatccttgctggtggccgagggctgggaactttcaaaagcggattgcaaagtggtgtccatattgttaaggctgaggaagctgaattgattgcaagtaaaatgttaggccagattctgataacgaaacaaactggtccagagggaaagattgtgagcaaggtctacttgtgtgagaaactatctcttacaaatgagatgtactttgccatcacccttgataggaaaactgctggtccgctcattattgcttgcagcaggggaggaaaacactatagttgacctcaatgttcaaaggatggccagggctacatcatcttgttgttgacgggttccgtgtgttcaatcgccgagcagaaagccaggaacagaacttaggcgttggcgattggcatctccctcccctaagccatggccaccgggcggcccgtacgactcgtgctggatgcctccctcctcctcgacccctcctccaccagggaggcggcggcggtggctctgcggcccggggtagaggagctgttgcggcggttgcgctactccaacctgactgtggcaatctgctatgcagagggcatgccaactaatgaggtgctctacttatctacattattattacatccctctgaagttgtatcttcagaagttcacattgacagtatttgcttcctcttgccatacttacccatcatggcccatggggtgtctatcttatcatgccatcttcaaagaatggcatcatgttaacaaaaatgaatgagaaatcagtcatttctaatggaaagtcaggctttcttgaaaaggtcacaagctcacacttgtttggctctatagcacttcttgcgaaaagtgggaatctttctctaactgaattaatgttagaatggagccgaacaagtttatgtttttatgcgacttcaagagttgacaaaggtttaagttctgagctccagaatcagaattggagagttctttctgtagctaatgaatgtagcatagaggttcctgtgttttaaatgttcaaaggcttcagcagttgcttctcaccttggctactctaataaaaagggaactatgtgactcatctgttctggtgattggatatataatgaaaatattctgtgaggaagacttcgcaaggagatgtggttctgtcacttatgtgactgttgccgtgtatggagacgaggacaagccagcgcttataatgtttacagagatgtggttctgtgactgttgtcgtgtactcaggctttatttcaacaggatttaaatatgagatgtagagtgattgatgtacatcacttcactaatcatgaaatctgtagaaggcgaaactactagccatatatgatatgcataatctgtgtggtaaacattatcaatatcacacaaattatttttaatgggttttgcattatc

SEQ ID NO: 2531 - DNA, 1025 bp, Zea mays
  Clone ID: 700216113_FLI
gaccagctaggatcagcggaagcagcaatggtgatggcgtcgtcgagcgggctgaggagctgcagcgccgtgggcgtgcccagcctgctggctccgtcgtcccggtccggccgcctggcgccgttctgcgccaacgccaccacctctggccgcgtcaccatgtccgcggagtggatgcccggccagccacgccctgcccacctcgacggctcctctcccggggacttcggcttcgatccgctgggcctcgcgaccgtgccggagaacttcgagcggttcaaggagtcagaggtgtaccactgccgctgggccatgcttgccgtccccgggatcctggtgccggaagctctgggcctgggcaactgggtgaaggcgcaggagtgggcggccgtccccggcgggcaggccacgtacctgggcgccccggtgccgtggggcacgctgccgaccatcctggtgatcgagttcgtggccatcgccttcgccgagcaccagcgcaccatggagaaggaccccgagaagaagaagtaccccggcggcgccttcgacccgctcggcttctccaaggaccccgccaagttcgaggagtacaagctcaaggagatcaagaacggccgcctcgccatgctggccttcgtcggcttctgcgtccagcagtcggcgtaccccggcaccggcccgctggagaacctcgcctcccacctcgccgacccgtggcacaacaacatcggcgacatcatcatccccagatcaatctccccttgagctcagctcagctgctggttgctgtttcctgtgtacgactaggccctgcctgtacaacgagcgacgacggtgacttcccgcccggaaattaaaccctcgtaatgtaaagcttatgttattaagagtagcggctactcttgtagtcttgtctgtatcaaatataaactggtttgttagctgaatcccaaggttatttctgagcctaaccaggggaaatttagctcaaaacggagaaaatacatacgagacctttgataact

SEQ ID NO: 2532 - DNA, 1025 bp, Zea mays
  Clone ID: 700216126_FLI
ggcggcgcggacggacaaggagcaggcggaagaggagttgtgccaaggcacaatgggtatctcgcgtgactcgatgcacaagcgccgagccaccggtggaaagcagaaggcctggaggaagaagcgaaagtatgagcttggtcgccagccagccaacaccaagttgtcaagcaataagacagttaggagggtccgtgttcgtggaggtaatgtgaaatggagggctcttcgccttgatactggtaactactcatggggaagtgaagctgttacccgcaagacccgtatcctcgacgtggtctacaatgcgtcaaacaatgagcttgtgaggacacaaacccttgtgaagagtgccattgtgcaagttgatgctgccccattcaagcagtggtacctcactcactatggagttgacattggtaggaagaagaaaacccctgctgcaaagaaggataatgctgagggacaagaggttgaggcagcagctgaggaaacgaaaaagagcaaccatgtcacgaggaagcttgagaagcgcaaggagggacgtacccttgacccacacattgaggagcaatttggcagtggacggttgctggcatgcatttcttcccgccctggacagtgtggccgtgctgatgggtacatccttgagggtaaagagcttgagttctacatgaagaagctacagaggaagaagggcaagagcgctgtagcttagagcattctcatggattgtcttgcaccgaaatgtgtgtcctgatgagtacactttttttggttagtcgtctcaagttcagagcgttatgccatgttttcagacctgattagtacactcttttctaaaagcgattgagctctagtccaatgtattgataatatctgctgttgtcctattgcggtgatgtttatttgccctgttcgctagctgcaatagttcctatttgagcagggtatgattatttgttgactagttgagtgcccgtgcgttgcaacggcaacatataataccatgatgaattatgtac

SEQ ID NO: 2533 - DNA, 295 bp, Zea mays
  Clone ID: 700216252_FLI
gcaaaagtgagcgtgtttaggctcgcggacgccgtgtccgttgtggaggtagtgaagggcgacggcgccgacgccgcgctggtctggaccgagctgctggagccggccgtgaagcccccggcgctgagctgatgaggtggggtggaagccgcgttctctggttgcgattcttttgtttcttcttttttgtcgtcgcctgctatatatcattggcgagatcgtcgtgtgtaaattattcactcgctccgtggctatatccaacaaagcaagcaagtaaggaaggaagaagaagaag

SEQ ID NO: 2534 - DNA, 2088 bp, Zea mays
  Clone ID: 700216496_FLI
ctcccagcttctccctcggctcgcccaagctccttcttcctcctccaactcggcgcctggatctctctcctccctccacctctctccagccgcgcgtctccctgctctctgcgttcttcttcctccctggctcctgctcgcccaacgacgccatcggccggatctcctctgctctctctgctcgccttggcccgccgtgctctgctcgtcaaggccgcgtgagcggcgagctctctgccgcggcttccttcctcttccgctccagccttctcctttctctcttctctagccctgttcggcccccagcttggatcttccttccgctcggtcgtctgcctctcgcgctcggctccctggagtggatttcctcgccgtggagctcaacttgagtattgtccgccggccaactcccgctcgtctcccttagcaccacctcgagctctcctccaagtgccgcgccgcagccaagctccctctcccatggctgaccgtcgggtgcccctgctgcgcgcccttctttccctgtccccagatggccgccttgctcgagttcgtcctggtggccgttgactaggagcagactcggccgcgcctctgctctctctgccgcgcccctggctctaacctcactcccatggctgcctgctcgagttcgccccggcttcttgtttcctgctacgctcgccggccgtctgttcgccctggtcgtcgatgtcgagtccctatgcgcgcagccgtgtccctatgctcgccgtggccggttcccagcatcgtgcccgcgattttgccgcgcgtccctgcttgacgctgtccacgcgttgtgcatggagcaacgaaacaaaaatcgtgtgcgttgagctcgcgcgccgaatttttttctagcttgccgcgacgcccggcgtcctacctgctttgctcacccgcgtcggctattcgctgatgctccaactcgtcagttgtcgttgtcctatccgcgtcagcacgcgaccgtggtcgtgttcgtcgagttcgccaacactctgttgccgattcgattatcgtcgctgttatgtgcctcgctgcgtgctcgacgagtgttgtcagttgtacctcagcactcgtgcttgccgctggctcgcgttaacgctcgcgcgtctgctcgttatcactgcgtcacactcgctcttcgtccatcgggtttcacgcgtgctcgcgtttggcgtcgagccgttgaacccgttttaccttgctcgacctcgtctttgcccttctggtggccgtcgtcagtttgatgctggactatgctccattatctagtcgcactggctgtcgaccttgttggtcctttccgtgtcagaccagcaagctccgccaccgtcactcaattgctcgtcccgcgtgtgctcgtaaattttcttggtcgtgtctgctgagctgaccaacgctccagctcgctgttatcgctaagtcccacgcaactgtgttgttcgctcgtcgtcgtcgttcattcctattttcccccgccatatgccgcctcatcatgacgcgtgtcgtcgtctttaatcccaatagctcttccgatacacgcctcgccatgttttgcctcctcgtgatcagccccatctgggtcatgtgggcggagtatcagaacacatgtcagatgttcgacgaagccaaaaccaggatttatcaacattctcacaagtattgagtcacgtttgatgctggtatgatagttaatcatgttatgcggaggaaaagagccaagtcgaccccaagcgtgggctaatccgtaggatgatgctgatggacgaaccggaagatggataatctgaacgagtgccaagccaaaggatggtcgtcaaggggacgtcgtctaacaaacactaacctagtgttactcaggttatagttttgtgctgctgttcatggtgttaagtgccggtgggctcggccttcttatataagtatacctcatctttatattcttattgaggatggtcacttgagttagcatatatttcaaacttatactttggtaatcactccgatgaatattatgtaaaaaattttgtaacctgtaaaatttggtaataagatttccgttgc

SEQ ID NO: 2535 - DNA, 1081 bp, Zea mays
  Clone ID: 700216676_FLI
ggtccagccgctggaggagctgctcatccactcgttcccgctgccctccttcctcatctggccgggctactacgtgctctaccgcttcatcgagaagcacggcgccgaggccgtggcctacgccgaggcgcagcacggcatcggcaagaaggacgccatcaacaacatgctgttcgtgctcggcttcaacgccttcggcggcttctccgtgttcctgcccttcctcgtggccaaggtcggcggcgccccggcgctgcgcgagcggctgcgggacgaggtgcggcgcgccatggtgggcaaaggcaaagacggcgagttcgggttcgccaccgtccgcgagggcatgccgctggtgcggtcgacggtgtacgagatgctgcggatgcagccgcccgtgccgctgcagttcgggcgcgcgcgcagggacttcgtgctgcgctcccacggcggcgccgcgtaccaggtgtccgcgggcgaggtgctgtgcgggtaccagcccgctggcgatgcgggaccccgaggtgttcgagcggcccgaggagttcgtgccggaacgcttcctcggcgacgacggcgccaggctgctgcagcacctcttctggtccaacgggccggagacggcgcagcccgggcccgggaacaagcagtgcgccgccaaggaggtggtggtggacacggcgtgcatgctgctggccgagctgttccggcgctacgacgacttcgaggtggagggcacctccttcaccaagctcgtcaagcgccaggcgtcgccgagcgtggcgcaggcagccgccgccgccggagcgcagcagtgagtgcgctgtataggatccatcggtggcgtgcgacgtcgccggcgccggcgccggccaagcaataaagtaatgagtaggccctcctcgtcatccacatgctcgtctgtgttcgacttcgatcggtgtctcttcctcccggccggccgctggccgccaaacagccgttgtggtaataaaaaaacacttgtggaattgcagagtgtaccgtggtcacacacacttgtacattgaattctttagtgatgctgcaatcaaattgaattaac

SEQ ID NO: 2536 - DNA, 1077 bp, Zea mays
  Clone ID: 700216694_FLI
cgatccttttccctgcgtacgccgagctcacgcaggacaggagggagcggatgagatagacaaacagaaagagcccgtgtgcgtgacgcacggacgccgtgactccgccgcaaagagagggagtccacggtctgaagaagcaacggcgacgcccccgacgacgagcatagctgccccgcaaactagcagcgccctcgtcagttccgtctcgttcccaacctctcccggattcgattcgattgacccgtccgctccaaatcgaatctaatcagcagttttggagttgcggaagggagaaagagagaggagagggggcatggatcaggtgctaaacaaggtggggagctactggttcagcaaaagggccagcaaggaaatcgactccatcggcgacgacatcagctcgatctcaagcagcattggagggtcagccaaatggatggtgaacaaaattaaagggaagatgcagaaagcacttccagatctcctcaaggaatatgacatgccagcagggctcttcccacgggacacgactaactatgagttcaatgaagagacaaagaagctgacagtgtacatcccgtcagcctgtgatgttggttacaaggactcgtcagtgctgcggttcttcacctgtgtgaccggctaccttgaaaaggggaagttttccgacatcgagggcatgaagaccaaagtgctggtctggaccaaggtgactgccatcaagaccgagggcccaaaggtccatttcactgcaggcgtgaagaagactcggagccgtgatgcctatgaggtcgtcagagatggtatcaccatagacaagttctagagcatatacctggcatgaaaaatgtgacgcggttattcatatatgcttctctcctctcagttggtacaccgaaattcatacaatatcgtgggctaattctgcatttgtatgaaagtttaatatgcttgacgtgttaatcacactgctagagcatgcgataaatcgcagttggttcattattaggaaattgcattgagctgtaatcagatatgcttctctcctctcagttggtacaccgaaattcatac

SEQ ID NO: 2537 - DNA, 1645 bp, Zea mays
  Clone ID: 700216779_FLI
ggggtgccggcgaggaatcgtgtccctgagcaagcggcagcggcactgatcgagaaaagagggcgcgaacagagcgcggccggtcaggaagtccgtgacgactctgaaggccgcggaacacgagatgccagtggtgcggagtccggcgtcggtggtgtcggattctccggaggaaacagatatgccactcctgaattgcaggatgacacggagaaggggatgaaacgccagaacgaatcggccgatgctgcgagaaaggaacgtcgtggtgaagctgcagagcagccgcgttacgaccatgaccgacgccaagaacttgcaccgaaatcatcggctcaacccgcggctgctcagcttgcacgcgaagatgaagctgctactgccggagaaaaggcgccgagcccttctcgccacgaggttcaagaggaacatctgcggcccctgcggaagaagattctgaagacggtggatgagctgaaaggcgatctctctgaacttttcagcaagtcccccgagctcaacgcgccacgcgcgcgtcctcctcgtcttcccaggcaagaaggctacgtgtcccacgcggtggcggggccggcctcgggcctccctgccagtgctcgccacgtcacttcttctgccgaaggtcaccgtggcagcgtagctcgtgcggcgaagccccgtccagccgcggctcctccccgtggcttgccgtcccggcgctaccgccagtgcagagcgcacccgtgctgccatgacgtggatccgaggccgtgccatcacgggcacggctgctgcggccaccacggcaaaccggagtgcagcagctgccgaggatactgctgcaggcccagagcgctggagccgtccgcgccgcggaagcccacggcagccaaggagcccaagcggcggctgccgccccgcaaccactgccggccagtactgaagggcgcacctttcatcgtctgctccagctgcttcaagctggtgcaggtgcccgccgacttcgccgtctcgaccaagacagtgcgcaagatgcggtgcggctcctgctccaccatcctctcctactcctacagggacccggccaggaagaaagcctaccaggactcggtcaatcggtgcagcacagacggctccgagctgcacggcggcacaggcgaccaacggtcggacccgttcgcgccgttcatcgatggcttcggcctcagcagctactcgacggaggacgagcggcggctgcccgtctcgaggaacacgtcgttcgacaccctcgacgggacgaaaggcgtgggacggctgcaccggctgatggggtacgggtcagctagcgagctgctgcggcactcccctgacctgtacgagagcttcagtgagcgaacgacgcctgacgtgagacagcacgacacgaaagggaaaggcgtttgcatcgacgatgacgactacgactacgacttggatgacactgacgatgaagacattggtgcgctgaagagatcagcgaggaaagggtccggctggacgctcccatggattcccggcaagcggcaaggggactcgggagccatcaggatcaagtaaatagcaggaaaggcctgtgtatattgcaggaataggttcgggttttggaattcgaattggaatttatttc

SEQ ID NO: 2538 - DNA, 898 bp, Zea mays
  Clone ID: 700216820_FLI
cgccatttcttcatctccaatctccatccttccatcttccgctccctcccctgcttgcgctcggcacgcaggcgacctcggcggcgctcgggctcggcctctcagcgacggcgtcagcagattcccctcctgcctctcgccagtcccctcgcctctggtcctctgcgaaccggccggtgactctgcgaaactattccagcacaggtacccaagtatggcggcaagacgcaatgttcggtactcgcctcttccttcagaggacggggatgacagcaattttattaaagaagatgttgacctccgatacacttacactccaaaatcgtacagaaggatcccatggaagtcaattgccctggcattgttcctcctcctcctaggaacttcacttctctttctttcttacttcatattcacaggtcacatggagggtgatagttctcaggcatatggtctcttgttcctgggtttcctttcctttcttcctggtttctacgagactcgagttgcttactattcatggcggggagcaccagggtacacttttgcatccataccagattattagcctttcagtttgcgctgctgatgcagtaaggataatgaacaagcaaacaacttcaaactttccttgggaaccaatttcagtgataaaagagttaagcatgcatatgtagtggctcaaatgattgttgtgtttataggatgttattgcttcgtcggtcagtaaaagaataattccttgtgatattgtgtaagagcaaaggttgattttgcaatttcttggtatttccttgtcaaatataacagaaattagtgccaccagtatgtgtttgtgtgatgatatctgttgatgaagatagactatgtactccatttggggctttggagtatgtat

SEQ ID NO: 2539 - DNA, 573 bp, Zea mays
  Clone ID: 700216860_FLI
ggccatcacatctggcgctgctgtcgtgcctgctggtactgctcctctctttcgacaagttcctcttccactacctgaagcgccgttggttctccggcggcagcggcgccaccgtcttaaggccccccgccaaatcgaggcggaacatggcgtccgccaagtggagcgagacggccatgctcgttatcgacatgcagaaggacttcgtggacccggcgatgcgcagcccgatgctggtggccggtggcgaggccgtcgtccctgccgttgccggggccgtcgccgtcgcaagggagcgcggcattttcgtcatctgggttgtcagagagcatgacccttctggaagagatgttgaacttttccgtaggcaccattattctgggggaaagggtccaacagtgaaaggtctgaaaggagcggagctggctgatgggcttgttatcaaagaaggggaatacaagttggtgaagactagatttagtgctttcttcgcaacacatcttgattctgtcctgaaaactgcaggaataaagaacttggttattgttggtaagcattgatatacatttgatg

SEQ ID NO: 2540 - DNA, 765 bp, Zea mays
  Clone ID: 700216909_FLI
cgaaggcgaccctccctccttcgctccttccgcgccgcctcccggccgtcgccgccatggtgaagtactcgcaggagccgggcaaccctaccaagtcggctaaggccatgggcagggatctgagggtccacttcaagaacacaagggagacagcctttgcgcttcgcaagttgtctttgaccaaggctaagcgataccttgaggatgttattgctcacaagcaggcaattcccttccggagatactgtgggggtgttggtcgcaccgcgcaagctaagtcgcgccactccaatgggcagggccgctggcccgttaaatcagccaggttcatcctggatttgctgaagaatgctgagagtaacgctgatgtgaaaggcttggatgtggacaacctctatgtttcacacatccaggtgaatcaagcccagaagcagaggcgccgcacctaccgtgctcacgggcgcatcaatccctacatgtcctcaccttgccacattgagctgatcttgtcagagaaggaagagcctgtgaagaaagaggctgacaacattgtcgcagcaaggaagcagtgaagtatatcagcatgctgatcgaggccattttgtcgaagtattatagccgtagctcttttatgtaccttttcaggcagccttgcctctcgagacgtttccggcaccgatgttttaaatctggattatctatgttctgtactgaactactgtgttggactgtaagttcagctcgtaatacaatagctcttaagat

SEQ ID NO: 2541 - DNA, 1483 bp, Zea mays
  Clone ID: 700216965_FLI
gtagccattggccagcacagcagtgtataggcatagctacgtacgtgggaagtgggaacgatggcactcatcatgcaggagagtagtagccatgatttgctccaagctcacgacgagctcttgcaccattccctgtgcttcgccaaatcgctcgcgctcgccgtggcgctggacctccgcatccccgacgcgatccaccacggcgccggcggcgccacccttctccagatcctcgccgagactgcgctccacccaagcaagcttcgcgcccttcgccgcctcatgcgcgtgctcaccgtcacgggcatcttcagcgtcgagcaaccaccagcaggtggtggtgataattcaaccgtccacacgtcggacgacgaagctgtcgtcgtctacaggttgacggcagcctcccgcttcctcgtcagcgacgaggtgagcacggcgaccttggctccctttgtgagtctggcgctccagcctatcgctgcctgtccgcacgccctgggtatctccgcgtggttccggcaggagcagcacgagccgtccccgtatggcctggcgttccggcagaccccaacgatctgggaacatgctgacgacgtaaacgccttgctgaacaaaggcatggccgcggacagccgcttcctcatgccaattgtgctgagggagtgcggcgagacgtttcgtgggatcgactcgttggttgacgtcggtggtggccatggtggcgccgccgccgccatcgccgccgccttcccccacctcaagtgcagcgtgcttgacctcccgcacgttgtcgccggtgctccgtctgatggcaacgtgcacttcgtcgcaggcaatatgtttgagagtattccacctgcaaccgctgttttcctcaagaaaactctacatgactggggtgacgatgagtgtgtcaagatattgaagaattgcaagcaagccatatctccacgggatgcaggtgggaaggtaataatcttggacgtggtagttggatataaacagtcaaacataaagcatcaagagacacaagttatgtttgatttgtatatgatggcggttaacggagttgagcgtgatgagcaagagtggaagaagatcttcattgaagctggattcaaagactacaaaattctacccgtcatcggtgacgtatcagtcatcatcgaggtctatccttgaatgctttgtgaacaaagacctccataataaactgaagaccatgaaggtgttgatagtatattatgattttttatttgtattgtacacttgattctttgagtatttgtaatgacaagctgagtaattgtgtttttttgttaatgtggtcttatagtgcacattacacatgatgtatgatatgttacttgccctcattttggtgtagatgtgtgttggtcaagtagtcgataggcaactctattatgcttggcatcaataagacaacatggaagcctatgatttgttgtgtcatggcaac

SEQ ID NO: 2542 - DNA, 882 bp, Zea mays
  Clone ID: 700217015_FLI
gaggaacagagattccgccatgaaatccagggagaggaagaagtcgtacataaaggacttggagacaaagagcaagcacttggaggcagagtgccgtcgcctcagctacgcacttcagtgctacgcagctgaaaacatggcactgcgccagagcttgctgaaggataggcctcttggtgctcccacagccacgcaggagtctgccgtactcacgggtaagacatgttatccgtcctctaatctttattcattccctaaattagatgaatcgatttgtctaccatcagtgagtcctctctggcttgaaccgtggatatgataggtcagtcataaattaccaagcaagtaaccaatcaaaagcacaagtgcaaccaattttttgaaaggctggtgaagtaattcgtgatgctaagatgaattttctttttatgtgcagaaaccctgccgctggtttccctgctttggctggtgagcatcgtctgcctgttcctgatgcccgttctgcccaaccgaagcccagctgctccaagcagcggcggaagagacctcgtgatggcagccggaaagacaagcagtgagaccccagagatactggaactcatcctccatggaaggcgttgcaagagcacgagggcgaagattaagctatgtattttaccatttcatgcaggagctgcttgctagtagttgctaggctttgagcctcttgcaagcttacctctatatgtagtgtacccgcaaatcttaccgtgctcgctatgcgcctgtcttgcagagaagcctgtcgatatccatggagtagtaccttttttttgtttaatagctcctgtgctacccagaatatgtttaaaatctggattttgtgttattttctatttcttc

SEQ ID NO: 2543 - DNA, 649 bp, Zea mays
  Clone ID: 700217019_FLI
gcgcttcgcccactcgctccagccgcttcaccgcgccgccaccgccaccgcgaggatgccgttcaagaggttcgtggagatcgggcgcgtggccctggtgaactacggggaggactatggccgtctcgttgtcatcgtcgatgtggtcgaccagaacagggcacttgtggatgcccctgatatggtcaggtgccaggtgaacttcaagcggctctcacttactgacatcaagattgacatcaaacgtgtccccaagaagacagccctgatcaaggcgatggaggaagctgatgtgaagaccaagtgggagaacagctcatggggcaagaagctgattgtccagaagaggagagcatcgctcaatgactttgataggttcaaagtcatgctggcgaagattaagaggggcggtgctatcaggcaagagctcgccaagctgaagaaggcgtccacggcttaaggagtctctttccgtgaatgtcatgttagagtttttggttatgagttggatcagcaattcgattgagcgttgtcaaagccagaattaccaatatgttccctgtaaacccatttcaaactttatcaagcacgggcgtgctcaggatacttttgccatgaatgatatggaatatctatggtagcttgtggc

SEQ ID NO: 2544 - DNA, 1056 bp, Zea mays
  Clone ID: 700217031_FLI
ctcacggcagatcaatttggggaaaggtggggtaacacacaatatgcttgatgacatccacaaccattggaaacgtgcagaggctgtgaggatcaaatgtctgggagtgccaacgctcgacatggacaacatttgcttccatctcgaggataaaacaggcggcaaagtcgtatcccgcagcataaacatcattatactgtaccgcggtcggaactatgacccccagaaaaggcctggcgtaccattgatgctgtggaaaccgttagctcctatctatcctaagctcgtgcaaaacgttgctgaagggttgactttcgaggaaacaaaagagttgaggaacagaggattgaattctccaccacttacaaaactgactaggaacggtgtctatgttaatgttgttgataaagtgagagaagcgtttaagactgtggaagttgtccggctagattgcactcatgttgggactactgactgcaagaaaattggtgtgaagttgagggatttggttccatgcattcctatattatttaaagatgaacagattatactatggagagggaaggttcgccaagagcgttctgtttcagcagagtgcagttccagcccacaatgatgcacgcatctgccggtgattcacaggagttattattgcgctgcgatattgatgatggttcgggcggattgctgtctgtggaccgtggtgggggcgaggggcgaggccgctcaccagtgattcagtgaagaagaaaacaaaccaacacatttgtgtaatcaactttgatgaaacttcaattgaggagcggcacaaacatggtgaatatggcacttagatgcattgtttcgatgaatccagggtttgtgaatttagaccgtttgagaaagtttttgtagaataaagctcagcctgttcatttgtttaatctttatcggctgtttttacattgttttgtttctatcaattgtagctacaataattcgaacaactgactttaatataaagcgaacaactctactgttttttaatgaatatatatatgtggagctctaccaact

SEQ ID NO: 2545 - DNA, 760 bp, Zea mays
  Clone ID: 700217040_FLI
ctcaggcgctcagctagctagcaagcagcagcagcacctctcaaacctttctttctgcctccccccgtctctttcgttcgctgccagacattctagccctctcgagtagctagctcgagcggtgcatgcatctgtagctacctagccgacatgggcaaagatgaggagggcgcgcgtgcgctgcttcgtgccctctctggtgttggcgagaggccggcccagcaggcgcgccttccgcgcatggcgggacagagacgaccaaggaacggaggtggcggtgatcgtccaatccgaggctgaaggagctagctaactggtggtgtggtggtggtgctggtgtgtgtagggtctaactcgatcggcgatttcggcggcggcatacatgggaaagccaggcatttttctcgcagtccaacaagtaccctttccgttagctttcctctccatgcatattgcagcattgcacggtacggtggtggtggttaatcaacagctagtcttagtttgaatgaatccatcgtcgatctaagaacactactgtgtttttttgtttttggcattgttctcttatccctctttaatttgggatcctttattattaggcgtagtaataataagttgaaggagctactgctaggttctttttgtagacccaaaatatatagtgggggcctggggtgtatgttgtatatctgcattttgctcgatcgaggtgcgatgatacgacttgctgctaaatcaaaggtttctcttcgtgttc

SEQ ID NO: 2546 - DNA, 906 bp, Zea mays
  Clone ID: 700217044_FLI
cccatccgtcgattggaacccagatccgcaggccgcagcacaagagggtgggatcggaccggatcggatcggagcagagggggacaaccgaccagaatccgccggcgaccaccatgggctccgcgagccgtgccgtctcgtgcctgtgctgcccctgcaagtgcctggcgtgcgggctcctgagctgcctgtgcagcatcctcgtctcgctcgccgtcgtcctgggcgtcgtcgccctcatcctctacttcatcttcaagccgcacatgatcgcggccaccgtggactcggcctcgctctcccagttcgcgctgtcggcgtcctccacgctctcctacgacctcaacgtcaccatgacggtgcgcaaccccaacacgcgcgtggggctctactacgacgacgtccaggcgctggccctgttcagcgaccagcgcttcggctacgccccgctcgacgccttctaccagggcacccaggcgtccacccagctcagccccgggttccgcggcacgcagctcctccagggcgacgtcaccgccgccgagttcaggcaggagcagtccgcgggcaacttcgccgtcgacgtcgacctcaacgccaagctcagggtgaaggtctgggcgttcaaggtccgcgggcccaaggctaaggtcacctgcaagctctccgtccccgcacccggcgccgccaacgcctcgcccttccagcccaccgtttgcaaagtctggttctgattttccatgttgtgggatttagatttacctggtaggcattctactagtagtagtagataatgttaccagctgatgctgatgtcgattattgttttctttcgttcattcgttggtcgtcagtcccgctctggattttgctttatgtatatatatactgctctccttcattcgt

SEQ ID NO: 2547 - DNA, 860 bp, Zea mays
  Clone ID: 700217057_FLI
gcgccgcgcgtgtcagccgatggaagagctgcgggccgccgtgacggcgcacttggaccaggtagcgggcctcgtgcaggcgctctcctccgagctccgccgcggcataggtcccgccgccgacaacctgcgcgccttcatccgcgccgttgactggacggagccatggctcatgtgcttgatggcattccatgtggttctgctgctcactgctgtagggttcaggaggaatgccaatttccagctattcttgttatttcttgcttattcaggagtgtatctagctgaaaagatgaacagatacctgggagagaactggaagagctttaccagtaggaattattttgatcgttctggagtttttatctctgtcgtctggtctgggccccttattgtcatatcgattgtcagtgtgattagcagcctcattgcattatgtcgattgatggtgaaatggaaaagagcagaacttaggcaccgggctcgacttgctcatgacaagaaggattgagagaagagaaaaaaatccttattatgggagaatcgaatgatttagtgattttgaacttttctaagtttgtatgccgcttgtcaacagggcactcaagaattaagtgttggaaatcctggataagcgaggagtgtctacagctattgttcctgctggtcactgtaggacagtagcagctagacatacttcataaaaaaatagatatggtacctgtctctatcttgttttagattgtagatgtaaacatggatgtaatcttgattgaaactgccaagatttgtagaacaaagcctcactgtttcgtttcccatcacaaatatgaaatatgagacgcggaagtgatacgagt

SEQ ID NO: 2548 - DNA, 1386 bp, Zea mays
  Clone ID: 700217062_FLI
ctcgcatcatggcgttccctcagatctcccgcagagccctcggcctcctgctcgtcatcgccgcagcggccgcgatcgtctcgcccgccaccgccgacgaggtggtggccctgacggaagccgacttcgagaaggaggtcggccaggaccgcggcgccctcgtcgagttctacgcgccatggtgtggccactgcaaaaagcttgcccccgagtatgaaaaacttggcgccagcttcaagaaggctaaatctgtactgatagcaaaggttgactgtgatgagcacaagagtgtatgcagcaagtatggagtttctgggtaccccacaattcaatggtttcccaaaggttccctggagccaaagaagtatgagggtcaacgttctgtggaagcccttgcagaatttgttaacagcgaagcaggtaccaatgtcaagatagctgccattccttcaagcgtcgtggttctgacttcagagacctttgactcaattgtccttgatgaaaccaaagatgtccttgttgagttttatgccccatggtgtggtcactgcaagcatcttgctccgatttatgagaagctggcttcagttttcaagcaggacgacggtgttgtgattgccaatattgatgctgacaagcacactgacttggctgaaaaatatggtgtttctggtttccctacattgaagttcttccctaagggaaacaaagccggtgaagattatgatggtggccgggacttggatgactttgtcaagttcattaatgagaagtgtggcaccagccgggatccaaagggccacctgaatcaagaggctgggcttgtgccaagcttgaatcctcttgtgaaggagtttctcaatgctgctgatgacaagcggaaggaagtcctctctaaaatagaagaggatgttgctaagctcagcggttctgcagccaagcatggaaagatatatgtgacagctgcaaagaagatcatagacaagggctctgactacactaagaaggagactgagaggcttcaccgcatgctggagaagtcaatcagtccttccaaagctgatgaattcatcgttaagaagaacattctttcgatattctcttcgtgaaggtgatgatccacagccacggcctgccagtgacttgaactgatagcgaaccccccctttacggaaaacagaacaaatcggatgatgtgagagaaaggtggtagtgaagtccagtagtggcagagctacttcgtgcacgtagatctcttttgcattttctggttccagggattgacttcgtactcacagtttacttcacacagaaggtttatgtagccatcctgtgataacatctactttctttttgatccaataaattggttattcagcttccgtg

SEQ ID NO: 2549 - DNA, 1832 bp, Zea mays
  Clone ID: 700217065_FLI
tccacctgcaagcaagagactctgcagccatctgggcgaaaactcaagcacgcggcgatgctgcgccttcgcgcttgcggcggcacggcaccggcatcggtgcccgcgctcgtcaggtcccgcctctccaggagatcctcctccacagcctacgccgccgctaccgtcgcttccgcttcctcctcttcgtccaccctggaagacctcgccgccgagcacagaggtttggcaaaggtcattttaaagaaggggaagacccaaatattccgagatgggagcccaatggtgtatagcggtgctgttgataggataattggtcgacctcctccgaaatctggcgatattgttctagtagctgatggaacagagaaacctattggatggggtctctataactctgtgtctatgttttgtgttcgtttgatgcaactagaagaagaggcaagaagagatcccacatgcacacttaatatggaaagactgcttgaagcaaggatttcatctgctgttggtttgcggcgcagtttgggtctcccttcaactgacacaaatgcttatcgcctcatcaacagtgaaggggacagattatctggtctaatagtggacatctttgctgatgttgctgttattgcttcatctgctgcttgggttgagaaatataggcaagaaatacaatttcttgttagcacagttaatggcgtcagccatataaagtggaggccatcgacagatattttgaaagaagaaggattggatatatcagagcataaggagcctgcttcaccatgctcaactgttaaggtcatggagaatggcattatctacttagtctcattagaaggtcagaagacagggttttatgcagatcaacgcgaaaaccgctatatcatatcattactttcaaaggatcaaagagtccttgacctttgctgctacagtggcggctttgctcttaatgcagctaagggtggcgctgataatgtcattggcattgattcatcaggatcagcactagaccttgccaatgagaatattgttctcaatgagctaaaccaaggaaaagtctcatttgtaaaaggagatgcaactacattcatgaaaggagctatctcagaaaatgagctatgggacttggtaatccttgaccctccaaagttggcgccacgaaagaaggtgctacaaagtgcatccggtatgtatagaagcttgaacgcacttgcaatgcaagtggtgaagccaggggggttactcatgacatgctcttgttctggagctatgacccaaagtggcatgttcctcaaaaccattcagggtgccgcatcaatggctggccgtaaggttacggtcttacgtcaagctggggcagcatgtgatcaccctatcgaccccgcataccctgagggccagtatctcagcaattacttgctgcgtgtggcatgaaagttatgagttcaaagcagaggcaagtttgtagttgttgcagcgcgcctgacaaaccttcgacgactgatcgcttctgaagagctcaagttcatctcatagcttaggggttgtttggtttctagagactaatttttagtccctacattttattccactttagttacaaaattatcaaatatagaaactaaaactctattttagtttctatatttgtcaatttatatactaaaatggaacaaaatgaagggactaaacattagtccctagaaaccaaacacccctttagtcatgtaggttagatttaattcttttacgaagaagagcaaagcatcgaaactgacattaacttctgattatacaattttggagaacataaaactatttgtttc

SEQ ID NO: 2550 - DNA, 2286 bp, Zea mays
  Clone ID: 700217073_FLI
gtgatacagctcctcctcaggccgaagtgaagtaccttacctggcatagatcaatgtcttcactttcttcatcatctagaattcctcttgggacaacatcgaaggaagacactgacggtctcaatggaaatatctttggtggtgtatacatgaattcaggcagtcatgcctccacactggacaggttgtatgcatgggagagaaagctttatgatgaagtcaaggtaaatttctttctcccttttctgtgttacctggctgctttatgacttctattatgtgtgacacagtgacagtgtgacgatatataccaagaaagatttgcttcttttatgcagttattcaactctgaagaatattagcttacttgtaatgggattatttttttctgctctgatctcaattatttccccttttggtgtcatcttgttgggtttcaactctagcctaccccaacttgcttgggactaaaagactatgttgatgttgatgtctgatctcaattcttgtaaaaattccactttgaagatgactagaagatggaataaatagatcatactaatacccaaaatgtatgtactgaggttctgcctcactgatatggttgcagcagcaaaatggcctctagcgtaatggttaaggcttccaagtaagatcccgggttcgatctccctcggggtgaatttctggcttggttaaaaaatcccatcgctgtgccccgcccgctcccgacttacgttttacgcgccaccctctggctgggccgttgtagagtgggcggtgacgacccgctattgatggggggctagggttcgggaattttcttggccagaaccatgtttcggtcactttttaatataataccggaagggcggtctttccttccccggtcgaggtttttttatatggttgcaggttgcagcacagcgcttcagttgtgctgtaacctcacatggcaatgtagcgggtattacccatttatcctaaagtaaaatgcttaaacaaatgtttaacttaaatgtttctagttacaataatataattgatgtatattgtggaaccatataccttttgttgtacgttggcaaaagatgttgatttcacagttttcctcccttcctattccttcaggcaagcagtgtagtttgcaggcaatatgatgagaaatgtaggcagctaagacaccaggaatcaagaggagaaagccaaatgagtattgacaaaacccgtgctgttgtgaaggatttgcactccagaattttagtggccattcagagaatcgacatgatttcgaagaacatagaggatctaagagacaaagagcttcaaccacaactagaggaattaattggaagtttgactcgcatgtgggcaacaatgcttgagtgtcaccggcatcaacacgatatcattaaactagtatccagcactcgcaacatgaagacctcaattcggtcagaatcacagttccaagcaactctactccttcaggttgagctgaacacattatgttcaaactttcagaaatggatagcatcccacaaagcatatttgcagagcctaaattcatggctactcaagtgtgtgaaggcactacaaaggaagaggaagagttccaggaaaaagaacatcaaagctgatccaataacaaagtatgctgttgcgcccatatttaaaacctgtgagagctggataaatttgttggatgatttaccaacggatttggaggatgctattaaggaccttgctgctgatataaaccgttacgtgccacatcaagagaagcaacgaggcggttcaaagctaactctctcgttgtcccgtagtggaaggtcaaacggcgagatgggtgaagtccacaggagttatacccctatggatttacaatcaagtttggagacatttctagggaagcttgaaatgttctctgatgtttcattgcagaagtacatgaagctcaaagaggatattgatgaggcgaaggagaggtatgcggaggcgcaggcagcccagcggatttaatttctggcacagaacataactagtcatgtagagatgtcatctagtgtcggtgtatgcttgttgaaataataggcataaattacttttgccattttgtaagttgcaagataagcctaggaacaaaattgtagagtacatgctaaaatatgccgctgaactgcggttgtaaatgtgaggtggtgataattgaagtcgaagttgcgggggatataaggtgtacattcatcttggggctatatcaatacatgaggtttcattttcttc

SEQ ID NO: 2551 - DNA, 417 bp, Zea mays
  Clone ID: 700217113_FLI
ctcaaggtgctgctactaagccacccaaagaaggacatcagggatacatcagaatatgaggttttcagaagggagagaaagaggcgatcattgaaggatcttgctgctgaagtccttggtgctaaaatacaacagaatgaacactgccccatcgaggatgcgagagctgcgatgctcatttacaacaagcacaagaaagcatgggagaagaacatgaaggaacagttcagattcaaaaagaagctcaagaagcgaggcaagaagaaaactactgagtccaatgggaatgatcccaatgtccccactgttcttctatgaagataaagaagtaacaaagggagaacttgtcctagttttggaaacaatatctgtaatgaaatttttgtagttcaacattaatgaaaattcaggttctgc

SEQ ID NO: 2552 - DNA, 1242 bp, Zea mays
  Clone ID: 700217128_FLI
gcggcgccctgccgtcctgcgggagggaggtgcaagcggaaccagcccggcaatggcaggcgcggctgcgcggcggccgggggcgaagcccaggggcggcggcggcgcggggaagaggagcgcgtggttggcggcggacggcagcaagcgctggggggaggccttcttcctgctctacacgcccttctggctcacgctctgcctcggtgtcgtcgtcccattcaagctctacgagaggttcacggagctggagtacctgatccttggcttggtgtccaccgtcccggcgttcgtcatccccctattcctcgtagggaaggcagatagtgttagaaatttcaaagatcgatattgggtcaaggctaatatttggattataatttttagctatgttggtaactacttctggacacattacttcttcacagttcttggcgcgtcatatacttttccatcatggaggatgaataatgtacctcatacgacatttctcctgacccatgcttgtttcctgttctatcatatggcatcaaatatgacacttcgtagattgcgccattctacagctcatttaccacagtctatttgctggttatttgaagctgcatggattttagcactgtcatacttcatagcgtacctggagaccctagccattgcaaatttcccgtactatgaattcgttgaccgggatataatgtacaaagtaggttccttgttctacgcaatatacttcatcgtcagcttcccaatgttttcaaggattgacgagaaagacgagaagtggagcctgtccagggtagccgtcgactctctgggcgcagcaatgctggtgacgataatactggacctatggcgcatatttctggggccaatagttcccgtcccagagtcgaggcagtgtggccaaccagggctcgcatggttccaagcgcagaacggaagcacctgattcagtgaagctgcaagttctgcgtttccacttgaatacttcatcatcacctagcattcaccgaggcggagatcttagagcaataaccctcgagagaaatcatggcctcactccttttgataaatagctgtgccttctgtggccggatgcaattgtgcaaatgccactttcagtagttatatttgtatgttttctccgtttggtgaattacagagagatatgtctgtaacgtgaacaagatcatgctgttctaattcctgaaactctatgtggtgctttgtgatcggatt

SEQ ID NO: 2553 - DNA, 3534 bp, Zea mays
  Clone ID: 700217152_FLI
ctgcctctcccgccagcgcgcgagcccgggggcgattcggcgccggcacgcgggaggggaagccgaggaatgcggtgagtcggcgggggtccggcgtttgtgaactcgtggagggctcggattggtgcgccatggacggcggcgacgccacgaattcggggaagcatgtggccgggcaggtgtgccagatctgcggcgacggcgtgggcaccgcggcggacggcgacctcttcaccgcctgcgacgtctgcggcttccccgtgtgccgcccatgctacgagtacgagcgcaaggacggcacccaggcgtgcccgcagtgcaagactaagtacaagcgccacaaagggagcccaccagtacacggtgaggaaaatgaggatgtggatgctgacgatgtgagtgactacaactaccaagcatctggcaaccaggatcagaagcaaaagattgctgagagaatgctcacctggcggacaaactcacgtggcagtgatattggcctggctaagtatgacagcggtgaaattgggcatgggaagtatgacagtggtgagatccctcgtggatatatcccgtcactaactcatagccagatctcaggagagattcctggagcttcccctgatcatatgatgtctcctgttgggaacattggcgggcgtggacatcaatttccttatgtaaatcattctccaaacccatcgagggagttctccggtagccttggcaatgttgcatggaaagagagggtggatggatggaaaatgaaggataaaggtgcaattcctatgaccaatggaacaagcattgctccatcagaagggcgtggagttgctgatattgatgcttctactgattatgacatggaagatgccttactgaatgatgaaactcggcaacctctatctagaaaagtgccaattccttcatccagaataaatccgtacagaatggtcattgtgctacgtttggctgttctatgcatattcttgcgctaccgtatcacacatcctgtgaacaatgcatatccactgtggcttttatccgtcatatgtgagatctggtttgctttgtcctggattttggatcagttcccaaagtggtccccaatcaaccgtgaaacataccttgatagactggctttaaggtatgaccgagaaggtgaaccatctcaattagctcctgttgatatttttgtcagtactgtggatccaatgaaggagcctcctcttgtcactgcaaatactgtgctttccatccttgctgtcgattatccggttgacaaggtatcttgctatgtttcggatgatggagctgctatgctgacttttgatgctctctctgaaacttcagagtttgctagaaaatgggttccgttctgtaagaagtacaacatagagcctagggccccggaatggtactttgctcagaaaattgattacttgaaagacaaagttcaaacctcatttgtgaaagaacgccgggccatgaagagagaatatgaagaattcaaagttcgtatcaatggtcttgtagccaaggcacaaaaagttcccgaggagggatggatcatgcaagatggtacaccttggcctgggaacaatactagggaccatcctggaatgattcaggttttcctgggtcacagtggagggcttgacgttgaaggcaatgaacttcctcgtttggtttatgtgtctcgtgaaaaacgtcctggattccaacatcacaagaaggctggtgccatgaatgcacttgttcgtgtatcagctgtccttactaatgggcaatacatgttgaatcttgattgtgaccactacatcaataatagcaaggctcttcgagaagctatgtgcttccttatggacccaaacctaggaaggaatgtctgttatgtccaatttcctcagaggtttgatggtattgataggaatgaccgatatgcaaacaggaacactgtgtttttcgatattaacttgagaggtcttgacggcattcaagggccagtttatgtgggaactggttgtgtgtttaacagaacggccttatatggttatgagcctccagtcaagaaaaaaaagccaggcttcttctcttcgctttgtgggggaaggaaaaagacgtcaaaatctaagaagagctcggaaaagaaggagtcacatagacacgcagacagttctgtaccagtatttaatctcgaagatatagaggaagggattgaaggttctcagtttgatgatgagaaatcgctgattatgtctcaaatgagcttggagaagagatttggccagtccagtgtttttgtagcctctactctgatggaatatggtggtgttccacaatctgcaactccagagtctcttctgaaagaagctattcatgtcatcagctgtggctatgaggacaaaactgactggggaactgagattgggtggatatatggttctgttacagaagacattctcaccggattcaagatgcatgctcgaggctggcgatcaatctactgcatgcctaagcgaccagctttcaagggatctgctcctatcaacctttcggatcgtttgaatcaagtgcttcggtgggctcttggttccattgaaattcttttcagcaggcattgtcccatatggtatggctatggaggccggcttaaattcctggagagatttgcttatatcaacacaacaatttatccactcacatcaatcccgctcctcctgtactgcatattgccagcagtttgtcttttcactgggaagttcatcatcccaaagattagtaacctagagagtgtttggtttatatcgctctttatctcaatctttgccactggtatccttgagatgaggtggagtggtgttggcattgatgaatggtggaggaacgagcagttctgggtcattggtggtatttctgcgcatttatttgccgtcttccagggtctcctgaaggtgcttgctggtatcgacacgagcttcactgtcacctctaaggccactgacgaagaaggtgattttgccgagctctacatgttcaagtggacaacgcttctgatcccaccaaccactattttgatcatcaacctggtcggcgtggtcgctggcatttcctacgcaatcaatagcggttaccagtcatggggacctcttttcgggaagctcttctttgcgttctgggtgattgtccacctgtaccccttcctcaagggcctcatggggaagcagaaccgcacgccgaccattgtcgttgtctgggctatcctccttgcgtcgatcttttccctgatgtgggttcgtatcgatccattcaccacccgggtcactggccctgatatcgcgaaatgtggcatcaactgctaggatgagctgaatatagttaaagagtggaactagacgcattgtgcatcgtaagttatcagtgggtggctctttttatagtatggtaggaacttggtcgggagacgttaattacatatgctatatgtacctccgctggtctttatccgtaagttaatatatatactgctttgag

SEQ ID NO: 2554 - DNA, 1404 bp, Zea mays
  Clone ID: 700217161_FLI
ccaatccaaaccagacaagcaaggaatcccccgatggctcatcgcgttctcctcctcctctctctcgcgtcggccgccgcggttgccgccgccgtcgacgcggaggacccgctgatccggcaggtggttcccggtggagatgacaacgatctggagctgaacgcggagtcccacttcctgagcttcgtgcagcggttcggcaagtcctacaaggacgccgacgagcacgcgtaccggctgtccgttttcaaggccaacctgcgccgcgcgcgccggcaccagctgctggacccgtcggcggagcacggcgtcactaagttctccgacctcacgccggcagagttccgccggacctacctcggcctccgcaagtcccggcgcgctctcctcagagaactcggggagtcggcgcacgaggcgcccgtgctccccaccgatggtctccccgacgatttcgactggagggaccacggcgccgtcggccccgtcaagaaccagggttcgtgcgggtcgtgctggtcgttcagcgcgtctggagcgctggagggtgcgcactacctcgcaactggcaagctggaggtgctttcggagcagcagttcgtcgactgtgaccacgagtgtgattcatcggagcctgattcatgtgattcgggttgcaatggtgggctaatgacgacggcattcagttatctccagaaggccggtggccttgagagtgagaaggattacccttacactgggagtgatggcaaatgcaagtttgacaagtccaagattgttgcttcagttcagaacttcagtgttgtgtctgtggacgaggctcaaatttctgctaacctcatcaaacatgggccattggcaatcggcatcaatgctgcctacatgcagacatacatcggaggcgtgtcatgcccatacatctgtggcaggcaccttgaccatggtgttctccttgttggatatggtgcttctggtttcgcccccattcgcctgaaggacaagccttactggatcatcaagaactcgtggggcgagaactggggggagaacggatactacaagatatgcaggggttccaacgttcgcaacaagtgcggcgtcgattccatggtctctaccgtgtccgcagtccacgcctcgaaggagtagactctggtcagcggtgataatcgtgattccatatattgtagaactataatccctgctagtaatccatttgtgctgtttatgtatcgaaggcagcaaagatgtgtgaagcggcaatgggatgcttgctgtaaggtaatatgtttggcttgctaggcatgctacacgctatttggatgtagcaacgttatcaccagctgtatacgctttttaatcgacaacatttgaataatatgtacataacattatgttgtgctc

SEQ ID NO: 2555 - DNA, 585 bp, Zea mays
  Clone ID: 700217167_FLI
cgtcggttcacttctccaggtaaggaaagggttcgtactcatggcgccgccgcagccaaagtcgggccttttcgttggcatcaacaagggtcatgtcgtcaccaagcgcgagctgcctccccgcccgtgccaccgcaaggggaaatcaacgaagagggtgtctatggtcaggggcctgatcagagaggttgctgggtttgctccttatgagaagcgtatcactgagcttctgaaggttggcaaggacaagcgtgccctgaagcttgctaagagaaagcttggaactcacaagagggcaaagaagaagagagaggagatggcgggcgtcctcaggaagatgaggtcggctggtacgcacactgacaaaaagaaatagagagcatttcaagttcatggagctggctgccagagattatgttccagtgtctgattttccatacatgtagaacctaatagacatgtcaaagtattatgtatcgaaccagctcatgggattttgctccttccaatgcatccagggtttatgtatcgaaccaatttatgggatcttgctcttattctaatgcatccatggtttgtgaatct

SEQ ID NO: 2556 - DNA, 1617 bp, Zea mays
  Clone ID: 700217221_FLI
aagctcaggaacatggtcttggaagcaacaaggaagcagcgtttcgagcgcgtgacgcgtgacctgaaggtgacgcgggtgttctcgacgctggtggaggagatgaaggcgatcggcatcatagcggcgggcggcggcggcggcgaggcgtcgcagtgcacggacgtgatggcccccgtggcgcactcggagcgcagcccggtgctgctgctgatgggcggcgggatgggcgccggcaagagcacggtgctcaaggagctcaagcaggaggcattctggaccaacgcggaggccaacgccgtggtggtggagtcggacgcgttcaaggaggcggacgtcatctaccgcgccatcagctccatgggccaccacaacgacatgctccagacggcagagctggtccaccagtcgtcgacggatgcggcgtcgtcgctgctggtgacggcgctgaacgaggggcgggacgtcatcctggacggcacgctgtcctgggagcccttcgtggagcagaccatcgccatggcgcgcgccgtgcaccgccagcgctaccgcatgggcgtcggctacaaggtggccgacgacggcaccgtcaccgagaactactgggagcccgcgagcgacgacgccaccgagcaacccccgcggaggccctaccgcatcgaggtggtcggggtcgtctgcgacgcctacctcgccgtggcgaggggcatccggagggccatcatcacccggcgggccgtcagggtcaggtcccagctgcagtcgcacaagcgcttcgccgccgcgttccagcggtacagccgcctcgtggacggcgccaggctctacagcaccaactccatgggctctgccaagctcatcgcgtggaaggacgggatcggaaacagcctgctggtggagccccgggagttcgactgcctggagaaggtgagcgggctcaacgagcacgccacctccgtccacgacctctaccccgacggcaccaccacctgcggctcgcgttccatctgggaggacatgatcgtctccacggcccgtgccgacacccagcgcgagctcagggaggccatccgctccgtcgagtccggcggcggccaaccggacacaccaccaacaacgccccagcgcgagctcctgggcttcatccgctccctggaggccgccaacgccgagcaagctgcagcaggtcagacaccgacagctacctgttagtggtgaaaatatgggccggatttttttagctagagcacaaccaaaaaacaatagcccacaacatgatccggcacgaaataatatgaaccacggttcgaaggcggatctagaccggaccccaaattctagcccgttgagccccggtatagctcatacatatgggtcgggtttgagccgacacggtccaatgaatcctatattatttgatttctttaatttattaagctacggattttatattgttgtgatatttggactatatatggtcaaattatgatatgattgtttatctctttaattgagtaagttatggattttatgtgattgtaatattttggttttatgtggtcaattatatgagtcaagcttggaccgacacggtccaacaaagacatgacgtgattt

SEQ ID NO: 2557 - DNA, 1474 bp, Zea mays
  Clone ID: 700217224_FLI
ccatcttcgaagccatataacatacctgagagcataattaaaagcatcaattttgacacattagagggtgcattgggtatcaagtttcagaataaaggcttacttgttgaagctataacacatgcatcaagaccatcatcaggtgtttcctgttaccagcgcctggaatttgttggtgatgctgtattggaccatctcattacgaagcacttattttttacttatacggacctacctccaggccgcttgactgacttgagagctgcagctgttaataatgagaactttgcaagggttgcagttaaacataagctacatgtacatcttcgccatggatcatctgcattggagacacagattcgagagtttgtgaaggatgtccaggaggagctttcgaaaccaggtttcaattcttttggccttggggattgtaaggctccaaaggttctcggagacatttttgagtctattgctggcgcaatattccttgatagtgggtgtgctacctccgtagtctggaaggtttttcagcctctgcttgatccaatggtgacgccggacacccttccgatgcaccctgtaagggagctccaagagcgctgccagcagcaagccgaaggattagaatacaaagcatcccgtacaggcaatgtagctacagttgaagtcttggttgatggcatacagattggtgtagctcagaacccacagaagaagatggcacaaaagttggcggctagaaatgcacttgttgtcttgaaagagaaggaaaccgcagcaaagaaagacactgaaaaggatggcgagaagaaaaacggttctcagttcactaggcagactctgaacgacatctgcttgagaaggcaatggccgatgccacagtacaggtgtataaacgagggtggccctgcccatgccaaaagatttgtttatgcggtaagggtaaatacatctgacagtggatggactgacgagtgcattggagagccaatgccgagtgtgaaaaaggccaaggactctgcagctgttcttctgctcgagctgctgaatcgaaattaccgtggcaagcctgatggaaaataatctttggtgatgttctgtggtggtaggtagacgtggaagcatccatcattctgattatacccccatgcagtgcttttcagcaaagcaaattaatggcctttgttgatgttcttggtggcggtattggtgatatggaggcattcaatgcaagcataagcagagctatggggagtgggattagaggattattattagttttgtctgaggtgactactaggtattttactggcgaggtactgaggtcacaactcacaaatagcagttgcaaattgcaatagaggaaatgatgataggttgatataggatattggaggcctcttattcatcgattgtataagatgtttacagaacagtgcattgatccattaaatttatattgattgatattttt

SEQ ID NO: 2558 - DNA, 923 bp, Zea mays
  Clone ID: 700217228_FLI
ccactacggcaaggcagtagagatacggcgtctcctcttctgacttggccagcgcaacggcagctagttcaattgaaccagagcgctttatagatagaacaaaaatatatactgtagaaatccatcgagaaacaaccgagaagacctgcggctgcggtgaagagagaactcagtggtgaagaagagggaaaaatcaccatgctggaccatctcgtcggactgctgaagctgcgcgtggtgaggggggtgaacctcgccgtccgcgacctccgatccagcgatccctacgtcgtcgttcgcatcggcaaacagaaattgaagacacgggtggtaaagaagagtgtcaatccggaatgggacgacgaactcaccctctctatcgaagaccctgctgttcctattagactggaagtttttgacaaggacactttcgtcgatgatacaatgggtaatgcagaggtggacatccgcccattagtcgagattgtgaagatgaaactccaggacgttgccgacagaaccgtggtaaagaaactggtgcccaacagacagaactgcctagccgaggagagctcgatatatatatcggaggggaaggtgaagcaagacatggttgtacggctgaggaacgtagagagcggggaaatagagctccagcttcagtggatcgacctccctggctctaagggtgtatgagtggggggcggctatgagctctgccttgccctgctgttttcgcggatctccaactctttttctacttgaaaagaagaactagtggtttgcgtgcgctcgctcgcgtagagctgtcagttgtatgtaagaagttatgattgcgttggcgtttagtaaaatatcgtcagggagatgtatgtgcatgaacatctgagaatcaagactataaaaatgtgtacaatgcatgt

SEQ ID NO: 2559 - DNA, 721 bp, Zea mays
  Clone ID: 700217236_FLI
gtcgatcgagcacctcatcctgaggcactctcctgacgccaagcaaggcattatgggcgacgacggacagacggatctgctgcactcgtacgggctagggtatcccgagcccaacgtcgtcttcgcgctgtgcagaggcagccgctcctcgccagcactgcgcgtgtacacggcggaggacgtgtcgaacgagctggagcgggccaaggtggagtacctggagtcttcggtgcgcgtcgccggcaggaagcagcgcgccgtcgtggtgcccaagctgctgcactggcacatgcgcgacttcgccgacgacgccgcgtcgctgctggagtgggtgcacagccagctgcccagggcgtcggggccgctccgccgggccatcagggaggtcctgggcgccaacatgggcagcggcagcagggcgcccacgccggcgccggcggccaagatgctggaggtcgagccgtacgacgccgacttctgctacctgctgcccgtctggtgagcgtcagcgaccgtccgtgtccatgtaagcaaggcattgctagctgcgcgccgcgcgggtcaagttctgctgtgaccattgctgcagtgcgaggtggtgacgatgtcgtgcatgtgaagcgtgaactacttccgccgtatgatagttttactacgtacatttttttgtgcgttgtgttgacgtgcagaagtatcaatcaataaggccttgttcatattc

SEQ ID NO: 2560 - DNA, 1787 bp, Zea mays
  Clone ID: 700217249_FLI
tctagaacctggatcgttgctctaaagacacttgtagtgatccataggcttcttcgcgaaggtggccctgcattccgcgaagagtttctaacatttacacagagagtgcggattttgcagctgtcaaacttcaaggatgattccagcccagttgcttgggattattcttcatgggttcgcacatacggtttatttttggaagaaaaattagaatgcttcagggttttgaagtatgacattgaagctgcacgtttatcaaagcaaggtcaaggacctgaaaagggccacagtagaactacggaattgaattctcaggacttgctggagcaattgccagcactgcagcaattgttatatcgacttattggctgtcgagcagaaggagttgcaaaaaacaattatctggtgcaatatgctctagcccaggttcttaaagaaagcttcaaaatttattgtgcaataaatgatggaattatcaaccttattgacaagttctttgagatgccaaagcatgaagcactaaaagcccttgacgtttacaagagggctgtccaccaggctgggaacctatctgacttctatgaaagctgtcagggtttagagcttgcaagaaatttccagtttcccactttgagggagccaccacaaacattcctttcaaccatggaggagtacgtgaaggaggctccgcgtatgatgccagttgtagagccactggagcttcctgagcggcttcttctgacatacaaaccagaagaagaagttcgtgataccgttccaattgtagcggagaaactgcaagttgttgaagaaattgctccagttccttcttcccaaatagctttgcctcccaagcctgagattgcagatactggtgatttactggggttaggtgattcaacccctactgtgttggcgatagaggagagcagtgctttggccttggcaattcttccgacaggtattgataactcaacaacaactacacagcaagatagtggatttgatccaacaggatgggaacttgctcttgttactacaagcagcaatgcgattccactgtctatggagagtaatttgggtggtggatttgacaagctcacattggacagcctatacgatgatggaacctacaggcagatgcagcaacaacagctatacggatcagcccctcccaatccattcatggcaagcgatcccttagccgtatcaaatcaagtggctcccccaccgtcagttcaaatggcggccatggctacacagccccagcatttgcccatgatgattgaaccaaatcccttcggaccaccacagcagcatcacgcgggcgtcgctcctgcagcaaaccccttcctcgacgccgggttcggtgcgttcccggcagtaaatggaatgcatccacagaccaaccccttcggaggcgccgcacaacttctctagtcatatatactttccaaagtttgcattacaattacatagaagatgtgcaatctgtagatacccacgccacgatgcaagacaagcaatcgacgtctctggaatcgcttttctccgtcagaccgttaccaatcagggaatcgccatgttgcaccagcctcatctcgcccttccgtaggctttggccgcttggccttgtgtagctttctgttttgctgtgcctggttttccatcttccgtggcgagccattgcactcattgtaaagaaatttgtttcatcaggctttgggctgataaaaccatgagtacgtgccaataaggcaataatccatcagcgtttgcatttgtgt

SEQ ID NO: 2561 - DNA, 891 bp, Zea mays
  Clone ID: 700217258_FLI
gcgagatggagcgcctctccgccaaggagtcattgctcctcgcctttaaagatgctgggggtttcgaggccttagtcagcgggaagaccactgagatgcagaggatcgatgtcaatgagcgaatcgttggacttgaacgcctgaatcccacaccgcgccccacaacatcgccgtttctggagggtcgatggaactttgaatggtttggtgatagtagtcctggagcatttgcagcccgtcttttgtttgagaggtcacctacggctgttgcacactttatgggacttgatgtgctgatcaaggatggatactccaagctctcatctaacctcaagtttgtaaacacgatacaaagcaagttcttactgactactcaattgtctgttgagggccccatcaggatgaaagaggaatatgttgagggccttatagagattcccagaatcaatgaagaatcattgcctgaacagttaaagggcttgcttggccaaactgcaggagctctacaacaacttcctagccctataagggatgctgtttcagaggggcttaaattgccacttagtggatcatttcaacgcttattcatgatctcttacttggatgaagaaatattgattatcagagatgctgctggagcacctgacgtcttaaccagacttgaggggccgcaaccgaatccaggtgacggcacagcagatgcagtgatatcggaatatgaaagctaatgcctcagtgctgactgtagctccgcacctagctcctgtttatggctcctttctcctctttggtcattttctcagtctcgcgcgtatataaagctttctagttctagtgttgtcaacgacgatgaccactcgagtgtttttacttaatacataccatttgtct

SEQ ID NO: 2562 - DNA, 596 bp, Zea mays
  Clone ID: 700217294_FLI
gtgcgacgtacgacgacgacgacgcaggcgccacacatggcatcccagctctccgccgccgtgccccggttccacggcctccggggctacgccgcgcccaggtccgcggtggcagcgctgccgtccgtgagggtgggcaggaagaggtcgtcgtcgcagggcatccgctgcgactacatcggctccgccaccaacctgatcatggtgacgacgacgacgctgatgctgttcgcggggcggttcgggctggcgccgtccgcgaaccgcaaggcgacggcggggctgaagctggaggcgcgcgactccggcctgcagacgggtgaccccgccgggttcaccctcgccgacacgctggcctgcggcgccgtcggccacatcctcggcgtcggcatcgtgctcgggctcaagaacaccggcgccctcgaccagatcatcggctagatccctacgtcgccgttgttaagatcagactcagcagcctcgatcgcgccgccggccggcaggtgcaggtggtgactttgtaacgtgtgtgcgtgcgtacgtgtacattgcatccatcttggttccaatggacatatagctcctgttgctcctct

SEQ ID NO: 2563 - DNA, 1287 bp, Zea mays
  Clone ID: 700217310_FLI
ctctggtgggaccccgcgttcgcgggttggtgacatggagtccggcagcatcgaggacccgccaacgcaccacttcacctacgaggagctcgaggaggcgaccaaccgcttcgacgaaagcagagaactcggcgatggcggcttcggcaccgtctacaaagggtacctcagggacgggcgcgtggtggcggtgaagcggctgtacaacaacgggtaccggcgcgtggagcagttccagaacgaggcggccatcctgtcggggctgcgccaccccaacctcgtcatgttctacggctgcacgtccagccacagccgcgagctccttctggtgtacgagttcgtggccaacggcacggtcgccgaccacctgcacgggcagcgggcccccgagcgcgccctctcgtggccgctccgcctcagcgtcgccgtggagtccgccgcggcgctcacctacctgcacgccatcgagccgcccgtcgtgcaccgcgacgtcaagaccaccaacatcctcctggacgccgactaccacgtcaaggtcgccgacttcggcctctcccgcctcttccccctcgacgtcacgcacgtctccaccgctccgcagggcacgccagggtatgttgatccagagtaccaccagtgctaccagctgacggacaagagcgacgtgtacagcttcggggtggtcctggtggagctcatctcgtccaagccggccgtcgacatcacccggcaccgcagcgagatcaacctggccagcatggccatcagcaagatccagaagtgccagctggaggagctcgtcgacctcggcctgggctacgacaccgacccggccaccaggaagatgatgacgatggtcgcggagctggccttccgctgcctgcagcagaacggcgagatgcgcccgccgatcaaggaggtgctcgaggtgctcaggaacatccagggcgagtgtctgacgtcggggaaggatggggacaagagcaaggacgggcccttctctcccaccacggttcacgctccgtgggacagcaggtccacgacgcccaacaccagcagggactaggatagttagtgcttgaggactgagaccggccgaggtttaattcgtgtctgtattgctgctgtgtgactgctaggcatgccatctgttttcaggcttcgtagttagttcctggtgatgtaaatatttgttttgttggtgctgtcaggacagagggaatgcacatacatgtgtaagagtggcgaatggtattatacatatatatacacgggtacttactgaat

SEQ ID NO: 2564 - DNA, 1346 bp, Zea mays
  Clone ID: 700217311_FLI
cacggtgacggaggacgtggtgacggggtaccggatgcacatcaaggggtggcggtcccgctactgctccatctacccgcacgccttcatcggcaccgcccccatcaacctgacggagcggctgttccaggtgctccgctggtccacgggttccctggagatcttcttctcccggaacaacccgctgttcgggagcacgttcctgcacccgctgcagcgcgtggcgtacatcaacatcacgacgtacccgttcacggccatcttcctcatcttctacacgacggtgccggcgctgtcgttcgtgacggggcacttcatcgtgcagcggcccaccaccatgttctacgtgtacctggccatcgtgctgggcacgctgctgatcctggccgtcctggaggtgaagtgggcgggcgtgacggtgttcgagtggttcaggaacgggcagttctggatgacggccagctgctccgcgtacctggccgcggtgtgccaggtgctggtgaaggtggtgttcaggcgggacatctcgttcaagctgacgtcgaagcagcccgcgggggacgagaagaaggacccctacgcagacctgtacgtggtgcgctggacctggctcatggtgacgcccatcatcatcatcctcgtcaacatcatcggctccgccgtggccttcgccaaggtgctggacggcgagtggacgcactggctcaaggtggccggcggcgtcttcttcaacttctgggtgctcttccacctctaccctttcgccaagggcatcctggggaggcacggcaagacccccgtggtggtgctcgtctggtgggccttcaccttcgtcatcaccgccgtgctgtacatcaacatcccacacatccacgggcccggcggcaagcacggcggcgcgatcggaaggcacggcggcgacgcacaccaccatggcaagaagttcgacggctactacctctggccgtgaagcgccgagcagccagcatcgtcatgcatgcacatataccgcctgccctgatggtgacgatggtgagccgccaaggtgaagagtgtacacgttcccgttcatccatccatcgtctccttagtactgctgcccggtgattagtcgatgaagagtgaaggtgaaggctacccacacacacacatttggtcgacgtacccgccaaaatttgaattttttttcttcccccttctcccccctccctctcccttctcattcttttttcttttagttttgtccagaaatcgaaaggtgtgttgatttgatttagtttttttaattaccgtgccccgtggtaattaattatgtacgtacttatatatatatatacattacgccg

SEQ ID NO: 2565 - DNA, 1452 bp, Zea mays
  Clone ID: 700217322_FLI
cgccagatccaagccgcgacccagacggcaagatagagcgagcgacctctcgattctccccatcccgccgtgcttcccgtcttcaccaaatccttcgccacgatggcgcgcctgctcatccccctccccttcgccgccgcctctgcctcatcgctccacctcgccgtctcccgccttcctctcgccgcggtctccgccgcgcgtcgcgagtgtctctttgggggaagggtggtaggaggagtggtgagggcgcccgcgaggctttctaagcgcgggttgtgcgccggcgcagaggctggcgactcggccgtcacggtggaggccatggaatgggtcaagaaggacaggaggcgcctgctccacgtcgtctaccgcgtcggggacctcgacaagacgatcaagttctacacggagtgcctgggcatgaaactgttgaggaagagggacattcccgaggagaggtacaccaatgcctttctggggtacgggcctgaggattcacattttgttgtggagctcacttacaattatggtgtggagagctataacatcgggactggttttggccactttggaattgctgttgaggatgttgcaaaaacagtggaacttattaaagcaaaaggaggaacagtcacaagggagccaggtcctgtcaaaggtgggaaatcagtaattgcctttattgaggatcctgatggttacaagtttgagcttatagaaagagggcctactcccgagcctttgtgccaggtaatgcttcgagtgggagatcttgatcgtgctataaatttctatgagaaggcatttggcatggaacttcttcgcaagcgagacaattctgagtacaagtatacgattgcgatgatgggatatggtccagaagacaaaaatgctgtattggagttgacctacaactatggggtgaaggaatatgataagggaaatgcttatgcacagattgctattagtactgatgatgtctacaaaactgcggaagcaattagagtaaatggtggacaaattactcgtgaacctggcccattacctggcatcaccaccaagataactgcatgcacagatccagatggctggaaaacagtgtttgtcgataacatagattttctgaaggagttggaagaatgagctttgctagagatctcaacttggtacatcaagctccatacggttgcaccccgtgagttccatgcatgacctgcaaaatctttgtaaagccacagcctcaaactgaggattgtagataggtcgtccaatctacggcatcatcgcaattgatagttgatagagcattagattttccttgcagatctatatagatgcgcaaccgtttttgtattatgcattttaatgcataagttcaatggaaatgattcatgggtaagaaaatcgtcttctttcaagcggcaatataagggctggtttggtgacttg

SEQ ID NO: 2566 - DNA, 860 bp, Zea mays
  Clone ID: 700217348_FLI
gacagcaggtgccaccgcaaccggggcaagttgcatttgtcatttataaactggcttctggaaacaagaatgtctgaacaaaaaagtaaccacgctgattagcagatggagctgaacatatattattatatactttggtccttattacgatcttaatcctgaaaatttggatttttaggggaccaaaagcttgtgctctacgagtacatggagaagggcgacctgcaccggtggctgcacgagctgccagtgggcagcatggacacggaggacatatgcatcgacgcaatggaagccatgacggaagacagcagaaagcccgcgggcgactggcccacgcgctaccgcatcatcctaggcgtcgcgcgagggctggcgttcctgcaccagggatgggccggggccgggggcgggcggcggccgatcgtgcacgggcgcctggtcccgaccaacgtcctgctcggcgacgacatggagccgcggatctcggacttcctcccgcaccccggcggcggcggcggcgccgagacggcggagggcgacgtgtaccgcttcggcgcgctggtgttcgaggtggtgacggggcaggcgcggtggggcgacgcggcgaccacaagctgggcgcgcggcgtggtccgcaaccgcaagggcctcaacctcgtggacgagcggctgcgtgacgagacggcggggacgggcgcggagagggagctgctcgagtgcctgcaggtggggttcctctgcacggccgccgcgccggagaagcggcccaccatgcagcaggtggtcgggctgctcaaggacgtccgaccggccgccaccgctggaggtggcgtgccgccgccgccgctcaggtcgct

SEQ ID NO: 2567 - DNA, 790 bp, Zea mays
  Clone ID: 700217393_FLI
gggctgcgactgcgagagccagccgcacccgcaccagtccataggccggcctcctctcttaccttcccacaccccttctcgaccgtacgtagcctagttgtgcttggtagccagccagaaggtcgtcggccgatgatgggaggaagaacagtggccccgccgctcgtcctcgcgctggtgaccatcatcgccatcgcggcggccgagggggacgaggtgaagtgtggcgggtgctctccgtgcggcggcgccgactgcccggtgctgtacccgtcgccgcccccgccgccgtactactactacagccctcccccacccgcgacctaccccggggagtcctcgtcatactaccagccgccgccgccgggcgcgtacatccagatcgggagcgcgccgccgggcaagggcccgctgtacccgcaggacccagggttcatcccggccggcgcgccgggccgcgccgcgccgctcgcggtcgtcgctgcgctcgcgccggcgttggcgtgcgcatgggccttattgtgatctctatgtgcttgacttgacaagcgcaggcgagctgcttattcgtcggtaagtaacgcggcggatcgtgccggcgttccacgtacgtacgggttaattcccccagtgtatctacgcatgctccttgtgatatatataataatcttcattggccgtcatttgggctaagctgcagtagttcttggaatgtatgaatgtttttcattggccgtcatctgctagtgtaatagtgatatttttctatgtgtaatctctcaggaaacat

SEQ ID NO: 2568 - DNA, 828 bp, Zea mays
  Clone ID: 700217506_FLI
gtcgcatggctccccacatcatggcagatcaatggaggaaagggtcagagtggtttgagcttaaccgcgagctggctgtccagatagtagcggactacaagtactactccatcttcaggaagcactgcaggccatcctgttatccagacgagcattacataccgacttatcttcatctgttccatgggccactcaacgccaacaggactatcacatgggttgattggtcaagaggaggcccgcacccagcaagttatggtgccacagacatcacagaagacttcatccaggccatcaggaataatggtacgcagtgcttttacaactcgaagcccacctctgtctgctacctcttcgcgaggaagtttgctcctaatgctttgccacggctgatgaacctcacctcgaccgtgctggacttctgagccggttctcaccatgcgggcgggcgggcatcgttgtcagcatctcgctactgaggtatatctatggatgcatgtgccggtcgggagctagaacttctataccctgctagattggagtctgcgacatgtgtctcacagaatgatcagaggtgggttttggtgtatgcgtctctcgcggatgatgacgctgtgtgggacagtgaaaacagccttttcactcgccctgaagctgatctccgcgagtgatcgacagatggcgccgcctacggagatgacgtttctttcacctcccattcttttttaatatatcatagtcatatgatagaggatgtcttcttctcttcttctccctatctatctactgtattgactcagtcagatactaatttctgtgaatataacc

SEQ ID NO: 2569 - DNA, 1351 bp, Zea mays
  Clone ID: 700217512_FLI
gtgccatcatcatcagtttcttcgtcgtcagatttagatccgttgctgaagggtcttacggagaagaagttgagctttaggaggaacgtggtgtcattggcagccgagctcaaggatgtgaggagcaagcttgcttcccaggagcacctgtttgtaagggaatctcaaactagaaagcttgtggagacaaaagcaaggagcatggaagaggaagtaagcaagctgcagaaatgcttacaggacaaggatgagcaactgcgttcatccacaagtagcacagaacagtacctccatgagttggatgatcttagaacacaactgtcatttactcaagctacagcagaagcaagtgctgcatcagctaagtcagcccagatgcagtgcttatcattgctgaaagagctgaatgagaaggacatctcgctcaaagagcacgggcttcgagtgaacaagctaggtgagcagcttgttcttctccagagggaactacaagcaagggagctctcgcaaatgcaacttaaagatgaagttataagaatcgagaccgacatcatggatgcagttgccaaagctgggtataggtctgacaaagataatgagcttttaaagatcttatctgatgtttcaccaaggaatgtccagaacctcaacaaccttttgaatgccaaggatacagaaattgcgaggttgagagaggaaatcagaatattgtctgctcattggacaaacaaaaccaaggaacttgagtcacagttagaaaagcaccggagaactgatcaggagctgaagaagagggttctgaagcttgaattttgccttcaagaatcccagtctcagatgcgaaaattaaagaggatgggcgagagaagagacaaggctctcaaggagctcatggaccaggtggccacgaagcagccaaacagcatgtgccatggcaacaaggagaatttctgggagggccagggcttcaagttcatcgcgtctatgtcgatgctggcactagtgatcctcgcaaagcgatgaagcagcatcgcatacccaatcttgtgtaaatcaatcgttaggtgagcaactagctcatagcttaagcagatgtcgatgtagcgtttacattagtttgtattcttgggcagctgtgcatactgcatgttcagaagttgcggtctgtaatccgtagtctctgctagggcatgtgaactcagaagctgtcttgtactcacagctagttcatgtcagctcatgagcagtcatgaatctacatcttgtaatttcagagtagcttcagcagttgtcacatgtaactctataattgctgaatctacatcttataatttgcactcttatggttgcg

SEQ ID NO: 2570 - DNA, 756 bp, Zea mays
  Clone ID: 700217516_FLI
ggctctgggctctgggctatggcctagcctccactgtctcccagtccccaggtcctcatcggcctccggtcttctggtctccccagatctcccaccggggaaccctacccgagcatcagccatggcgatcgcggcgcgcgtcctgcgccgcctcccgctccacctctacccctcgctcgctcgctctttctgcgcagtttccccggccgccgcctcggccgccccggcgtccgcctcggccgccccggcgtccgccaaggtcgccgatcgcatcgtgcgcgtcctcgccatcgatctcgagggggcgcgccgcgaggtcgtcggcctctccgggcagacactcctccgcgcgctcgccaacgcggagctcatcgagccggcctcccaccgcctcgaggatatcgacgcgtgctccgccgagtgcgaggtccacatcgcgcaggagtggctcgacaagctgccgccaccgtcctacgaggagcggtacgtgctcacgcgcgcgtccaggaaccgcgagctcaacaagcacgcgcgcctgggctgccaggtcgtcctcacgccggagctgcatggcatggtcgtcgctgtccccgagcctaagccgtgggacatcccgtaatggcctgccgcgacgaatggcaaggtgcggctttcgacgctgtgagccttccttcattcccctggctcggtcaagcttgtgcgcctctgccatacccttttattcttcatcaaatccgtaacataaaagggatcgcg

SEQ ID NO: 2571 - DNA, 834 bp, Zea mays
  Clone ID: 700217540_FLI
caagaaatccaaatattcagactccagtctagcattgagcgacgagcccgagtatcgtctttagactcctcattcctcaacccgacgcggcggtgtgcccccctgctttttttggcctctccactccgttggcgacgcatacatccggcgagggagcggaagaagtcagtaaattctgtcgctccaatccggacgaggagatgccgcggatccctctgatcaagttccccaagcggaatctgaaagccccatccgcgccagtgccgtcgcaacccgcagatcagcacgcgaccctcatgtcccggttgggggctaaagcagaggcaccatcttctggagggattaaaaattaccgctttagttcagatgtgccttccccaccgtcgcatactgctgtaggaggtccagcttcactccttcctaagcgtaaacctctgactgaagaagagattgaggctattatgctgggtggctccatctgatatcccctcatatgaattggaatttctaggaacatcaataagatcgcatacccggacttattgccttcgacctctattattgaagtcatgttgatacagaattgggtttttttccaattctctgcaagtcagttgtggagacattaatttccagtattctgcacatgtaactgaccaaatcgtgaacacattgagttccttgcggaagaagtgttgatcatggaatgtttttgcatctgattattttgtattgatgtcttgaattcttgccacacctgaagatctgatgatcatgccttttgaggcatgcctattttttgaagcaggccataagttccgtgtgtttttggat

SEQ ID NO: 2572 - DNA, 510 bp, Zea mays
  Clone ID: 700217620_FLI
ggccggcaggagatttccaccaccaccgccggaccaccccgaccctccttccctctcgcgctatggcccagactgttgtgctcaaggttggcatgtcctgtgagggctgtgttggagctgtcaagcgggtcctgggcaagatggaaggcgtcgagtcctacgacgtagacatcatggaacagaaggtcaccgtgaagggcaatgtgacacctgacgccgtcctgcaaactgtttccaagactggcaagaagacttcgttctgggaggctgaggccgtgacaagtgaatccgccacacctgccggcgccaccgcctgacaggttcgatgatctggaagtgcccagcaaaaaaatgtgaatgtatttagcttggatctgttacaaataattgcaaactgctagctcggtctgtacattttacagttgctatttgtatactgtgatgttctcgtatgtttgtggaggcgataaaccaatatttgtatgatatatgtgtcgtgttccataaggt

SEQ ID NO: 2573 - DNA, 1478 bp, Zea mays
  Clone ID: 700217659_FLI
ccaacttccgggcaggcatctgcatccaaagggcgctcgattctctagctagctaggatctagcaacacaaacccgtctgtccatatattatgggttggtaacaattaattagactgaagaagatcatctaacgaggatggacgcaaagaaaccatacatgctggctattactacagtagcaatctacaccggcatgtacgtggtctcaaaggctgccttcaaccagggaatgaacagcttcgtcttcgtcttctaccgccaggctgctgcatcgcttctcctcctgcccatcgcacttgttctagaaaggaaaaatgtgcgatccatgtcctctgggttgatcctgaagttgttcttgcttgccctaatctggaacacgttaggcatgaatctgtgcaatgcaagtgtgacgctcacgtcagcaaccgtggcgtcggcaacaggaaactctactcccgttatcaccttctgcctggcactgctactgaggatggaggtggtgaagttaaggagcgtctctggcatagccaaggtcaccggcgtagcactgtgcctggccggagcgttggtcatcgccctgtacacggggccgtcgctcagcccagtcaaccgccatcaccgtgcctctggcggcgcccatggcttcaaagctccaacccgtggggggacatgggttacaggcacgttcctgatgcttctgtccaacgtcacatggtccctgtggacggttctgcagggcgcgctgctaaaggaataccccaacaagctcctcgtcacgacctcccagtgcttgttcagcaccgcgcagtcgttcgtcgtcgcagcggtggccgagagggacttctcgaaatgggcgctcaagcttgacgtcagcttgatcgctgttgcttacaccgggtttctcgtaactggcgtatcctactacctgcaagcttggtgtgtgcagataaaaggacctgtcttccttgctgtctggaacccactctgctttgtgctaaccatattctgttcctccttcttcctcggcgagaatgttcacctcggcagcattgtgggtggaatcctcttggtctgtggcctttatagcgtgttatggggtaaaaccttggaggttcatcagactgtggaatctggtgataatacggtcggtgaagtgcaaaatggacaagaagagaagaatcatcaacagaaggtgctggagaagggacgccaagaggaagcatcaatgacagcacccggtgtagtgtgatcgattgcttgattccataaagctagcaatctatggttcatttatgtcatgtctgtggttcttgtacaaattgcctgtgagtcacaataattgtttcaagatctttaaattgttacatgttttaaaggccaaaataaataaaatttaggtgataggcaaaagtaggatgatttttccaactactccagtactcctgctctacaaacactacaccaaaactttgaactt

SEQ ID NO: 2574 - DNA, 2638 bp, Zea mays
  Clone ID: 700217752_FLI
gcaaggatggtgcttttgaggatgtcctgagggcagctcaggaggcgattgtcatccccccatgggttgcacttgccatccgccctaggcctggtgtctgggagtatgtgagggtcaacgtcagtgagctcgctgttgaggagctgagagttcctgagtacctgcagttcaaggaacagcttgtggaagaaggccccaacaacaactttgttcttgagctggactttgagccattcaatgcctccttcccccgtccttctctgtcaaagtccattggcaatggcgtgcagttcctcaacaggcacctgtcatcaaagctcttccatgacaaggagagcatgtaccccttgctcaacttccttcgcgcccacaactacaaggggatgaccatgatgttgaacgacagaatccgcagtctcagtgctctgcaaggtgcgctgaggaaggctgaggagcacctgtccaccctacaagctgataccccatactctgaatttcaccacaggttccaggaacttggtctggagaagggttggggtgattgcgctaagcgtgcacaggagactatccacctcctcttggacctcctggaggccccagatccgtccaccctggagaagttccttggaacgatccccatggtgttcaatgtcgttatcctctcccctcatggttacttcgctcaagctaatgtcttgggttaccctgacaccggaggccaggttgtctacatcttggatcaagtgcgcgctatggagaacgaaatgctgctgaggatcaagcagtgtggtcttgacatcacgccgaagatccttattgtcaccaggttgctctctgatgcaactggcaccacctgtggccagcgccttgagaaggtccttggcaccgagcactgccatatccttcgcgtgccattcagaacagaaaacggaatcgttcgcaagtggatctcgcgatttgaagtctggccgtacctggagacttacactgatgacgtggcgcatgagattgctggagagcttcaggccaatcctgacctgatcatcggaaactacagtgacggaaaccttgttgcgtgtttgctcgcccacaagatgggtgttactcactgtaccattgcccatgcgcttgagaaaactaagtaccctaactccgacctctactggaagaagtttgaggatcactaccacttctcgtgccagttcaccactgacttgattgcaatgaaccatgccgacttcatcatcaccagtaccttccaagagatcgccggaaacaaggacaccgtcggccagtacgagtcacacatggcgttcacaatgcctggcctgtaccgcgttgtccacggcattgatgtgttcgaccccaagttcaacatcgtgtctcctggcgcggacctgtccatctacttcccgtacaccgagtcgcacaagaggctgacctcccttcacccggagattgaggagctcctgtacagccaaaccgagaacacggagcacaagttcgttctgaacgacaggaacaagccaatcatcttctccatggctcgtctcgaccgtgtgaagaacttgactgggctggtggagctgtacggccggaacaagcggctgcaggagctggtgaacctcgtggtcgtctgcggcgaccatggcaacccttccaaggacaaggaggagcaggccgagttcaagaagatgtttgacctcatcgagcagtacaacctgaacgggcacatccgctggatctccgcccagatgaaccgcgtccgcaacggcgagctgtaccgctacatctgcgacaccaagggcgccttcgtgcagcctgctttctacgaggctttcgggctgacggtggttgaggccatgacctgcggcctgcccacgtttgccacagcctacggcggtccggccgagatcatcgtgcacggcgtgtctggctaccacatcgacccttaccagggcgacaaggcgtcggccctgctcgtggacttcttcgacaagtgccaggcggacccgagccactggagcaagatctcccagggcgggctccagcgtatcgaggagaagtacacctggaagctctactcggagaggctgatgaccctcaccggcgtgtacgggttctggaagtacgtgtccaacctggagaggcgcgagacccggcggtacctggagatgctgtacgcgctcaagtaccgcaccatggcgagcaccgtgccgctggccgtggagggagagccctccagcaagtgatgcgcgacggcggccacagacctgatcgatcgatgagcgagagggagcactcggagtgtcgtgtcttttcccttgccatttctttctttttttcccttcccggaggcgaaaaaaagagtctgcttttgctaggcggcgggcgttcgttgctgctctttgcttcaagagttaaatttacctaccttgtcaaggtcttgttccatcattgatccgggtgtcgcttttttagtagtctgatggactgttagtagtttgcgttgcgtcggttgagagggaacgttggtggtggtggtgtgtgtgcagtcaggcgtggtgctccctttgtttcctggatgggatgttgctccttgaataataatcgtagtggccttggagcccttttcctg

SEQ ID NO: 2575 - DNA, 1010 bp, Zea mays
  Clone ID: 700217778_FLI
ccgccccaccgccatccgcgccgaagctgaagtgcggcctccgctacctgtctccgcggcggagtcagagccccctgacgccggcgctgtggaagccgaaggtcagggacccgtggagctccgcgctccgacgctcttctcgactgatgacaatcccaccccgctccagactgccaccagtctcctcctcaccggcgccatctcggtcttcctcttccgcgccctccgccgccgcgcccgccgcgccaaggagctcagagtgcggtcgagcgggttgaagaagcccaacaatctcaccgaggaggccctggagaggctgagattgatgagcgcctcaccgatcgagaccgagaaggcaacttcgcccatccaggctctgctcggcgggattgcggcgggggtcatcgcactcatcctctacaagttcagcaccacagtcgaggctgcgctcaaccgtcagaccatctcggacagcttctcggttcgtcagattacaatcacaataagaacaattgtcactgggctgtgctacctagcaacttctgtctttggaatcaatgcggtgggattagttttgtattccctccaactcactttacaatcaatcatggacgatgactccagctcttccacagggaagattagtgaacaatctaatacactggcatcatctgatagctccacaagtagcagggaatcagacagtagtgacatgcaagtcactgacaaaagtaaaaactcagcagagaagcagagctagacatgtaatccagacagccaaaatctgagatctgagggtacatatctgatgaaatcattttaagcattccttctcattattagctgaaaaatctgatgagagcgatctcaactcgagagtttcaattatgctagtattccgtccaaaatccgtccaaaaaaaagaagagaactcaattctagatttgagctaagttaaattgtcttaagtttgattatgtttttttaaaaatatcattatttatatcatt

SEQ ID NO: 2576 - DNA, 626 bp, Zea mays
  Clone ID: 700217779_FLI
gtgacgctggaggaagccagttctatgcctgggagcgtgaccggttcgccccatttccgttgatgcctgtggactgcgagataagctggtggacctcacagcagcagtctcatagcacatcagagccttcatctgctccaaggaggctattcgggcaatggctcggcgtcggcaggtcgtcccctgaaaatagaccacccgagggctcttcgtatcggcaaatgatgcctgtggactgcgagacaagctggtggtcctcacagcatcagtctcatagcacatcggagcctacatctgctccaaggaggctattcgggcaatggctcggcgtcagcaggtcgtcccctgagaacagatcgcccgagggctcttcgtatcggcaaatgcactcgccacggatgtagaccatcgctgctggcaatccaatttaatttggaacccgagatgcttgtaagaaacgatgggaaacccattgtattatgttaggccaggctgggccgtaaaactttgggacgatgttcgaggggcgagaaacaggaaatcatccggctgagaggatattttgatttggtttatgtgaattctatctcgtacatatttgaaatcaagttgggatgttaggagtc

SEQ ID NO: 2577 - DNA, 1167 bp, Zea mays
  Clone ID: 700217784_FLI
gatctgtcgcatgctccatgctcatccgtttcgctgctatcttttctcctctctcgattgatcgcttactccaccgaggcgaggaagcgcagcccagatcgccggaggtgagcggcgatctcaccagctccgagcaacagcagatcgctagaggcaagtggcgatctcaccagctccaggcagcagcagggtttcccgtcagcggcttctgcggcgggcgccatgaacagcagcaagcaggcgctgatttacagcttcgtggccaagggctccgtcgtgctggcggagcacacggccttctccggcaacttcagcaccgttgccgtccagtgcctccagaagcttccccccaacagcaccagatccacctactcctgtgacggccacaccttcaacttcctcgtcaaccgcggcttcgtgttcctagtggtcgccgatgaggcggccgggaggagcgtccccttcgtcttcctagagagggttagggaagacttcatgcagcggtatgggtccagtatcgatgaggaggggcagcacccgctcgctgatgatgctgatgaggatgactttctgttcgaagaccggttcagcattgcctacaaccttgaccgtgaattcggcccgaggttgaaggaccatatgcagtattgtgttaatcatccagaggaaattaacaagctctccaaggtgaaagcccacctatcggatgtcaaagggatcatgatggacaacattgagaagatattggatcgcggggagaagattgagcttttggtgggtaagacagagaccctacagtcacaggcggacagcttccacaggcatggcagagagttgaggcgaaagatgtggcttcagaacctgaggtttaagctgatggtgggtggcggcattgcggctctgatcctcatcatttggctgatggtctgcaggggattcaaatgttagagcacaccaagttgctcgccttttttcttttcaggcgtttgatatgcacagactttcaaccaaattgtgttttcagtgtcacggtatcgcaatgtagtggacttcaatccccgcagtctttcccatgttccattacttccatatgataatggtaaaaggtaggaagctggagtacgcggtcagaactgtctggaggagatatgacatcacgacttaaat

SEQ ID NO: 2578 - DNA, 483 bp, Zea mays
  Clone ID: 700217802_FLI
ggcaaagcacgcgcaaaagccaccaccgcgtcgtcgtctccaagcaagcgaagagcgcctccctactccccctcgagatcttctctccctccccgcgccgctatggacgctgttgactcggtggtcgacccgctccgcgagttcgccaaggacagcatccgcctcgtcaagcgctgccacaagcccgaccgcaaggagttcaccaaggtcgccgcgcgcactgcgatcggcttcatcgtcatgggattcgtcggcttctttgtcaagctcatcttcatccccatcaacaacatcatcgtcggctccggctgatccatgcccctcaggagtggtcaatggcgtctccgccttggaggcgcagctctggcatccggaaaccagtttgtttaggtgaaggacgagtcccgtggtagacctgtaactcttttgtgcctgatgccgaatagtcgtatgtgaagaagaaaaaagtaaaaggttaccgtg

SEQ ID NO: 2579 - DNA, 1429 bp, Zea mays
  Clone ID: 700217877_FLI
gaggatccttgtattcgtttactctcgtactgcaaaaagcatagacagccttctgctgctgaacgtccatctttagaaagtgatcctcctgaacccattcaggtagttcagacagatatggcttcatcatctggttgtgcaaggaccgaaccctataatttacacaggagaaggggccaaaagcagccacaagttgtcgctactgcttctctgaaacgtttatatgtggagaatagacctcatattgtcagtggctactgccaaaacagagtaggcaatacatgcggagaatcaattcaaccgtttggtttgtcagatgctgtgcagcaagaagctattggcaatgtgtcttctatggttgaaaaatatacaatcgtgaaggctacatttaggaagagactaacttttggaaaatcaaaaattcatggatatggtgtctttgccaaggttgcacacaaggccggagatatgatggttgaatacataggggagattgttagaccaccgatatcagacactagagagcggcgaatttacaactcactagtgggtgctgggacatatatgttcaggatagatgatgaacgtgttatagatgccactcgggttggaagtatagcccgtctgatcaatcactcatgcgagcctaattgctattcacgtgccataactattcttggagatgaacacatcatcatttttgcgaaacgggacatagatccatgggaagagctgacatatgattataggtcagaaggttaagattttgctttttgaccttttgaacatcatagttttgtacaaaatgttgtccatgctttcttcaggtttttttcaagtgatcaacgacttccatgtttttgtggattccccaaatgccgtggagtagttaatgatgttgaggcagaggaacagtcggctaaaatcagagttaagagaagtgaattatttgaaaaaagtgaaaagtaaaggtacatcatattggttgggatatgacatgcttgtgtgatatgcttgccagtgcctaaaggcaaattctaaaaaatggttgagtttcattcttgaatcctgataattcttctcattatttgagtggaagacgaatctaattgtataggtacccaatataggatcggcaatccaatttggggacataagttgaatcaattgtcgtgtaccattgaaatgttagttgttacacatatttcggccatttatcttgttgaacctaccctattttcaaccgttggagctgggaatcggaggggtggtttggttaaatgatttgagatggcctgccatgtgtaatgtaatcgaagtacatggttgcacttttcggtgttgcccatatattatccataacaatatgtagtttcagctgttctgcatttacgaaaatgcattggaagagaaacgtccacttcaactg

SEQ ID NO: 2580 - DNA, 1470 bp, Zea mays
  Clone ID: 700217894_FLI
ggattaggagcctgaaagatcgagaagccaaacccacaggcagagaatagcacggtttcgtccatccgatccgcgacgatccacagccatggcgatggcttacaagatggcgacggaggggatggacgtgaaggaggagtgccagcgctggttcatggagatgaagtggaagaaggtgcaccgcttcgtggtgtacaggatcgacgagcggtcgcgcgccgtgctggtggacagggtgggcggccccggggaggggtacgaggagctcgtggccgcgctgcccggcgacgactgccgctacgccgtcttcgacttcgacttcgtcagcgtcgacaactgccagaagagcaagatcttcttcatcgcctggtacgtacgtacgtacgtacgaattcctgagccgctcgccttcagtttcccgtccaatggcttggctgttcaatcagtgcagcatcctaacgtcacaaaagcagggaaattgttgcttgcggcaatcatcccagctgcctttattaaggtcgccggttattttatcagatctgatctagcctgaatccacctgttgcctagatctgtcagcccaccgaaagcacgcagcgcccacgatgacagttgacagccataggcaaaactgtccaataatccgccagccatacattattattttttggacaataagttagtagcaacccgtcagcagaaacgagagcaactataatttatatacatctacctttcttgatctgtccgtgtccggcaacaagagcagcagcaaacaaatcaggattccatcgctacgagcaagcaactaccgaccgagttattctactactgctagcttgtcaactcgctccggtgtccacttgttaaagcgctatgattctgctggtgcgcacgcagttaggtgttctgacgggtgggattcgtttgctcggcggttggtgccgcgcgccgcgcctttttcttcttctttcgcgcaggtcaccggcggcgtcgaggatacgggccaagatcctgtacgcgacgtcgaagcagggcctgcggcggctgctggacggggtgcactacgaggtgcaggccaccgacccctccgagatgggcttcgacgtcatcagaggccgcgcgcaatgagagcgtgattggcgttggtgtgatgagctgagcctcccgatgatgccggtctgacgaggcttcgcgtgtgtttgctttccccccggttcttccgagagatggtgcagtgcaggggcgtggtgtgctgatgctgatgggtggagttactggagtagaagctgagggagtggcagcggattaatgaaacgtccatctccgcgacgtagaattccactgaacaatgctccagtgcaccataagctgctgcttcagatttgtttagaaagcaacgcctctctacgtacaattccgaccagagttgttatgggcttgtgaatgatccgtttttttttttgttcg

SEQ ID NO: 2581 - DNA, 701 bp, Zea mays
  Clone ID: 700217944_FLI
gatcgatcgtatctgcggaacaagcagcgaaggatcggagcctatccaatggccgagggcaacagcagctccggcggcgacctgttctccagcggcaagctggtggcgggggccgccgtgtcggtgttccagcggaagagcgtggagaacgtcgacaagcaggaggtcgccggcgcggcggccgagctcctgcacgcggcgtccgcgtacggtaagctcgacgacaagccggccgggcagtacgtcgagaaggccgaggggtacttgaaggagttcagcgcgggcgcgggacacgccaccgagcaggagcagcctgcggcggcagcaggcgacgacgcggcgcccaagccaccggcgccggaggcgcccaaggagccggcggcggtgcctgcgccggccgcggaggaaggcagcaagtcgtcggagggcttcggcctcggcgacgtcatgaagggcgccgagcagctggtgggagggaagcagcagggcggcggggaggagagcgccggcggcggtgggttgtttaagatggcccagggcttcctcaagtagatattgtctggccaacgtatatacgagtacgtaattagcttcaaaataatgttcccctcgcctttatttgctgttcaagtccctgtaataaccgagaacgttaattgtagcagtgtgttttttatatgattaaataagtactatgttgt

SEQ ID NO: 2582 - DNA, 701 bp, Zea mays
  Clone ID: 700217948_FLI
gcagaccgccgccatcagcgctgttttgctatctagcccgtcgttggccgctccgactccactcggcagtcgcctcgcggctggtgtttcggacccttccccgacaggtgcgcagtcccgcccttccccgccatgccactggcactccatcgctcggcccactcggccgtgcatccggcgctccaccccgccctggccctcctctgattgctccggccctgctagcttctcgccgccacgctgcccgcacccgccgttccgcccacgaccgtcggtagctagcaccacgatccacaccattgcgacctagcacgagaggtaattttttacgtttttaattatttattttcgacaaccattttttattagccgccaaaattagtgggtaatagtttatgcaatcaatgtttgtgtgaaattgtttgtttgattaggtcgtttttcattacttttgattagttacatgtttatgcatttgaaagtataattaatcacatgtttagttatgtttatttaatgtttcgttgaaatttcagtgtcattctattaattaatataacattaacttcaattcaaaattagcatgtatttttgtttgtttcgattttattaataagacatgtttttgtattttgtggttcgaggtatattaatttcatattggtatgcattattatgtagtttgagaagcgtgttatagt

SEQ ID NO: 2583 - DNA, 1093 bp, Zea mays
  Clone ID: 700217955_FLI
gaaccgtgtcattcaagagcccggataatattgacaatggttatcgccatcgtgacactcttggacgatattttcgattctttcgcgaccccacaagaatgtgaaatactcactaattgcatcgaaagctgggatcccaaaggggctcaagaccttccaggttgcatgaaatttgctctagagaagatattggatagctaccagaccattacaaatatgctccaccgagaggacaagtatcgaatgacgtatctaagacactttacagaagatctagtgagaatcttcaacatggaggtaaaaatgcttcaaaaaggttacatcccagattctgttgaagagcatcttaaggtttcactcagaactggtgggtgtcccatcttatcatgtgcttgctttgtcgggatggatgatatagcaacaaaggatttctttgattggatttctagcgtacccaaaatggtgcgcgcactttctataattctgagactagcagacgatctccactcgtatgagcgggagcagctaatccctcatgtagcttccacaatcgacacctacatgaaaaagcacaatgtctcaattgaagtggcgcaggaaaacatatacaaactaaaagaagagtcatggaaagatttaaatagcgagtggctaaatccatgcaatgatgtgtatccaaagcaactattggagaggatattcaacttggcaaggacgatggagttcatgtacaaccaagaggacaatttcaccaactgccacaaccttaaggataccattcgctgcttgttggtagagccatatacgatccacatttagtttttggcaacaaactaatgaattacattgtccagttaatgtaatgcagagttatctgtcatccttatatgtgtcaatatgttttctctagtgtatgtaatatggtgtcatctcatcatgtgtgtcaatctttttttcgtgtatagtgtcaatatgtacacatctatgtggcatcatttttgttttcaccctagagtttgctcttgttgtatcatttgcccttccttttggactttttatgttgaaaggaccttatcgtggtttcggaaaccgg

SEQ ID NO: 2584 - DNA, 845 bp, Zea mays
  Clone ID: 700217984_FLI
ctcctccttattataggtcagcttagtagttggtggtgactcgatcggcgagatgggcatggtcgcttccatgtgcacggagcccatcaagcggcaccgggtggagagagacctcgacggcaaggtggcggacgcgctccgggagcggacgaggtcccggcagaggaccttcaggtcggtgaacagcatcaccatgcgcctgcccaggttcaaggaagggctcagggacgtcaagaacatcttcgaccagtacgacgaggattcagatggcacgatcgacagcgaagagctgcagagcttcggaagcagagtccgggtgcacatgtccgaggaggagatgagcaacctgcaccggtactgcgacatcgacagcaggaagggcgtccagttccaggagttcgtcgtgctcctctgcctcgcgtacctgctcttcgggccagacgtcacacgacgcgtttcggagttcgagtccggcaagctcaattacgtcttcgacgagctcatcgacgcgtacatcttcttcgacaaggacggggacggcatgctgcggaggagagacgtcacccacaggatgaacgaggcgtcgcaccaggagaggacacccagccacataacagcacagctattcaaggagatggatctgaacaggaacgggaaggtgaacctcaaggagttcctctactccatgatcagatgggctggtctcgggaccgaagacgatggcagcgatgaggcctcaccatgatgtaacttttttttttcttttcttttggtctgcattttaacagttgaataagtaaaatgtatgttgacaattgaaagtaaaaataaaaaatatcatgaag

SEQ ID NO: 2585 - DNA, 857 bp, Zea mays
  Clone ID: 700217987_FLI
tcaaaacacgaggcgtctcccgcaggactggtcactcggcacgcaggcagaggcagcatagcagcagccaactccatccatcctctttcccctcctcgcttcgcttcctcggcggattcctcctccctcgaccgtccccgtccccgtccccttccggcgcgcgagctcgcccgagatggcaaacgcgagatcgggtgtcgctgtgaatgacgagtgcatgctcaagttcggcgagctgcagtcgaagaggctgcaccgcttcctaactttcaagatggacgacaagttcaaggagatcgttgtggaccaggtcggggatcgcgctaccagctacgaggacttcacaaacagcctccccgagaatgactgccgatacgcgatctatgatttcgactttgtcactgcagaagatgtccagaagagcaggatcttctatatcctatggtccccatcctccgccaaggtgaagagcaagatgctttatgcaagctcaaaccaaaaattcaagagtgggctcaatggcattcaggtggaactgcaggctactgatgcaagtgaaatcagccttgatgagatcaaggatcgggctcgctaggcatcatcatgatcatgcatcatggacttggcctactactgtggatttgtatgccattatagacttggtgctgtgaaagactgcttgatgatttgcgggtttgttgctgtgtaaaaaaaggtcccatggctcccagaagaccatgaaggttcggatctatcatgtaattccttgttatctgccaattatgtatggactatggacatgtgttgcgctgttcaacttactactacaaataagtaatcgataatgttcccttccc

SEQ ID NO: 2586 - DNA, 748 bp, Zea mays
  Clone ID: 700218074_FLI
cgagcagctcatccagcagctcgccgagaacgaccccaaccgctacggcaccccgcccgccgccaaggccgccgtcgcctcgctccctgacgtcgctgtctcggccgacatgatgcaggccgacggcggcgctcagtgtgccgtctgcatggacgacttccacctcggcgccgccgccaagcagctcccctgcaagcacgtcttccacaaggactgcatcgtcccatggctcgacctccacagctcctgcccggtctgccgcttcgagctgcccaccgacgaccctgactacaatcacacccatcagcagcacggtgattcgtctgcccctgctcccccttcccccgctcccgcggtctcctcccccagggtggccgagaggaggtttaggatttcgctgccctggcttctcagggccgcttttggcgctgctcaggcagagagcagcaatcccaccgatgatgacgtgcctccgtctggcagcgatgcagctggtggccctcagtctcagactggatatgatgatctcgactgaggcctcaatagccgttcttggaaacaaataggtatgaacaacaaattgcagttattactactagggttcatcgcttgctgttatctgtttggcgtcacctacctatagttcaggaatcaggtagcaccatgcatttactatcgcatttgattacggttactgtattgactgccaaagaaaaagaaaaaggctctattgtgccatcattgttct

SEQ ID NO: 2587 - DNA, 1660 bp, Zea mays
  Clone ID: 700218331_FLI
cccccttcgctgcccctgcccggtcggttccgatggggtacgtgctgtcggcggtggcgagggtgctggagcagcccacggcgtggggggcggcccgggagatggcgctcctcgcggggccgctctgggcggcggtcctcctcggcctcctgctcggctgggcctggcgcccgcgctgggcagctggcctcgtcgccgcccccgcccccgccgccgccgcgcaaccgcccttcgccacgctcgacttctggaaggcccagctccccgcccgtctccgcgccccgctcggctccgccgccgccgtgcggcacggggaggaggaggaggacgaggtctccgtgcgaggtggcaggtcgtcggaggcggcgagcgaggagctggcggtggggaagcgtgacctggccaacctctggaggctggtggagggcagggacggcggcccggcctggatcaagatgatggacaggtcgcttcccaccatgacctaccaggcgtggcgtagggacgcgcagaccggacctccacagtatcagagtagcagcatctttgaggacgccactccggaggaagtgagggacttcttcggggacgacgagttccgtgtgtccaacaagtgggacgacatgcttgtttaccataagacgctggaggagtgccagaccaccgggacgatgaaagtgcattgggtccggaagttccccttcttctgcagtgacagagagtacataattgctcgccggatatggaaactggggggcgcctattattgtgtcacaaagggtataccatgctcgtccattccacggcgcaacaaacctcgaagagttgatctgtattattcaagctggtgcatccgtgcagtggaatccaggagagggaacggaggagggtcgacagcgtgcgaggtgctcttgttccaccacgaggacatgggcatcccgtacgagatcgcaaagctcggtatccggcaagggatgtggggatgcgtgaagagaatcgagcctgggctccgggcctatcagcaagccagggctgcaggggagccggtgtcacggagtgccctgatggcccagatcaacaccaaagtcggcgacagctttgtccggtcgctggagtccgacagcgacgggtctgaaaccgtggaagcggaagagaagcctgcgaggaaccgtgtggcgaggttccttgtgcttggaggggcagttgctctggcctgtactcttgaccaagggctcctgacgaaggctctcatcttcggcgtcgcgcggaaattcgtcgggcagaggaaggcactgtagcatctctggcatttatttctcagcgtcgtccgcttggcccgtggtccgcactaaccggacctgtcctttagctgtggtagagtggaggatagaggtggttcagtgtttgcctaattggggcaaatgccattgaccattgtggctgaaagagagcagagctgatgaaaaacattttggtgtacagatatgctgccggctgttggatagcgaggaatggggaatagataaacaatgtacttctcgtttggagaacggaactcctacgatatatataaatgtgtttcatctaatcttgtatctcagacaagaacagatcagataactgtgcagacgagaagaacaagcatccttcggtgtagctt

SEQ ID NO: 2588 - DNA, 921 bp, Zea mays
  Clone ID: 700218366_FLI
gctctgtgggagtaggcctttctgggcgcgcacggagtcgggaatcttccgagctgtcttgaaggcggaaccgagttttgatgaggccccatggcccactctcacggctgaagctaaagattttgtaaaaaggcttcttaacaaggattaccgcaagagaatgacggctgcacaagctctcagtcatccatggatccgtaattctcaacaagtgaaggttcctttggatatgataatctataagctaatgagagcgtacatcagctcgtcttcgctgcggaagtctgctttgagggccctagccaagacgctgacgacggaccaactcttttatgtgagggagcagtttgaattgctgggcccgaacaagaatggttacatctcattgcaaaatctgaaatcggctctagcgaagaactccacggatgcaatgaaggactccagggttgtcgattttgttaacaccgtgtgcgctcttcagtacaggaaactggatttcgaagagttcgccgcttccgccatcagcgtctaccagatggaagccctggagacctgggagcagcacgcgaggcgcgcgtacgagctgttcgacaaggaaggaaaccggcccattgtgatcgaggaacttgcgtcggagctcggacttggcccgtcagtgcctctccacgttgtcctccaagactgggtcagacacgccgacgggaagctgagcttcctggggttcatcaagctcttgcacggggtctcgtcgcgctcgatcccaaaggcctagcattgtacaccatccatccatcgtcgttgttgttgtagttgtactgaagtaaagctgttgtgtagacgagtgtacagatgaggatagggaaaagaaatgaacatgatggaagactggaagggccgtaagatttgcggctgctgtttgtc

SEQ ID NO: 2589 - DNA, 1037 bp, Zea mays
  Clone ID: 700218386_FLI
cccactgaaccaatcgtctgcacatcctcttgctgttgccgctcgctcgccgtgccgcaatggctacggccgtcgcctcccatacgttgctctcctccgccttcgctccgcgccactaccaccgccgcctgacccggaccgcgtccgtggggccgtgccgggccgccccggtgggactggccgtgcggtgcgagaagagcgacaagcagaagaggcagccgctcgccgcgctcgtgccccgcgagcagcgcttcatgttcgagggagacgagctctgcggccccgacatatggaatacaacctggtatcctaaggctgcagatcatgtaactaccgagaagacatggtatgttgttgatgcaacagacaagatcctaggcaggctagcatccaccattgcagtacatatcaggggaaagaatgaacccacttacactcccagtgtagacatgggagcttttgttattgtggtcaatgcagataaggttgctgtttctggtaaaaagcggtcacaaaagctttataggaggcactccggaaggcctggagggatgaaagaagaaacttttgaccaacttcagaaaagaattccagagagaatcattgaacatgcggttcgtggcatgctccccaagggaaggctgggaagaagattatttacccacctcaaggtatacaaagggacagaacatccgcacgaggctcaaaaacctgtcccactcccgatcagggataaaagaatacaaaaaactggatagagaattcatcgactgaaaaggatgcagtggcgaattcctccccagaaggttttgccctttgtttggaatgctatcctcataaccatgcttctgatcgggggaggggggagtatcaatcctctttgtaattttgatgtttaccaatgcatgaaattcagtcaaatttctgtcaatgagtagtcatgtaatatggtacggtttaaatcaacctaaaatctttattttccagttgaagtttgtaattttgacctcgtatggtatgaagtggcagattgtttc

SEQ ID NO: 2590 - DNA, 783 bp, Zea mays
  Clone ID: 700218523_FLI
gacacttcgagggctttatcctgttgatgcagtgagtactgtggggagaatatgtgcagaagctgagactgtgtataatcagccgcttcaattcaagaaagtaatgtggcatgtaggtgacccaatgcccccacgaggaatctgtggcatcagcagcggttggttctgcaatcaaagtaaaagctgctgccattgttgtgttcacattctcagggagagctgcgaggttagttgccaagtataggccaacaatgccaattttagcagttatcttcccacgtgaaggatccgatccatcaaagtggcgttcttatggcacaacacaggcaagacaatgtttcgcagtgagaggcgtgtaccctttgatggggagtactgatgaggccgaaactggtgggctaacaaaggaagagtatgggataaaacttgcgatgagctatggtcggtcggttggcatagtgaagcctttcgacaggttgataatctttgaaaagattggtgattcttctgttgtcaagatcattgagtgtgaaggttaggcattagatgattgatacctacaacccatgctgtagtttcatgtatcgcatgggagattacctccagttccatctcacttatttaaccaagttccaagtagagtacagcaagagcacaagatatcttgttagggaattttgccctcttttcagattgtcttttgatttgacgcaataaattatgatgtcacagatttatactggaattatgatttgattatgcaaatataggattgttggcaac

SEQ ID NO: 2591 - DNA, 419 bp, Zea mays
  Clone ID: 700218535_FLI
cgcaggcagctgggcaagctgctggacatctacgagcagcgccttggcgaggaggccttcctggccggaggcaagttcacgctcgccgacctgtcccacctgcccaacgccgaccgcctcgccggcgacccgcggtccgcacgcctcatggagtcgcgcaggaacgtcagcaagtggtgggacaccgtatcccgccgcgactcttgggtcagggtcaaggagttgcagcgcccgccgtccgcggaggcgcccttctgatgtcgatcgatcgcaaattaaggcggtggcctttgctcaagcctacgtgttcggtttctgcataattttttaataaataaacgccactggcccctctacgtcattggcgattgttcattgtgtaataaatcgttcaagagcatatgatgcttcttgccgtg

SEQ ID NO: 2592 - DNA, 1401 bp, Zea mays
  Clone ID: 700218560_FLI
caacagcttgtgcaagcaagaaaagaggttgcggagctgcagctgcagaagagccagttagaagagttacttcagaaggcccaaggagatcttggatcagttcaggatcagcaccgggtgaaggtccagcagttaataaccctagtggatttcaagtcaaaggagatagacaggctactgatggagctcaaaagcaagagtgatgagttccataaccaaaaaagatgtgatgaggcaaagctgaatgctctgtcagaagaaatcgacctactcaattccaagatcgacaagctatccagtgagagaaatgagctattcgaaaagaatgagcagaaagaaaaggaattagctggaattagcgaaaaggacatgcaattgcaagacaaaactgctgagattacttcactaaataaagagcttgtattcctcaaggaccaagtgaagatgcatttggacgaactgcacagtttaaaacgtttgaagaacgagagggaggaaacaattggaaaactgcaaatagatattgggtcactgaaactccagtgtgacaacttgaaaacttcgctgtccaagaaagagtctgagaaagacagccttgcctctcaggttctgaagctgagaagatccgttgaaacccgggaaagggcgaaggcaaatggtcaaatttcagatgtgaaggacaatcagcatgctaataacaagcgcaccaagcacaataccggctccactgggagcattgctgcgctgccaggcaccaacagacaaggcgaagacggtgactgcaatggtcctgacatgaggaactccactgaccagtcagcaaaggagctggcctcactgaaggagaagaacagggcgatcgaggaggagctgaaggagctgcacgaacggtactcggagatcagcctgaggttcgcggaggtggaaggcgagcggcagcagctcgtgatgaccgttcggtcgctgaagaactccttgcggtgactgactcgtgctgctccactcacactgtagctacaaagattttagacgataccggtgggcgttgtacaggtgggcgagcgactggatgggctttttctctccgaagagaggctccagaccagaggctcggggaggccaggccaggcgagacgggcaccccgggtatgtaccaagggggtgcctgcggtgtggtttgtccgtatccccaagagttacagtacacagcatgtagatctcgtcacaataacattctttcgttttcttcgttccgcattggcgtgtgtgcagtaatatgagttgtaatagttctttcttaccctctctggagtgtgttgtgctgtataatttccatggtgtcattgtgttgtggagaaaggaaaatgagaagaaaagagtggcctgtcagctttatctcag

SEQ ID NO: 2593 - DNA, 590 bp, Zea mays
  Clone ID: 700218603_FLI
catgatagagctgtacttttcaggggctttactcttgcaaaagcctggaacttactgaagaaagtacaccgtcgagcgcagccaaacgacggcttcgcaaaggctctcctggcccttgacaagaggctgcatggcaaggtatctatggactggcaacacaagcggccagaaatgaaggtgtgtccaatctgcagcaagaatgttggtctaagtacgagttcactcaagctgcacctgcagaaggcacacaagcgtctatctgcaggcagtgtcgacagcgccatgaccatggagatccaaaaatcgatcgagtcactccagatcagccgaggaggaagcctgagcccgtcccagaagctgaccaaggtgttcagcaatgagctgagcttctgatctgttttcctgtactatagatgaggcaatgtacttggctcacattgtaataacttgtactatcagactgaacttgtgactgtaggtttagttcacacgcctatatgattagcacacgaatgttcaggtgtgaagggtgcaacactaaagaatgttcaggtcttgtatttgttgcctgcagtatgcagttttcttct

SEQ ID NO: 2594 - DNA, 866 bp, Zea mays
  Clone ID: 700218617_FLI
cagagagacctgactgcaccttacgttgacgatgggcttatcgaggttgtcggcttccgtgatgcctggcatgggctcatcttgctggctcctaatggccatggaactcgtctagcgcaggtggaaggaactagtctgctctgtcagcactcagcggctcggcacacagtgcgcctaactaggaaaggaaactgaagatttggtgatgagtgtattttggtttcaggcccaccgaatccgtttcgagttccacaagggagcagccgagcacacgttcatgaggatcgacggggagccatggaagcagcctctccccaaggaggacgacaccgtggtggtggagatctccaacctccgtcaggtggccatgctggccaacgacccgtgcaggtccaagagcgtgaacgagccgtcctccccgtcgtgccacggccatgaggacgacgacagcaacagcctggaggacgaggacgaggacgagtgggaggacgggaggaagaagttcggtgcggcggccaccttcaagatccccgacgaggtggacatcgctcatctcagttagaacctagaaaccccgccggctgcttctgcgtcggttggtggtgctgactgctgagtctgtgcatttcagagtgtttgctgcttgctacagcctacagtgctactgctccctttttttttgttgttttttttttttggttgcctccacgagctcagatttcagaagctaaccactgctgttggtgaaactgctcgttatgatcccccattgttctgtaaattttcaagttttagcagccatgtgtatttcactggctgataatttttttgtgtgctacgtaatttgaaacgtggaaacgacttgt

SEQ ID NO: 2595 - DNA, 1666 bp, Zea mays
  Clone ID: 700218649_FLI
ccaaacgcccccgtgccccgtctgcgtcgcgtagggttttggcaacttgcacgtacgagagcgtccatggacgacggcagcagcaacaaggtggttgaggacgtcgcggaggaggaccccggccgccgcggcggtccatggaggacggatgaggccgacgccaacgagaaggcgcctcgcccgagcaggcgggtcgcttccctcgacgtcttccgcggcctcaccgtcgcgctgatgatactggtggacggcgccggcggcgagtggccggtcatcgggcacgcgccgtggaacggctgcaacctcgcggacttcgtgatgcccttcttcctcttcatcgtcggcatggccgttcccctggccctcaagaggatcccggaccgtggccgagccgtgaggagagtggtcgtaaggacgctgaagctgctcttctggggcatcctgttgcaaggcggttactcccacgctccggacgaactggcgtatggagtcgacatgaggcacgtgaggtggggcggaatcctccagaggatcgctcttgcgtacctggtggttgcggttctagagatggtgacgaaagacggcgccaaggttcatcaggaccagccgccaggttcttcaggccgcttctcccgtgtattcagaatgtatctctcccagtggatcgtcgcgtgctgcattctggtggtctacctgtcccttgcctacggggtctacgttcctgactgggagttcagagtgcgaaacgctgacagcccagactacggcaaagttctaacggtgaggtgtggtacgaggggggcgttggaccctccctgcaacgccgtaggctacatcgaccgcagagtcctgggcatcaaccacatgtaccagaagccggcatggagaaggcacagggcctgcactgatgactccccacacgaggggcctttcagagaggatgccccagcgtggtgtgtcgcgccattcgagcctgaagggatactgagctcactgtctgctgtgctgagtacggtcgtcggtgttcactacgggcatgtgcttgtccacatgaagagccatacggacaggcttaggcagtgggttaccatgggcgtagctcttctcgttctcggaatcattctgcacttctcgcatgcgatcccgctcaacaagcagctctacacgttcagctacatctgcgtcactgccggcgccgctggggtcgtcttctcagcgctctacttcttggtcgacgtcgtgagcctgcgctacgccttcgcgccgctgcggtgggtcggcatgaacgcgatgctggtgtacgtgatggccgcggaaggcgtcttcgagggcttcctcaacgggtggtactacgagagcaccaacaacactctggtttactgggtgaggaagcacgtgttcgtcaaggtgtggcactccaccagggtgggcatcctcctctacgtcctcttcgcgcagatcctcttctgggcgctcgtctccggcgtcctccaccgcgctcgcctctactggaagctctagcgagcgaacggtggcatagcatgcttttgtcttttgaactgcacatgatacacacgacacctcaaactcgaaccccaagttagtttgaagaactcaaatcacgggcaaaatggaattcggcgagcggatcggattcattattatc

SEQ ID NO: 2596 - DNA, 1253 bp, Zea mays
  Clone ID: 700218665_FLI
cggacggcgtgggtccacaaggtccgcatacccctttcccccgcgccctttatccctgcagcaacgacttggggtgacgagcaccacaagtattcgtgctgctttggtctttgcgtcctggagcattaatttcccttctgatttgggtagaggatgatgcttctcgccaagctcggggcgccgagcgttccagggaagcgtcgagttgaagaagatgctataagttgcagaatagaaacataccatggttgtgtcatggacagaaggaaactgctgttggtccctgcgattagtatggccattgcctcctttcagtacacttttgtcaagggaatagcaaaagctgaatttgctgatatgcctgcacttcgcggtaaagattatggaaagacaaaaatgcggtatccagattacactgaaacggaatcaggcctccagtacaaggacttgcgggttggtgatggcccttctccaaaaaaaggggagactgttgttgttgattgggatggctatacaattgggtactatggtcgtatctttgaagctcgaaacaagaccaaaggaggttcatttgagggtggtgacaaagacttcttcaagttcaaagttggatcaggacaggtcataccagcttttgaggaggctatatcaggcatggccccaggaggtgttaggaggatcattgtaccaccggatcttggatacccagataatgactacaacaagttgggtccaaaaccaacgacattctcgggacaaagagctcttgattttgttctacgtaatcaaggcttaatagataaaactctcctgtttgacatcgagcttctcaagataattccaaatcagtagtgtgagattctaatgattacctttgaagaaaaaagctcatgttattcaggtccgtcgaagatcagcagtaaatgtatgcaattgaatatgaaaatatttttttaggcatacgcacatacaacatgatgtgaacacatctacctacatctccattaactacgcctcttttaaaagatgccattgtgtgcatctgcggtttctacagaagctctattagatacgtctgtgatcatacctcgactgctgagcaaatagagaatgaccaaatggcgaattgttgaaatgaaggcattctagttggaaatgttgtaaataccccaaatattgcctgtctgtcgtaatagttcatttgggacgtctggggggtgcatggtttcttttggtgattggtcgccccagac

SEQ ID NO: 2597 - DNA, 1600 bp, Zea mays
  Clone ID: 700218683_FLI
aaaaccatcaccgccttcccggcgctcgccgctgccacccgtcgccgcgcgcctttccgccacccgccgccgctgttggcgcccaaacatcgcatctgctgttgctttatcccttttattccacagccgctctaagtggtgggtgtccctctatattcgccgcttataggaatcgagggttcgatcggctgtggtgcgtggtgactgtgaacgaggaggagcgcaaagatggctgatttccggacctccacccaacgggagaggtggatcttccagtcgcacgatttgatggagaggtgggcggcggcaaaccagcgggccgctcagacccttgcgcagtatgggacgacccggcttaatgtggacctgcttgatggctcggtatcctacccagagtccatgccggatcatgttgagggtagctcggttgtaaagcctctttcttacgaagaggagcaattgacaagggtattttacgagcagaagattcaggaagtatgcgctgcattcaagttccctcacaaaatccaggctacagcaataatatatttcaagagattctatctacaatggtctgtaatggagcatcaaccaaagcatattatgttaacatgtgtatatgcttcttgcaaagtggaagaaaaccatgtttctgctgaggaacttggtaaaggaattcagcaggaccaccagatcattctaaataatgagatgattcttcttaaaactttagattttgatctcattgtttatgctccatatcgatcgattgaaggatttattgatgacctagaggatttctgcagggcaggtaatggtccattccagcgtttgaaggagttgcgccaggctgctatatcccatgttgacaaaatgatgttgactgatgcacctcttctctatacccctgggcagttggcactggcggctcttcacaagtctaatgatcttctcagggtcgtcgattttgaaagatacttggaaattatcttctcaaggcaacattctgattgtccaatcgaacagtttgttcagtcgatcaacgaaatcaattacttagtcgaccagcttaatatacctactgtcaaagacatgagacacgtggaccgcaagctgaaacattgctgggatccaagctcacatgacgagcataacaagaagaaagaaaagaagtcaaagcacaaatcgaaaagaacatctaccgatgcccaactataggaagcatatggtccagcagtggctttgtgtaagagtacaacgggcctccaaatgatcgaaactgaactcaggcatctaagcacagcagctctaagacagctttctacaccagctgaggcatacctgaggtcaagcaattttgtgacgatgtgggctatggaacttcattgctccaatgggagagttgcagcaaagatacaaactaagagatgtaacattggatgcctaactccaaagtacggagaacttcaaattttatatggccgactttgtgtcagccacaattacttgagttccttttgttacggatgtagcattgtttattaagtttaaacgccgaatccaagatgatccacctgctgttgtgaatcgttttttaact

SEQ ID NO: 2598 - DNA, 1016 bp, Zea mays
  Clone ID: 700218691_FLI
ctctcgtcgccgtcctctcccgttcgcaacgccacgctccccaccgccgaaatggccccgaagcgaggtggcagggcaccggtgccggccaagaagaagacggataaagtgacgaaccctctgttcgagaaaaggccgaagcagttcggcatcggcggcgcgttgcctcccaagaaggacctgcaccgattcgtcaagtggcccaaggtcgtgcgcatccagcgccagcgtcgcatcctcaagcagcgcctcaaggtgcctccggcgctcaaccagttcacccgcaccctcgacaagaacctcgctaccaacctgttcaagatgcttcttaagtaccggcccgaagacaaggctgccaagaaggagaggcttctgaagagggcccaggctgagaatgaaggaaaaactgttgaatccaagaaaccaattgttgtgaagtatggccttaaccatgtgacttacctcattgagcagaacaaggctcagctcgttgtcatcgctcatgatgtggatccgattgaactggttgtttggcttccagccctgtgcaggaagatggaggtcccatactgcattgttaaaggaaaggctcgccttggatcgatcgttcacaagaagactgcatcagtcttgtgtctgaccactgtcaagaacgaggacaagcttgagttcagcaagatcttggaggctattaaggcgaacttcaatgacaagtttgatgaagtcaggaagaagtggggaggtggcatcatgggctccaagtcgcaggccaagaccaaggccagggaaaagttgctggccaaggaggccgcccagcggatgacgtagattatccactgttgagcttgcccctgtagtttgacgtggaagaaccgatgagcattgtgcactcgtattgtgtttttttgaatctactttcatatgtttctgtccatcagaccgtgtttagaaactttgaaagacagttctacagtgtttatgcaatgtcttatatcgaagtatatcatttgcgcctc

SEQ ID NO: 2599 - DNA, 663 bp, Zea mays
  Clone ID: 700218704_FLI
cctctatctctctctctctctctctccctctctacctgccccgttcctcaccagtctcttccgccggcgtcgacgagagctgcgctaggtgatctcgactgcttcctcgccccccatggcgacggcgctcaaatcgttcctgaacagccccgtcggccccaagaccacccacttctggggccctgtcgccaactggggcttcgtcatcgcgggtttggttgacatgaacaagcctcctgaaatgatatctggcaatatgacagcagccatgtgtgtgtattctggactctttatgaggtttgcatggatggtacagccccgaaattatttgcttctggcatgccatgcttccaatgaaagcgtccagctctatcagttatctcgctgggctaggtctcaggggtacctggagaagaaagaaccagaggccaaacagtaaagagggtatccaacactgcagtcatttgttcaataaagaaaatatgctgtggaaaacattcattctgttgccaatgcagttttttttgtatgtttgcaaaatatgctgaggaaatttcatgatacctagcgcagttacaagtgtctgcttacttttatgtgcatttgtcaagacacatttgttttttacattgctgccttcctactatttggcactatttattt

SEQ ID NO: 2600 - DNA, 869 bp, Zea mays
  Clone ID: 700218879_FLI
aggataagccgcagccttcactgtccatcgtctccctctgtactccttcctcagcctcatcctatccaagaacgcagaaccgagacccacgaactcgcagcaggccagcagccatggccgcccccgcaacgagctccctgctgagcacgctgctgcagctaccgctcgctccgttctcggggaagagctcgccgccgtccgtggtgcacgtggcgcgccgggcgccgacggcggtggtggcggccaaggggttcaatgtgcagatcctggtggacgagaacgagggggaggagtccatctttcgcaggttccggcgggaggtgatgcgcgccggcgtgctgcaggagatcaagcgccgccggaggtacgagagcaagacagacgagaagaagcgcaaggcgcgcgaggccggacgccgcaaccgtcgcaggcgtatgatggacgagccgaggttcccagaagaagacgccgacgcgacctccaaggctcgggacgaggacaacgacaactgggaggtcgacggcatcctgtgaaacaaaaggaacgcatgcagtccacagttcaatttcacagcgtccagatgatgcacagcacagacccgtcaaattcgagttctttttgaggcccccccgtaagacgcaatccaaaccgtatatttgcgttttggccgcgttcgtttccacttcagtgtccaatggttacagctgcaattgcacaactaacgttcgcaaatgtagcgtcctccgatcccttctcgttccctgagctcttcttgtgtccatggtgtttgaaaccctactcttgtgtctgttccaacatctatcctttgtgtagcttgcgctcatgaaagttcagaaactgatgaagat

SEQ ID NO: 2601 - DNA, 515 bp, Zea mays
  Clone ID: 700218910_FLI
gcgcctcctcctttctcgtactgcaattcgggactagccgccgccagtctcgatggggaagaggagcggcagcagtaggaaggacaagaacaaggtcattctcccaccggagctgccgccggaaatacacgacgatgaggtggatgtcagcgaggaagacatcgagttctatgccaccgacagcagtaacgttacacccttccgccacttcgacaagaagtccatcgacaggtatgtcgggagggttgccgggcgcgacgagggcgaggtcgagcgcctctacgaagagcgccagaagcggaaggccacagaatcgtcggggagaccccgcgaggatgatgattatttggaggtcgaccccgtcgacgcactccccaccaagacgctgcaaggggagctcgtctacaatagagctaagaaagcaaggtctgaagacaattccggcagtgttaagactaaagctcaagagaatggtgcaaatgccaagacaaatactaaaaaagatgaaccatatg

SEQ ID NO: 2602 - DNA, 1231 bp, Zea mays
  Clone ID: 700218977_FLI
caatcgtgcgtgttcctcactcagctccgaccttcacggggcccacggggcccgacgcccggcggctttactcagggcaccatggccttcacttcgtcactggcgccgttcttcccaccttctggaaccttccgagcccatcccgctaggaggctgcgggccgatgcacccgggagattcgtggcgtcctgcttgccccctcccgacgtcgtggtgacgcgcgagcagggaaagaacgccaggctcatctccgcgctggaaaagcataatgtacaccctctggaacttcctcttattaagcatgttgaaggccctgatacagataggctttcagatgtcctacgtaatgacaagttcgactggattattgtaacctctcctgaggcagctgcaatgttccttcagggatggaagactgctggaagtcctaaggtgcgagtagctgttgttggagaaggaactgcaagggtttttcatgaagtatcagaatctgatgatcaatctctagagcttgcattttcaccttccaaagctttgggtaaagtcttggcttcagagcttccaagaagcaacgagaactcatgtaaagtattgtaccctgcatctgcaaaggctggccatgaaattgaggatgtgctatcagaacgaggatttgacgtgacccgactgaatacatatacaactgttcctgtagaagatgtcgacccactgacattaaaccttgctatatcagctccagttgttgcggtagcttctccttctgcactgagggcatggctaaatcttatctcaaaatctgataactggaacaactccgtcgcctgcatcggtgagaccactgcgtctgcagcgaagaaactgggcctgaagagcatatattacccaacgacccctggacttgaggggtgggtcgagagcattctcgaggcgctcagagtccacaggacagcatcaaaagaggccccaaaacgttgaaaacgggcggatggcggagcttcttcttggcgttggtagccgtccgcagtgtcgaagaaattctttgcttctttgacgacaattgccccccgttgagggaggtggtggtgtcaagccatggctttccactggcccagtttgtaatggattcttgggccgaaaggcccatctctatatgtcttgactcgcaaggcgattgcatcagtccatccatccatttcatggagggttttaggagtgccgtctctgtttcgct

SEQ ID NO: 2603 - DNA, 167 bp, Zea mays
  Clone ID: 700219013_FLI
tgcaggagtgcatgcacatatcatcaggagccgtcattctgtcggacgagctgcctgcagtgtataggcagctaggctgattgctcttgatggtatgacgatgcgtcgtgtatgtaacactgctactatatatataccatttttatatgcaattgtttgctggtcac

SEQ ID NO: 2604 - DNA, 1002 bp, Zea mays
  Clone ID: 700219042_FLI
ccagcgtccggccgccaccaggtgcagagtctttcgtcatctcttctccggcgaagaacccccagtcgcccaccagatcacttgttaaactttgttgaggggtgatggcggtttctttcgcaaacctcaactccgaggcagggcttaaaaagcttgatgagtaccttctcactcgcagctacatcactggctaccaagcttccaaggatgacttggctgtctacacttcgttttcggctgctccctcgtccaagtatatcaacgtagcaaggtggtttaaccacattgatgcgctcgtgaggctgagcggaattactgcagagggccaaggtgtgaaggttgaatcctcagcagttccttcagccccaactccagatgttgctgaagcacaggccccagttgctgaggaggacgacgacgatgatgttgacctttttggtgaggagaccgaagatgagaagaaggctgctgaagagcgtgctgcagctgccaaggcttctggcaagaagaaagaatctgggaagtcatcagttttacttgatgtgaagccatgggacgatgagactgacatggccaagctcgaggaagctgttaggagtgtccagatggaagggctgctctggggcgcatccaagcttgtcccagttggatatggtatcaagaagctgcaaatcatgatgaccatcgtcgacgaccttgtctctgtcgacactctcattgaggactatctgtgcgctgagccagtgaacgagtacgtgcagagctgcgacatagttgccttcaacaagatctaggcgtgacttccgatcagtccttctcctggggtgctggcgatggtggtggctgggcaatgcaccagcctaatttatccatagctatatgtctgctttgtgtggccagtgatattgccgtgagtatttttggatcctattcgagtcgaatgtaccagtaccagagttaatttgctttaattcgaaacaccgttccagttggaattctgtt

SEQ ID NO: 2605 - DNA, 1921 bp, Zea mays
  Clone ID: 700219076_FLI
gcgagagacgcggcctcttgctcccctcaacccccttaaagaagcgcatagaagcttcggaaggtgcccctccgcggctcgaaggaggggaggggacgccgcggacaatgacggcgatggaagccgccgtcgacgctatgctcgccgccgcgagccgtgccttcacgagcacctttgccatcgccatccagatccaggggtgcatgatctgtttagtccttgctctcgggtgggcggctgcttcaattgtcagaaaaggggttataaagaacatgaggcgcaacattgtagatggaaatagttttgcatttctttgtgacaacatagatgagcttgagcactctgttcaggagaatttacctagagtctctgtagtcatgcctttgaagggctttggcgaacataatttgcaaaattggcgaactcagattacatcactttatggtgggccactggaattcttgtttatcgtcgagagcaaagatgatcctgcttatcatgctgtttcccgtttgatcacagagtacaaggacaatctggaggcaaaggtggtcgttgctgggttgtcaacaacctgtagccagaaaattcacaatcaattgatcggtgttgaaaagatgcacaaggataccaagtatgtattgtttcttgatgatgatgtgaggctgcatcctgggactatcggagctctcacaaaagaaatggagaagaatcctgagatatttatacaaactggatatccccttgacttaccttctggcagtttgggcagctattgcatatatgaataccacatgccttgttcgatgggatttgcaactggtgggaagactttcttcttgtggggtggctgtatgatggctgatgattttaggcaagaccggtacggcattgtcagtggattaagagatggcggttactcagatgatatgacactcgctgcaatagcaggacagcacaaaaggctcatattttcaccacctgttgctgtgtttccacacccccttgccagtgatcttagcttctccagatactggaattacctcaggaaacaaacttttgttctcgagtcatatgtatcgaatgtaaactggatgatgaaccgtgcattatttacaagccattgctatctgtcatgggggtttgtctggccatacattatggctttggtccatgttttagctgctcttcgggcaccgtacagcaaagttgtaaaggaagcatccgattcatcttggggtttgttcctggtgggcctcttgttcacatgcactctgatcgagctcgtttcaatgtggaatttgactaaggtggaaattcaactgtgcaatatgctgtctcctgaaggaccgaaagtatctcttgattcatacaactgggggctcgtgttcatcgctgtgttggtagacaacttcctctatccagtatccgcaatccggtcgcatttctcccaatcaatcaactggtctggcatccggtactacttgagggacgggaaaataagcaagatcgagagagagaacagttcgaagtacactgatcttggagggaagcatctatacggcaagaggacataccctcctaacaaatcgttgctcggttacctgtcaagaactctagtgcaatggcatcagccaaagaaatatgacgtataggaaggtcgaccgggggagattcagccctcgattgtgtggggggcttcttgttgtacacctcttttggtttcaactttctttcatgcctctctctctctctctctcctctctgattgtttagtggttattaggttcattcatattaaattttgtggtgttcaatcggcgccaccactttgaaagggttgcattgcacctcatagttctttgtaacactagagatatgtaacgatttggctgaagaagtgaaatgttccatgttggtg

SEQ ID NO: 2606 - DNA, 1339 bp, Zea mays
  Clone ID: 700219214_FLI
ggttcgccgccgttccgctcaacctctgcgcggggccctccgacccggccgacttcgtcgtgtccggatcctggagcgacaaggccttcaaggaggccaagaagttctccgccgcctccgtcgcctggtcgggtaaagacggcaagtacacggccctcccaccgttcgacgccatcgcccagaaccccgaggccaggttcctccacatctgctccaatgagaccatccacggcgtggagttcaaggactacccggagccccgcaacaggtcgggcatcctcgtcgccgacatgtcctccaacttctgctccaagcccgtcgacgtctcccgcttcggcgtcatctacgccggcgcacagaagaacgtcgggccctccggcgtcaccatcgccatcgtgcgcaaggacctcattggcgccgctcagcccatcacgcccgtcatgctcgacttcaagacgcacgccgacaacgcctccctctataacaccccgccctgcttcgccatctacgtctgcggcctcgtcttcgaggacctgctcgcgcagggcggccttgccgaggtcgagaagaagaacgcgcgcaaggccggcgccctctacgacaccatcgacgccagcggagggtactacgtctgccccgtcgacaagtccgtgcgctcgcacatgaacgtgcccttcaccctggccaagggcccggacttcgagaagcagttcatcgccgaggcggccaaggagggcatggtgcagctcaaggggcacaggtctgtcggcggcgtccgcgcctccatctacaatgccatgccgctcgccggcgtcgagaagctcgtcgccttcatgaaggacttccaagccaggaacccttgattgcctcgtgcttatgatcatttggtattgctactcagtctttcttcctagcataagtgagctcgtgcaagagctgtctcgcgttgcgcactgggatctatctgtagtattagtaccataacgtaacggctactgtattttgcaatgtttttttttctctctcgcttttgttaggtgttcatggaatttcatttctatgtatcaccattgcagttgtaatgtgtttttgctggaaataaggaataaggtagatggccggttgcctcgcctcgatggagatcagctatccgggcggcgctgctatatcattcaggagtgacttgtcgaagcttatataaaacattaatacgaaggttgcttggtttttgcctcttcaaaataaaaggagcaaattttgttggtttctaattttctatcatcttcagagatagaattcactttgctaagattctcatggaaattctttatgtcgggtg

SEQ ID NO: 2607 - DNA, 2341 bp, Zea mays
  Clone ID: 700219253_FLI
actggaccttcaagcgcaccgcgcgtcattgttctcgttggcctttcttcatcagcaaatgtcggatcacttgccaaggatcttttggcatttgcagaaggagatgatcggaaactgaaattatctaccattgcttctcctacttataagcttcgaaccacagtactgcaagcaccatatggtgatcttaccacatgcatggaactggcgaaggttgctgatttgttagcgttcgtactgccagccaattcattctacagtggtgatttgaatagcccaattgatgagtttggatctcaatgcctgtctgtatttagggccatgggcttacctagtacagctgtttttattcgtgatcttccagcggataataaaagtaggcaggaattgaagaaagcagcaacttctttcctttctgcagagctgcctgaggactgcaagttttacttggcagacacaaaggatgatttgcataagttcatgtggcttttcaaggagcagcatctttcctcgccacattggagaaaccagagatcttatgttatgtctgagcaggtctgcataaatcctgatgaaaatacgggattgtgcacattgctcgtgtctggatatttgcgggcccacaatctttcagtgaatcagcttgtccatgtttcaggtgctggtgattttcagttaggccaaattgatgtcctcaaggatccatgtcctcttagtgagcggaaaagctctgatgtaatggaaacagaagataatggaattcagattgttaacacttttgttccagacccttcaagtcaggaacccttacttgttgaaaatgtgccagatcctcttgccggggagcagacttggccaacggaagaagacatggaggaggtcgacataaacaacaaacagagaaaattggaaaagaggaagcttccccaaggcacttcagagtaccaggctgcttggattgttgaggacacagatgatgaagataacgactctgatgatgacaaccagactgaatctggaatggtcattgatgagcaaggtcactcagaccaaggaagtgatggttcagatatagatgcagtgtctcactttacggagaagtttgatggagaaactattggggatactgagatggcagatgaagaaaatttgacgaaagaccagatagaggcagagattaagaaaatcaaagaagctaatgctgatgatgaagaatttcctgatgaggtggagacaccattagatgtcccagcaaagaagcggtttgcaaaatacagaggactaaagtcatttaggacatcatcctggtatcctaaggaatcgttgccactggactatgcaagaatatttgcatttgataactttacaagaactcaaaagcatgtctttgctaaaattgctgagttagatggaggcatgaagaattgtgctcaagtgggatcatatgtaaggctttatgtgaaaaatgttcccactgatatagcctccaaactctgtcatccatcaagaagaatacctgtggttgtttctggtcttcttcaacatgagtccaaaatgtcagttcttcacttcagcataaagaaacacgactcttacgaagctcctatcaaatctaaggagcctttgattttcaatgttggattccgacaatttactgcaaggccactgttttcatccgacaacatcaactgcaataaacacaagatggagagatttctgcaccatggccgattttcggttgcatctgtatatgctccaatttccttccctccacttcctctaatagttttgaagaacagagatggcgagcaacctgccattgctgctgtaggttcgctaaaaagtgtggatccagaccggatcattctgaagaaaattgttctgaccgggtatccacagagagtctcgaaactgaaatcgatcgtgcggtatatgttccacaatcccgacgacgtaaaatggttcaagcctgttgagttgtggacaaaacatggtcgtcgtggccgcatcaaggagactgttggtactcatggtgccatgaaatgcttattcaatagcagcattcagcagcatgatactgtgtgcatgagcttgtacaagcgcgcgtatccaaaatggcctgaacagctctaccacgtataagattgcttgacgtttggctggatatgtaccagcaggcagaagcagaacgacgggaatgaaacagccttggagcttgcgtgccgtttagcttaaactaaatattttaggattaggaaaatgttttgttggtcgcctgagctaggaggccgaattttgtattggtccttcatatacttttgaacattctccttggacgtcc

SEQ ID NO: 2608 - DNA, 1336 bp, Zea mays
  Clone ID: 700219263_FLI
gccgcacccgaccacaaatcccaccaagcaaaccctaatccgtcggccatgtcgtcctcccccgcggcgctgcgcttctactgccaccagtgcgaccgcaccgtctccctcgcccctcccgcatccccggacgccgacgtcttctgcccccgctgcggcggcggattcgtcgaggagcttcctcccaaccctagccccgcgcctccggccgccgccttctttgccccgccctccttcgacatccgccaccccagcgacctctccgctttcttcggccccgcctcccccgagccgctcgccccaggcctcttcgatccctccaacttccttcacgaccacttcggcggcctcctctccggcggcgccaccatccagatcgtcctcgagggtgggcccccgcccccaggcctcaactttgccgactacttcgtcggctcctccggcctcgagcagctcatccagcagctcgccgagaacgaccccaaccgctacggcaccccgcccgccgccaaggccgccgtcgcctcgctccctgacgtcgctgtctcggccgacatgatgcaggccgacggcggcgctcagtgtgccgtctgcatggacgacttccacctcggcgccgccgccaagcagctcccctgcaagcacgtcttccacaaggactgcatcgtcccatggctcgacctccacagctcctgcccggtctgccgcttcgagctgcccaccgacgaccctgactacaatcacacccatcagcagcacggtgattcgtctgcccctgctcccccttcccccgctcccgcggtctcctcccccagggtggccgagaggaggtttaggatttcgctgccctggcctctcagggccgcttttggcgctgctcaggcagagagcagcaatcccaccgatgatgacgtgcctccgtctggcagcgatgcagctggtggccctcagtctcagactggatatgatgatctcgactgaggcctcaatagccgatcttggaaacaaataggtatgaacaacaaattgcagttattactactagggttcatcgcttgctgttatctgtttggcgtcacctacctatagttcaggaatcaggtagcaccatgcatttactatcgcatttgattacggttactgtattgactgccaaagaaaaagaaaaaggctctattgtgccatcattgttctacaaaagcgtattacaagagtgaatgaccatccttgttctatgtttacctgatattaacatggtatgcacttggcgtggatgataaccaagattcatctagggcaatcaatgggatgtaacttgcatgttgtaactgcgact

SEQ ID NO: 2609 - DNA, 602 bp, Zea mays
  Clone ID: 700219264_FLI
ggaacaatgttgacccatttgatgaacctgagtgtgaagctcgtgacatatttgtcaatgaacttctatgcattggcactggatgtccatattcttgtgttaaaagggcacctcatgtattttcattttcagatgatactggtacagctcgtgcaatatctcaaggtaatggagaagatgatcttgttcagctcgctgttgggcagtgtccaagaaagtgcatatactatgtgacgccttgccaacacactattttggaggatgttcttgctagtgtgttgatggtgccttacgatcttgctgaagcagcagttctggattccctcctttcaaaagcgaagttcgagaataacaggtataagaagccccaaagaggagcaaaatcatcctccgattatgttgattggatgtgatctgatcccgagacacaaagaggatgccagattcagccgaaggcagttcggtagatttatgctggtttgcctattctccttggtcagttgcccgatagtttataaaatggaatacgtttacgtggacagactgctttgtttgtggtatacggttatgatttctataatatttctttctgccagaatttt

SEQ ID NO: 2610 - DNA, 1346 bp, Zea mays
  Clone ID: 700219282_FLI
cctaacactgccccgtcacgccgccgcacaccaccggctgcactctccttcctcctcccaagttgcaagagccggattgccaggtgcttgtttcgtttcgggctgtgtcagtattcaaaaatgggtgatccaagtgagaggaatggacacggcgctcttacccgggtgctattctgtggtccatattggcctgcttctactaactacaccagggagtatttgcaggactatccattcattcaggttgatgaagtaggtcttgagcaggtacctgatgttattcacagctatcatatatgtgtagtaaaaaataagcgtatagattcagatattattgccaaggcaactcagatgaagattataatgcagtatggtgttgggttagaaggtgttgatgtaaatgctgctacagaacacaaaatcaaagttgcacgaatacctggaagtacgacaggaaatgctgtctcttgcgcagaaatggcaatctatcttactctaggcattctgcgtaagcaaaaggagatggatactgctgtgaaccggaaagaccttggtgttccagttggagatacattatttggcaaaacaatccttatccttggatttggggccattggcatcgaggttgccaagaggctaagaccctttggggtaaaaattcttgctaccaaaagaaattggtcatcggacacattgccatcttatgttgatgagctagttgacaagaaaggtgggccggaagatatgtatgagtttgctggtgaagctaacattgttatagcatgcatgaccttaaccagcgagacaattggaattgtggatcataagtttgtttcatcaatgaaaaaggggtcatatctggtcaacattgctcggggacgcctgctggactacaaggctgtgtttgatcacctggaatcgggccatctagctggtctggggattgatgttgcttggatggagccatttgatcctgaggaccctgttctgaaattcccaaacgtcattctaacgccccatgtggccggcgtcaccgagtattcctacagaactatggcaaagtctgttggtgacaccgcccttcagcttcatttaggcgaggcgttcacggaggtagagttcgtcaactaaaaaaccgtccaggcggcagccgtagacgcatgccattcgtgggctatcggaaccgctgatgcgatcatttgtagagaataatggatccgcgacttgtaagaataaacatgtagccagatgtttgatggtgatctccatgagaactctgccactggctgccttagctggtagtggtagcaagtcattttctcaaacattgccttctctttctctgt

SEQ ID NO: 2611 - DNA, 2002 bp, Zea mays
  Clone ID: 700219285_FLI
gccatggttagcataaatcatgtggaccaggtacagactatagaagagagcgccattgatcaggcacacaaaagccaatcgggctctgttgatgagatacatggtaatctggaaagcactttcagtcagttacagttgagccaagcagacactgctaatggaatgcaggctatgcaggaaaacactaccattcattcacaaccaagccaattggatactctgaatcctacacacagaagccaggagaatagtggcaatcagttacaatcggtgctcacagattcttcgattccaaaacgaaccacacaggaatgcactatagacgagccaagccagccaggcataaatcatatacacacagatcaggagttcactgggaatcaatttcggtcgaacctaccagatgacactgttatttcattaagggatattgaagaatgcacagcccactcaaagccaagcaataccgacagtactggacaaattcaggccaatgaggaaaacactgccaatcaagtacagtcgagcctaacagacacagttattccagtaccggttattcaggaatatgctactggttattcacagctgagcaaagctaacacctcaaataaaaaacaggccaatcaggaatacatagctgatcaagtacaatcgagcctaacagacactgtcattccagtacaagttattaaggaatacacaactggttatccacatattaataaagctgacatttcaaatcaaatgcaggccaatcaagaaaacactgatgatcacttatatttaagtcaagtaggctgtgtcactcaaatgcagataattgaggaaaatttgcccaagcaacctcagctgagccaatcaggcactgggggtagaatacaaattgatctggaaagcactaccaatcacttgctaccaaactatgatgaaaattctatgttgcaatgtggtttatcttgggctcctgaacagaacagcggagcccttagtacagatttctggaaaaatgttgaaactcaggcttcatcggtttccatgccaataaatggagcacctgttgcaagctttccagcaaatgttagattccacaatgcagcagcagcagcagaacctgctttaccgccacaggttgctccagctgaagcaggttctgatcagtcggggttggcctttcaatctgttttcggaaacatctggtcggatccttgcatcgagtttgcttttaagacccttacaggtgacattcctgttctggacgacacaacggctgtcacagactactttccggagcaacaagacttgaataaaggcccagcaccaaaccgtgcaggttctgttgataattccagaaaccacacacaagtcgatgtgaaccttccaccacctgctctggatgatttctacaatggcaattggttccctccccaatgaattcagtatgggaggaaacaaatgcaataacattttgtacctgtgaaaaacaaatcagagaaggctaatggccagattacaaagcaatggtcgtgcgctaatgatttctacaatgacagttggttccctcccccaatgaattccgtgtagggaggggaaaaatgcaatgacatttttttagctgcggaaaggcaaatcagagaaggctagcggccaaatcccaaagaatcaatcgtgcactctgaactgaatgtgtcatcccggaggacacattttgtaaaaaaaaaaaaacagtagctttatagccttattagactgttaaaacacactcgactgatctggttccatcaacaaggcttcacggagactgtcgagtacctgatctgggtcatgttttccatagtttgcttctgtgcagttgcctaataagcccattcgttgtaaactagctagttctaacttaagaaagctccctcagggcctatgcatgggtctctgattattgtgcagatgaactgttgttctggacattttgaacatgcaaatgtggaagcgtcactgtcagttg

SEQ ID NO: 2612 - DNA, 800 bp, Zea mays
  Clone ID: 700219344_FLI
aaatccaattgatccaattgcttcattcggggtagtaattttacaaagcccagttatggggatacattggtttcaaaaaaaaaaaaactcgaaattctcccgcctatccaccttgaattggattggatttgcttcgagcagtcagtcttgccgaagtttttaggagttcagagttctccaacctcgtagtcaatcactcagtctcggagacacacattgccactgcgatggccgcccaccaggactcggcggcagcggggggcaggcctcctcgtcgtcctcgtgtcctcctggcagcctccggcagcgtggccgccatcaagttcgaggtcctctgccgcagcgtcgccgagtgggcggatgtccaggcggtggcgaccgcgtccgcgctggaattcatcgatgtggcctccttccccggcgacgtccctctctacaccgacgaccaggagtggtctagctggaagcgggtcggcgacaaggtccggtcgccgctgacaactctgcctgctgccaggtcgccggcgggctgtgcgacaacctcctcacctgcgtcgtgcgcgcctgggactacagcaagcccgtttacgtcgcgccggccatgaacaccttcatgtgggacaaccccttcaccgcgcgccacctcgccgtcctgcgcgacctcggcatgtccgtcgtcccgccggtcaatggcgcgatggcggagccgtcggagatctgcaagaccctcatgctcttcttcggtccgcaacatctttagcagtcgccaagctcctcagttctttgctcctttatgtatg

SEQ ID NO: 2613 - DNA, 2940 bp, Zea mays
  Clone ID: 700219345_FLI
gaaaggactacctctaaaaggcaaagaagttggacgaaaaaaaggaatttcagtaactaaagaaaggtcccatgaagccattgtttatatcttactttcagactctgttgcaaaagggcatgttatgcttccgtactctattcgtcacttcataagtgctgatgtacattcatgggtatatattaagacatattcagccaacatcaaggaggatgaacctctagtgacaatatctcctttaaagttcaagatgcatgtgaaagatgctcatgatagcagtaaattagtcagtcaggaagtggacacttcgaggataaccagaattccttcagaaaatggtgatttcttccagaaagctcgttacagtgaaaacaaaaatattcgaggtgcagatattgagagcatttctgaatcagtgtcaaggcagaaattttttattaagcattggcttattgggcaccttaaagaaatgggcttgcatgctagccatactgagatgaattcaatagtcttgccaaccaatattttgctccatttggaagcgacagataaagaaggaaccaaaggagttgaattcttatactttctaaagcttacatctgaaaattctaatttcaacgattcacaacttaatattgagactacttggagtgttccaaccagcaatgctgatgatcttgaactgcattttgggaagttcgagcttggcgagcctgtatcttttgattccctagtggacagtggttccagtgatggtttcaagctgactcggtcttctttaggctggatggagaatgcaatgtcagatgtgacaaaaaggttatctgtgctcttatcagcaactagcctaaggttatttaacagaataaagttcccctttcctggacatgttattgtatatggacctcgaggttctggcaaaactgctttgaccagggcttctgcaaaatactttgaggaccataaagatatcttggcgcacataatatacattgattgttccaaacttgcacttggcaaggctaaggagacaaggcaagaaattgaagacagcatgtctgaagcactgcttcattcaccttcgatcatcatatttgatgatctggacagtgtagtttcagtctcctcagatcctcaagtgtctcaatcatccagttcttctgattcacttgttcaatatttggctgacattatggatgagtacaaggataagattcaaaatacatgcgggtatggacctatcgcgtttatggcttcagttcagtcacttcagagtcttcctcaagacttaacctcttctggaagatttgatttccatattgagctttctgctcttgcagtacctgagcgcaaagcactattgcaacatcaagttgaggagcatgatttattgtgttctgaggaagttctgtcagagatagcatcaaaatgtgaaggttatgatgcatatgacttggaaattttggttgatagggctgtgcacactgctgcttatcgctttcttctgccttctaatgcttgtcacaactctctgaaacgaactttgttgatggaagatttctttaaagcaatgcatggcttccttccagtcgccatgcgtgatcttaggaaatatgctcctgatgataaagatggtggttgggaggatgttggagggctagatgaagcagtaactatcattaaagagactcttgaattgccgtcaaaatacccaaatatctttaccagggcacctgtgcggttgcggtcaaacattctcctgtatggaccacctggatgtggtaaaactcacattgtgagagctgcggctgctgcttgttctttgcgattcatttcagtcaagggtccagagctattgaataagtatattggttcatctgagcaatctgttcgcgacttttttgcaaaggccgttgctgcagcaccttgcctattattctttgatgaatttgactccattgcaccccagcgaggaactcatagtgcaggagtttctgatcgtgtagttaatcagttcttgacggaactggatggtgtggaaaccttaactggagtattcgtatttgcagctacgaggtttcactggcaagtgatgccagtctcgaagatgttgcttctctgaccgaaggatttactggtgctgatctcgctgctattctaacggatgctggactagctgcaattcatgaacttttggacaaccaggagaacggtgttccagaaaccgaaccgtgcatcagcaaagaacttctcatgtccgtcactaggaaggcaagaccttccacaccagcagacgagaagatgcggtatgatagggagtttggtgaattcgtgtcatccaggaagtctatttcgacaaaggtgacctcattcttatttttaaatcctcaaaagtcaaaccatgatatttccattgaaaaaccccaatatctagttactttttttggctacatgatgaaattcattggataattactggaagaatctggtgcaggcaagagagtcaaaaggcaaaaaggttacactagcttgagcctttccttggccaatattaatgcgctgcaaaatttggacagtggcctacatgaaggctgctaacacgcggacttgtcaagtcatgcgacgtaggcttcctttcatttgaagagaaacaaaatctacaaagaaacctaaccaaggctcacttgtgttagtgtacttggatggaggaggaaggccattggagggacctgcaggtggtcaaaggtgtcatagtaggaaattttgtacggtaatcctgctgtaattaaagttataacacttgtcacaaattttgtacggtggtgaacggtaggaaatctatactacttacttattaagaaggtaagagtagtctgccgttctgccctcccccgttccgcgcgcagaaaaaaaaaatcaaaccgtggcttctcagggatc

SEQ ID NO: 2614 - DNA, 677 bp, Zea mays
  Clone ID: 700219379_FLI
gaggaaaataaccaagttgacccagatgcacctaggcggccaccccgtccacatgtatttttgcaatcatacaatagcacaccaaggatgactcccccagactcacctccaaggcgttttgcatcggtatcaccgccaaggcgacattcaatctctgttacatcgatgaatatgtttaatgacaggtcctcaggcttttctggtcagcatagctctccatttgacgctccaagtcaaacaggacgaacaagagttgatggaaaggagttctttcgtcaggtcagaaatagattatcttatgagcagtttggtgcattcctggctaatgtgaaggagctgaacgcacataggcagaccagagaggataccttaagacaagcttatgagatcttcggtcctgaaaacaaggacctgttcaccatttttgagggcctaataagtcgcaatattcgctagtctcattacccatcgttactagtaattcaagttttaccggtatattgttattacgatattcatcactgtttgtatttgaagtctgtggtctgttacggattcttggtatatagtagttctatagttcatcttttcatgcttatgtccatgtagaattctgggtttgtctggaagctacaatttatattccaatacaaatggaagctaaaattgtacgtacc

SEQ ID NO: 2615 - DNA, 1164 bp, Zea mays
  Clone ID: 700219551_FLI
agaaatctgatagaatctgaagatgctagcttcaggagctcctacagaaggatggggtctcatgaaccttttgaaggcagtgtccggtttagccgaacattaagtgttgggcggcttcgggacagagttctcaggcggcctccattctcagatgggctattcaccccttcacttctttatgatagggcagtatggccgtctggaaatgctagtgctaggcaagattcagcagtaatgcaaaggactaattcagacaggagttcagaaccacggtctgatccttcaaccagcgatatgtacaactcgagctctgagaggcaggctagcaacggcgatctactggagcgcagatcagcttttcttgagaggaggaggaggataagatctcaggtcagagctctacaaaggttgggcagcaggtttgaaaatttatctggtcatgagagatcctgcatactatctggtcagcatagaacaggaaattgcaactgcagaacaggtagtcgacaaggcaatcctgatgaagaaactagcacaagggctagcatatcgagaattgttatgttagcagaagcactttttgaggttctggatgaaattcaccaccaatctgccgcattgtcgtcatcaagaccatcattttcttcaattggatccgttcctgctccaagggagattgttgagcgtcttccttcaaaagtgtataggaaaccattgaaataccagagcgaggaagcagcacaatgctatatttgccttgttgaatatgaagagggagattgcctccgtatacttccatgccatcatgaattccatctaacatgtgtagacaaatggctaaaggagattcacagggtttgcccactttgtcgtggcgatgtttgcagatctgatgcacccattggaaagaccagctgattctgtctcttgagaatggagcttcttacagaaaattggagagcttggcatggttctcatccaattccgatagaaccgccaaacttctgcagctgttattttcatttcctcctctcttatggtcagtacagcatcgcagtcatcctattatgaaactgatgacgacatgccatggtgaatttaggattcttgtgtggtggggcgagtttgttgataatggattattggcttccgtttgggcgattg

SEQ ID NO: 2616 - DNA, 940 bp, Zea mays
  Clone ID: 700219580_FLI
gaaggacaaacaactgtagttgttggtccaagcggcgttgggaagtccagcctgatcaatgcactgaggtgtaaccaggacatatcagaagaagatccaatacataaactagttgaacagaatagtaaatggtttggtgaacagcgtgttggaactgtgtccaagaaaagtggtaaaggaaagcacacaacgcgccatgtctcgttgcttcctatagctagcggaggcttccttgctgatactcctggatttaaccagcctagtttgatgaaagtgacaaaaaagagtcttgcagaaacatttcctgagataagaaaagcgctgaaagagaacgagcccaaaaaatgcttatttaatgattgtgttcacctgggtgagcatggatgtgctgtgaagggggactgggaaaggtatccatactatctccagatgcttgagatcaaaattagagaagaaatccagctacggacatttggaacaaaaagagaaggtgatgtcaggtacaaaacaggtgtcatgggggtgaagcaagcagagcctcgtcttgaactcaagaagcacaggagggtgtctagaaagaagattaaccaatcgattcttgacgaaatcgaagatgatgttgatgacctcgatgatgactaccagtttgacgtcaagcagcgttctaggaaatgataatcttttttcatctgatgatctaacggcatgaaggaacctttgggtgctgtacacagttggttttgtagtgccaccaccatgcccttgagcagtatgctgatcactgtaagtagaagcgtaatggccggaacccggggtgtcttgacgttgctccagacgtttttctttgcggtagaacgttaagggcatgtttggaaacataatttttttagtatcaagataataccgtgatggcaacgactgctatacaagcagtctttct

SEQ ID NO: 2617 - DNA, 1588 bp, Zea mays
  Clone ID: 700219610_FLI
gcgaaacttctcctttctccatcctcaaccctactcccccttcatccgcacgaacgaagcagcgcgagcgaggagcagacgatccttcccgacctcgaagcctaccccccttccagctgcggccatggcgaccgtcatgcagaagatcaaggacatcgaggacgagatggcaaggacacagaagaataaagccactgctcaccatcttggtcttcttaaggctaaacttgcaaaattgcggcgggagttgctcactccaacatccaaaggtggtggtggtgcaggtgaaggatttgatgtgacgaagagtggagatgcacgtgttggtttagttggctttccttcggttgggaaatcaacattgttgaacaagctaacagggacattttcagaggttgcttcctacgagtttacaactttaacatgtattcctggagttatcatgtataagggtgctaaaatccagcttctagatctcccagggatcatcgaaggtgctaaagatggaaagggcagaggaagacaggttatcagcacagctaggacatgcaatgttattttgattgttcttgatgccataaaaccaataactcacaagcgtcttattgagaaggagcttgaaggatttggcattaggttgaacaaaacaccacccaatttgactttcagaagaaaggacaagggtggaatcaacttcacatcaacagtgacgaacacacatttggaccttgatacagtaaaagcaatctgtagcgagtacaggatacataatgctgatgtctccctgagatatgatgctacagcagatgatctcatagatgttattgaaggaagccggatttacactccttgcgtatatgttgtcaacaagattgatcagataacactcgaggagctggaaatcttggacaaacttccccattactgcccggttagtgctcatcttgaatggaatcttgatggacttctggagaaggtatgggaatacttggatttggttaggatatacacaaaacctaaagggctgaacccagattatgaggatcctgttatcgtatcatctaagaagaaaaccgtggaagatttctgcgacagaatccacaaggacatggtcaaacaatttaaatacgctctggtatggggttccagtgtgaaacataagcctcagagagttggcaaggagcatgagcttgacgatgaggacgtcgttcagatcattaagaaaatataggcgtatcatgtggtggaacaaaacctgttttttctggaaaactgggagcgttgaggattttgttgagtagtagcctcgcgagaagagcttgaactcggcctttgcttgttggtgaggctcatatgtaatgttccctgttctcagaaaatttgctttgatccaaagacaatgtgagtcggcatttacttatatacaacgagtcatgtagctgtgatgtaacttcctctaacttggtgccatgtggactggagtcaccgatgtgtgctgccaagtgtctggcccaaccgttgaacacgtggagagatgctctccatatctttagaggaggatataaggtgatttgatgatttatttatt

SEQ ID NO: 2618 - DNA, 678 bp, Zea mays
  Clone ID: 700219651_FLI
ctctttcccaaatccaccgccggctcggctcgcccatcttcgcgccaagcaccgaatctccgatggcccgcacgaagcagacggcgcgcaagtcgacgggcggcaaggcgccccgcaagcagctggccaccaaggcggcgcgcaagtcggcgccggcaaccggtggcgtgaagaagcctcaccgcttccgccccggcaccgtcgcgctccgggagattcgcaagtaccagaagagcacggagctgctcatccgcaagctgcccttccagcgcctcgtccgtgagatcgcgcaggatttcaagaccgacctccgcttccagtcctccgctgtcgccgcgctgcaggaggccgccgaggcctacctcgtggggctcttcgaggacaccaacctctgcgccatccacgccaagcgcgtcaccatcatgcccaaggacatccagctcgcgcgccgcatcaggggcgagagggcttgatctcccgttgtcgtcgtccacgttgttgggcctttcctctgtgtctctgcttgtagaatccttgcttctgttcggttccttctgttcgcatgatggtgttcgtagtgttaggagttgcattttctaatctgcttgttcttgcaccggtgcctctgaagtggcgtttccctctatcttaatggaaatggaatgtgctttaaaaaag

SEQ ID NO: 2619 - DNA, 1262 bp, Zea mays
  Clone ID: 700219691_FLI
atcgtgtctcctggcgcggacctgtccatctacttcccgtacaccgagtcgcacaagaggctgacctcccttcacccggagattgaggagctcctgtacagccaaaccgagaacacggagcacaagttcgttctgaacgacaggaacaagccaatcatcttctccatggctcgtctcgaccgtgtgaagaacttgactgggctggtggagctgtacggccggaacaagcggctgcaggagctggtgaacctcgtggtcgtctgcggcgaccatggcaacccttccaaggacaaggaggagcaggccgagttcaagaagatgtttgacctcatcgagcagtacaacctgaacgggcacatccgctggatctccgcccagatgaaccgcgtccgcaacggcgagctgtaccgctacatctgcgacaccaagggcgccttcgtgcagcctgctttctacgaggctttcgggctgacggtggttgaggccatgacctgcggcctgcccacgtttgccacagcctacggcggtccggccgagatcatcgtgcacggcgtgtctggctaccacatcgacccttaccagggcgacaaggcgtcggccctgctcgtggacttcttcgacaagtgccaggcggacccgagccactggagcaagatctcccagggcgggctccagcgtatcgaggagaagtacacctggaagctctactcggagaggctgatgaccctcaccggcgtgtacgggttctggaagtacgtgtccaacctggagaggcgcgagacccggcggtacctggagatgctgtacgcgctcaagtaccgcaccatggcgagcaccgtgccgctggccgtggagggagagccctccagcaagtgatgcgcgacggcggccacagacctgatcgatcgatgagcgagagggagcactcggagtgtcgtgtcttttcccttgccatttctttctttttttcccttcccggaggcgaaaaaaagagtctgcttttgctaggcggcgggcgttcgttgctgctctttgcttcaagagttaaatttacctaccttgtcaaggtcttgttccatcattgatccgggtgtcgcttttttagtagtctgatggactgttagtagtttgcgttgcgtcggttgagagggaacgttggtggtggtggtgtgtgtgcagtcaggcgtggtgctccctttgtttcctggatgggatgttgctccttgaataataatcgtagtggccttggagcccttttcctg

SEQ ID NO: 2620 - DNA, 606 bp, Zea mays
  Clone ID: 700219717_FLI
cactcgccgccactcaccagcaaattcccaagccgccccttcccccatctctttcgcgccccatttgatcgattcctgatggcgcccaaggccgagaagaagcccgcggagaagaagccggcggaggagaaggccgagaagaagccaagggcggagaagcgcgtgccgagcaaggagggcggcgagaagaagggaaagaagaaggcgaagaagagcgtcgagacgtacaagatctacatcttcaaggtgctcaagcaggtgcacccggacattggcatctcgtccaaggccatgtccatcatgaactccttcatcaacgacatcttcgagaagctcgccgccgaggcagccaagctcgcccgctacaacaagaagcccaccatcacctcccgggagatccagacctcggtgcgcctcgtcctccccggcgagctcgccaagcacgccgtctccgaagggaccaaggcggttaccaagtttacatcctcttagggtgccgccgccgccgcacgttgctaaattttctcatatttaggactgtgctaggttgttcgtgcaacaatgtagaatttgttataattgctgaatgaatcagttacccctgtc

SEQ ID NO: 2621 - DNA, 1201 bp, Zea mays
  Clone ID: 700219730_FLI
ggtagctctgatgacaatccgatggacctgacacgaacgctggacgcctgggtcttttctacgcagcggcgttggtggtgcttgcttttgaccggagagcagcgcccagggatgcgccggggcctgcctgccgtgccttagcccacagtgccaccgccatgccatgcgttggtgagctctgagctcgcattgcattgcattgcacgcagggctacgtacgctatgctctggattgtcaatagatagagttattgccatgcatgtgctcatgtcggctcctgtccacgtctgtgcgccgcgccgcactcgtgcagtagtaggctccgtagagcctcgtagttgttgtgaggggtggcaaggcgagcttcgttcatggacatggatgtacagtagtcagtagtacaaagagaaagaaagacactttcagccttcagggcgaatcttttggctgaactggtgctcgttcctgctcgagctagagttggcatcgagaaatgggcggaaaaaggctgggcgcctaggcggcggcagggagacagcgtacgtgttgctgccgtcctcgccttgtgttatttttggccacggcagtacgacactgtgcgctgtgccgtagtttatgaccacggccacgggcagtggttggtggtctcgtctcttcaggtacccgcagattcccacccctccttgttcctgatgcatgcagcagccatccgggctccggccatggcccatgggccatcgcgcatgtgcaccgttcactcgcctagtccgtgcagctgcagcctgcaggcgctttaaccacggcgtgcttgctgttgctgtgctgctgcaggtggaggaagggtgcggcctggcgacggcggacgacatcgccgccgctgtgcaccacgtgctctgcatcatcgacgccgaggccaccgagcagcagctgctcgcggcagcggggccgcaatagggcccgcccgcgcccgcgagccgacctaccggcgatggagaggaggccagcgtagaagcgacgtacgtgactccaagtcatgtgtacaagcataggcgtttttgcagggtccggtgaaacgccttgtgtagtttgatctttgtatttttggctgcttttttcatatcttttcagtagatgtgtaagcgtatgttcggcatgttgccacgatgtttgattcagcgttcgatctgtgacgattagctc

SEQ ID NO: 2622 - DNA, 479 bp, Zea mays
  Clone ID: 700219745_FLI
cgcgcagctgggcaaccggtggtccaagatcgcgtcgcacctgccgggacgcacggacaacgagatcaagaaccactggaacacgcacatcaagaagaagctgaggaagatgggcatcgaccctgccacccacaagcccctccacccacagccagcagctcctcctccgactcagcaggagcaggacacgggcgggtcgcccgaggaggagggggagaaggccgacgcggtcatgatggcagcagctacgccgattatcgggcacgagacggcgccgttctttaccgacgaggaggagatgctggcgcacctccttgacgacatcgacgacttcccacccgcggcttattctcccgacgactcttcttcgccctcctcctcctcctccgcgtcccggtcgtctcactcggcctccgtcgtcacagcgccgtcgtcgagcggagctggtggaagcagcgtcgccgacggcgagcggccgc

SEQ ID NO: 2623 - DNA, 648 bp, Zea mays
  Clone ID: 700219760_FLI
cgacttcctgcagtcctgcgctgcgcccctcctttccgcctccacgctgccgacgtccaccacacagccgcgtgcaccgccgcgacggagcccgcttcccctacggcgcctaccacgtgtactgctcccccgggaacgcggcgcgcgcggagcagcccaccacctactgcgacgcctacagcaacccgcaggcgcaggagatcctgcagctgctgccgcaccccgtgtggggagagttcggctacccgacggccaggggacaggggtgggtcggcgaccccagggcgtgggacctcgacgtcggcgccatgtcccaggcgctctacttctaccaggaccccggcacgccgccggccaggaggcggtggacgtcgctcgacgtcggcacggagatatacgtcagcgacagggccgaggaggcggagtggacgctcagtggcttcgacatccttgtgccggacaagtgtatcaagtcacagcaacgggccagcaacagctgctggtagacagacactttaatgtcactgtacgttacgctgagtagcatagcaggccaaagtgttcttcgtactagaagaggtggtgtaggatgactatattactcatgttagtactaactaactataaaaaataaaatgatgattaatc

SEQ ID NO: 2624 - DNA, 1058 bp, Zea mays
  Clone ID: 700219767_FLI
cggatctgagacgagacgagttaccatctcatcccaactccggaacgaacaagttaccatctcatcccaactccgtctcaccgaggtccgcaagaacggaacctgcccctggctcaggcctgatgggaagacccaggtgacagtcgagtaccgcaatgagggtggtgccatggtccccatccgtgtccacaccgtcctcatctccacccagcacgacgagacagtgaccaatgatgagatcgctgctgacctgaaggagcatgtcatcaagcctgtcatccctgagcagtaccttgacgagaagaccatcttccaccttaacccatctggccgctttgtcattggtggacctcacggcgatgctggcctcactggccgcaagatcatcattgacacctacggtggctggggagcccatggtggtggcgctttctccggcaaggacccaaccaaggttgaccgcagcggagcctatgtcgcaaggcaggctgccaagagcatcgtcgccagcggccttgctcgccgcgccatcgtccaggtgtcttacgccatcggcgtgcccgagcctctctccgtgttcgtcgacacgtacggcaccggcgcgatccccgacaaggagatcctcaagattgtcaaggagaacttcgatttcaggcctggcatgatcatcatcaaccttgacctcaagaaaggcggcaacgggcgctacctcaagacggcggcctacggccactttggaagggacgaccctgacttcacctgggaggtggtgaagccactcaagtcggagaaaccttctgcctaaggcggccttttttttcagtaagaagcttttggtggtctgctgtgcttaatcatgcttttatatggcttctacatgttgtggttctttcttgatctgcaccgcgcttatcgtttgtgttgtactgccctaataagtggtgcttatgaggactgtttctggttttgctgcttatgttgtaatgctttgaaacaatgaaagaagctacaggccacagctattttgagaagtaatggaacctcgtgccgttttgatt

SEQ ID NO: 2625 - DNA, 1034 bp, Zea mays
  Clone ID: 700219768_FLI
aaatgattcaaatcctgccacacctagagctagcgagtcatctccacgagctattcgcattggagaagtgggaaaccaaagtcctgggatgcttacctacgatgctgaacaggatgctgtcgtttcttccggaaatagcactcctgtatcgagtcctaggttttttaacaggagacactccactggacagtcaactccagacagggctgggccatcggatattcagtctttctcagactccctgaagtcccgcttaaatgccgtctctatgaagtacaaagaatctattacaaagagtactcgagggtggaaggagagattgttttcacgtaattcatccgtggcggatcttggttctgaagtgagaagagaagttaatgctggaattgcgtccgtatcacggatgatggagcgtctggaaactagaggaaatagcagaacaagtgatagcccggcagcatccacttctgaagttccctctgctacagaatcaagcaatgaaagggttacagagagcaactctgctgctgctgctgctggtggtggtactaccactacgggtaccagcgctagcaacgcctccgccccttgtgttgcgacatccggttcaaattaggacatgtaagggtctcagaaagaaggcttacacctgcaattcttcatcttcaaaggtttgtgagcctggcggcagagcagaagtgcagtaacatgatgccgtcatttttttctcaaccactgcataaacggctgcaaggggaaaaaaaccaaacggtgatttgatgtattggctcgataaaatggtggtgcgtgtggcctaggagaagtcggatttcatcttctgttttcgtctctttgtaaaaaaaatcgtctgagggcagatgtttaccggtataaataacggatatgtcatcttcatagtacgtggatcagttataaatatgattggaacagcaaagcttgctgctgttataaagttgtaccgtggcacgatttcctgttctgttctgtgtgggtgaattgatggattttgctgt

SEQ ID NO: 2626 - DNA, 1503 bp, Zea mays
  Clone ID: 700219785_FLI
aaaaatgctagcggatgtaaccttgcagttgatatatggagtttaggatgcacagtcctagagatggctacttcaaaaccaccatggagccaatatgaagggattgccgcaatgtttaagataggaaacagtaaggagcttccaccaataccggatcacctctcagaagaagggaaagacttcataaggcagtgcttgcaacgtgatccatccagccgtccaacagcagtggatcttctgcagcatccattcgtacaaaatgcaccgccacttgaaaaatcatctgcctctcatccactggaacagttgacggctatatcatgcagaacaaattcgaaggtggttgagcatgccagaaatatgtcctcgcttggtttggaaggccaatcaattttgcagagaagagctgccaaattttctttgccaaatagtgatatccatatacggagtaatatatcttgtcctgtatctccatgtggaagtcctcttctaagatcaagatctccacagcatcaaaatggtagaatgtcaccttctccaatttgcagccccaggactacttcgggtgcttcaactcctctgactggtggtagtggagctgttcctttaaaccatgtgaggcaaccagcttacagaaatgagggcttcacggtcacatcaagaggttttgatgaccacatgcctagctggcctgttgatccagtacatggacgttttattcgagtgcagcaaattcccgtgggtcggcaggagagggtaatctctgaagttgacattctgagctctcaatatggaaagatgagacatgcaaatgtgtgggatctgcatgataggccattaccttctgagcgttcctctcaacagtgctttgggaatcatgcgaagctaaaaccttcactggacttgagatctggtcctcggcaccctgggcgcaatcatggccattgattctgtagcaaaagttaatggataagctttcagtcgtgtctatgtgatagctagtggtcctaagctggttcactgaaacctttaattgtatcatagtagaagagatgttcattaattatttcagatgctgacagttggcagtggataaagattctcaaatgtcaatctcatattcccattactctaaagaagatgagacatgccctatcaggaaggggatgttgtatactcaaggacccaaaacagtgactctgaacctgtatactcttactctcgtatctacaacaatttagttttcgttttcttctatgggtttggaggccattgtacagaagggaactctcaacaagaaatccagattacatggcacaggcgaaagcaagtgagccgttcaccaatctttccctttttttttctttttaatcctatataacagatacacatatgccgactgctcactgtaaagtgttgatcgagctgtggttgtaataccggttcgatccattaaacgtatctgttactctgaatatcatgtgaagagtctaatcgttaatc

SEQ ID NO: 2627 - DNA, 781 bp, Zea mays
  Clone ID: 700219818_FLI
cccacggtccgcccacggtccgagaagagatcccgcgccgtcctcttctccacctccacctccacccatggcggcctccaccttcagcggcgacgagacggcgcccttcttcggcttcctcggcgccgccgccgcgctcgtcttctcctgcatgggcgccgcctacgggacggccaagagcggcgtcggcgtcgcctccatgggcgtcatgcgccccgagctcgtcatgaagtccatcgtccccgtcgtcatggcgggagtactcggcatctacggcctcatcatcgccgtcatcatctccaccgggatcaaccccaaggccaagccctacttcctcttcgacggctacgcgcacctctcctccggactcgcctgcggcctcgctggcctcgctgccggcatggccatcggcatcgtcggagacgccggagttagggcgaatgcacagcagccaaagttgtttgtgggcatgattctgatccttatcttcgcagaagctcttgctctgtacggtctcatcgtcggtatcattctctcatcccgtgcaggccaatctcgcgccgattagaaggcttgatatacgccacactgagtcatctgccattgtattcaaagtgttcttttctcggtgaacaatgtgagggatcatgttgagcctgttccacctttgtaacattatattgctattatgtgaagacaaacctagctagctgttgcagttatgctgttgtacttgtatttgtttgaaaataataggcagcgagccccggatgtgatgaat

SEQ ID NO: 2628 - DNA, 1024 bp, Zea mays
  Clone ID: 700219829_FLI
gatacagcatacttcagcctctctctcggttctcccgggcccctcgcgtgcgctctgtcgccgtcgccgccgccgccaacctacgccaagtgcccagatctccaccctcgggaccttcgccggcagcgaacacccaccaccagctgatatagggcatttacccttttgtgactatggcactagcggctatctataaccttttcatcattaacaaatcaggcggccttatatactacaaggactatggttcagcagggaggatggataccaatgacagtctaagattagcaagtctgtggcattcgatgcatgctatctcccagcaactctcccctacccctggctgtactggcattgatctcttacaagctcataactttgatctccattgctttcaatccctcacagggacaaaatttttcgttgtatgcgaaactggagctccaaacatggaaatgctgctgaaagtgatttatgagctgtacacggacttcgttttgaagaatccgttctatgagatggagatgccgatccggtgtgagctgtttgatcacaacctggctcagatgatccagaaggaccgtgttgcgcttctgggtcggtgaatcttgaaaactcatggtctcagcccttgaaaaccctacttttcccgttttcgacgcttggacttgctctgctggaaccctaaattctaccttgcggcactgctgtgctgtgcataaccgataacttgaatagtgtgttgctcgcttgtaatcttcttgcggtgtgatgaaatgtagagctttgcgggcataaatgccgctgcaaatagtaacaacatggaagcagcttttgttcttgcatgttttccctgcaatgagcttgagcagcttgatcagggctggttttgtggaagtggaattgaaggggatccatagagaggaatttccttgctatttttgaatcgaaagtgaatttctagatcccgttcaattccattttaccaaattggttatcagtgatttttcaattcccttttacc

SEQ ID NO: 2629 - DNA, 1466 bp, Zea mays
  Clone ID: 700219831_FLI
ctaaactactactacacacacacacacacacacacatcctacgcatcttctcgcagccatctttgtggaagcaaggcgggcaacatcgtgtggctagccagcaagggagagaaacaagcacaagcatggcctcaaaacctggccctctgagtcgctggccatggcaagatcttggaaactacaagtacgcgctggtggctccatgggcggtgcgcagcacgtacaggttcgtgaggagcgggagcggggagcgggacctgctcgccttcgccgtgctgccggtgctcctcctccgcctcctctacagccagctctggatcaccgtgtcccgccaccagacggcccggagcaggcacaggatcgtcaacaagagcctcgacttcgagcaggtcgacagggagaggaactgggacgaccagatcctgctgacggcgctgctcttctacgcggtgaacgcggcggtgccggtggcgcagtcggtgccgtggtgggactcgagggggctgctggtggcggcgctcctccacgtgggtcccgtggagttcctctactactggctccaccgcgcgctgcaccaccactacctctacgcccggtaccactcgcaccaccacgcctccatcgtcaccgagcccatcacatcggtgatccatccgttcgcggaggagctggtgtacttcaccctgttcgccatcccgctgctcaccatggtgggcaccggcaccgcctccgtggccgtggccaacggctacctcgcctacatcgacttcatgaactacctcggccactgcaacttcgagctcgtccccaggctgctcttcgacgtcttccctcccctcaagtacctcatgtacacgccatcgttccactcgctgcaccacacgcagttccgcagcaactactcgctcttcatgccgctctacgaccacctgtacggcacggcggacaagtcaagcgacgacctgtacgagcgcgcgctgcagggccgcgccggggaggacgcgcccgacgtcgtccacctcacgcacctcaccacgccggcctccctcctccgcctccgcctcggcttcgcgtccctcgccgccgcgccggcgccgcccgcgtcccgctacggcgccggcagcagcagcagcagcagcagcagcctggcggcggtggcgtgcccgctggccgcgctcctcggctggacccggaccgccttcaggtccgaggccaacaggctccacaagctcaagctcgagacgtgggtcgttccaagatacacctctcagtacctgtccaagcaaggcctgtacgcagtggggcgtgtggtggagaaggcggtggcggacgcggaggcgagtggcgcgagagtactcacgctgggtctactgaaccaggcaaacgagctgaacaaaaacggcgagctgtacgtcatcaggaagcccagcatgaggaccaagatcgtcgacgggacaagcctggcc

SEQ ID NO: 2630 - DNA, 1457 bp, Zea mays
  Clone ID: 700219840_FLI
cactcttctctgtgtaacgacttcctccctttcctgccgcaccacgcaatcaccggggcggaggcggctgccggcgagcacttgggcgtctccggccaccgcctgcctcgttgtgatccaactaggaactcacccagcgctatctcccggcaggctccccgttgactcccgcgatttgttacccgctggcgctgccgcacacagctcaaaaggagtagcagcgcccctggttgccggttggagcgtcaaggatgagcgggaggaagaatgcgggcaaggtttccccctggttgctcgtcctcatctgtttagggtgcttctttgtgacctacaacctcctgacgatgcccagccggggacgggatgggccgcgcaagttcctcggcggcggcggggatcgccactcaactgcctcgttggggtcaggctctgattcggaccccgcgaagcggttccacgtcgcgcttacggcgacggacgcactgtacagtcagtggcagtcgcggataatgcactactggtataaggagatgagggaccgacctggttccgacatgggtggcttcactaggatccttcactcgggcaagcctgatggattgatggatgagatacccaccatggtggttgatccccttcctgaaggcaaggatcagggatatattgtcttaaataggccttgggcttttgtccagtggatccagaaagcaaagatcgtagaagagtatatattaatggcagagccagatcatgtctttgtgaagcctttgccaaacttatctcatggtgatgagccagcggcatttccatttttctacatcaaaccgactgagaatgagaagatattgaggaagtttttcccagaagaaaaagggcctatttcaaatattgatcctattggctctccggttataatcaagaaggctcagcttgagaagattgctccaacctggatgaatgtttcattaaaaatgaaagaggatcaggagacagacaaagcattcggatgggtcttggaaatgtacgcatacgctgttgctagtgcactgcacggtgtgcaccatagtctccataaagattttatgattcagcctccttgggacctgaaaacggacaacacattcatcatccattatacgtatggatgcgattattcaatgaagggtcagcttacttatgggaaaatcggtgaatggcgttttgacaaaagatcttaccttcaatctcctccaccaagaaatctttcactgccccctccaggagttcctgaaagtgtggtcacccttgtgaagatggtcaatgaggccaccgcaaacattccggggtgggaggacgatagatgattgatggtctggctgagttgtagtttattccagcacccagctggtatggcttttgttcaaaaacatggaagaatatcattggtcaataaaagaaaagcatttgattaaaaaaac

SEQ ID NO: 2631 - DNA, 997 bp, Zea mays
  Clone ID: 700219852_FLI
ctcccatccagccgccaccaggtgcagagtctttcgtcatctcttctccggcgaagaacccccagtcgcccaccagatcacttgttaaactttgttgaggggtgatggcggtttctttcgcaaacctcaactccgaggcagggcttaaaaagcttgatgagtaccttctcactcgcagctacatcactggctaccaagcttccaaggatgacttggctgtctacacttcgttttcggctgctccctcgtccaagtatatcaacgtagcaaggtggtttaaccacattgatgcgctcgtgaggctgagcggaattactgcagagggccaaggtgtgaaggttgaatcctcagcagttccttcagccccaactccagatgttgctgaagcacaggccccagttgctgaggaggacgacgacgatgatgttgacctttttggtgaggagaccgaagatgagaagaaggctgctgaagagcgtgctgcagctgccaaggcttctggcaagaagaaagaatctgggaagtcatcagttttacttgatgtgaagccatgggacgatgagactgacatggccaagctcgaggaagctgttaggagtgtccagatggaagggctgctctggggcgcatccaagcttgtcccagttggatatggtatcaagaagctgcaaatcatgatgaccatcgtcgacgaccttgtctctgtcgacactctcattgaggactatctgtgcgctgagccagtgaacgagtacgtgcagagctgcgacatagttgccttcaacaagatctaggcgtgacttccgatcagtccttctcctggggtgctggcgatggtggtggctgggcaatgcaccagcctaatttatccatagctatatgtctgctttgtgtggccagtgatattgccgtgagtatttttggatcctattcgagtcgaatgtaccagtaccagagttaatttgctttaattcgaaacaccgttccagttggaatt

SEQ ID NO: 2632 - DNA, 1659 bp, Zea mays
  Clone ID: 700219868_FLI
gcaaacaagcactccgctgcagttgctgatactggcgaagtattcacctggggttgcaataaggagggccaactaggatatggcacttcaaactcagcatcaaactgtatcccaagaatggtggagtacttgaaaggaaaagtacttagaggtgtttctgcagcaaagtatcatacaatagtgttaggagctgatggagaggtgttcacttggggccatcgccttgtcaccccgcggcgtgtcgtagtagctcgatgccttaagaagggtggaaatataaatctgaagtttcatcgtatggaacgacttcaagtgatttcagtggctgctggaacaacacacagtactgctttaacagctgatggtgctcttttctactgggtttcatcagatcctgatctaaaatgccagcagatattttcaatgtgtggaaggaatatcgtgaacatctcggctggaaagtactggaccgctgtggctacatcaactggtgatgttttcatgtgggatgcaaagaaacgtaaggatgaaacgccaattttcactcgggtgcatggtgttaagcgagcaacatttgtttgtgttggtgaaacgcacatgcttgtgctctcaagtatataccatcctgagtatccacccaaacctaaaagccaaggcttaaaatccatgttagaatggaacggtggaacagaagagctgggtgaagatatcctgtttgatgatgttcagcccaacagtggtttatcaggaagcagtggtgaaatgagcaaaggtgtgcctagcttgaaaagcctctgtgagaaggttgcagttgagtatttattggagccaaaaaacgcaatacagcttcttgaaattgctgattccttggaagccaaggagctcaagaagcattgtgaggatttagctattcgcaacctcgattacattttcacagtgggagctccttcaattatgaatgcttcttctgaaattcttgtgaacttagagaaattgctagatgagaaatcctcagagccttggagtcagcgccgtcttcccacaatgacagctacctatcctgctgtcattgacagtgatgtagaggaagatgaagcaagagaattccccaagacccgtaaatgtgggaaatctgcatcaaggccatctgcgatgtctagtgatgacagcttccttcagaaagactgcaccgctgaacaagccgtctctaagcaggtcagagcacttcgcaagaagctgcaacagattgagattctcgaggctaagcaacttgcaggtcatcagcttgacagtcagcaggtagcgaagcttgagtctagggctgcccttgaaggtgaacttgctgaacttggcattccctcagagatatactcaacttcctctgcttgtccagcagaaggtaggacaaacagaaaacctgaggtttctaagaaacagaagagaaagaacaagcagtcaacacagaccccgtcagtgaaaaatgagcttgggcaacaaatccccattacggaacttcaagttctacaagtcaatgcctctgctgaaaaggaggcgtatgccgctgatccaattaaacctatggaggctgccgcgttcagcaacacaaaagacaccgcttctccaccggagaagaaaccttcccaaccaactccatcaaag

SEQ ID NO: 2633 - DNA, 2171 bp, Zea mays
  Clone ID: 700219903_FLI
gttttttgtctcctttgggtcctcttgttcccgaagcatggggactgggggttgaattcgtgtagagatccagatgattgcgctgctagctccgatcgccgattttactctgctgcctgccggtccagatccatggaagcaagtcgatgaacttagagggcttccgctctggattttctttgaaaataagttagagtcctgtcaaacacctcttttctctgccaaacgatctacaaaatggctttagcttagaaaactgtttagttagaaaactgtttagcttagaaaactgtttactcggccaggggacagagagacgcattaccttgccttcttgctcttttcgcctctagcggtgctgtgtattcagttacttcgtctcaaagaaattcagttggtttcatcctatacacctatatgtagccggccctgtgactcgcagggcagcgtatgatctttgatcctcggcttatgtattcacctcatcggccgcttaaccttggtacatgaaaatagattttgtttccagggtcctgctcggcttatgtatgaaatagatttttttttctcagtgtaggaggagatggcgctcacaagaatcggtcttgctggccttgcggtcatggggcagaaccttgccctcaacattgcagagaaagggttccccatctctgtgtacaacaggacaacctccaaggtggacgagaccgtgcagcgtgccaaggcagaaggaaaccttcccgtctacggcttccatgaccccgcgtcctttgtgaagtccattcagaagccacgggtggtgatcatgctcgttaaggccggcgcgccagttgaccagaccatcgcgacgctcgcagctcacttggagcagggcgactgcatcatcgatggggggaacgagtggtacgagaacacggagaggagggagaaggccatggaggagcgcggcctcctgtatcttggcatgggtgtctctggaggagaggagggtgcccgcaacggcccgtccttgatgcccggaggctcgttcgaggcttacaagtacgtcgaagacattgtcctcaaggtggctgctcaggtccctgacagtggcccgtgtgtcacgtacattggcaaaggtggatcgggcaactttgtcaagatggttcacaacggaatcgagtatggcgatatgcagctgatttccgaggcatacgacgttctcaagtcggtcggtaagctcaccaacagtgagctgcaccaggtgttctccgagtggaacaagggcgagctcctgagcttcttgatcgagatcacggccgacatctttggcatcaaggacgagcatggcgatggctacctggtggacaaggtccttgacaagaccgggatgaaagggacagggaagtggacggtgcagcaggccgccgagctgtcggtggccgctcctacgatcgaggcgtccttggactcgaggttcctgagcgggctgaaggacgagcgggtggaggcctccaagatcttccagggtgactactactccaccggctcgccggtggacaaggcgcagctggtggaggacgtgaggcaggccctgtacgcgtccaagatctgcagctacgcgcagggcatgaacatcatcaaggccaagagcgcggagaaaggctgggggctcaacctcggcgagctggccaggatctggaagggcgggtgcatcatccgcgccatcttcctggaccgcatcaagaaggcctacgacaggaacccgggcctcgccagcctgctcgtagaccccgagttcgcgcaggagatcatggacaggcaggcggcgtggcgcagggtggtgtgcctcgccatcaacaacggcgtcagcaccccgggaatgtccgctagcctggcctacttcgactcctaccgcagggacaggctgcctgccaacctggtgcaggcccagagggactacttcggggctcacacctacgagagggtcgacatgcctggctctttccacaccgagtggttcaagattgcgcgcaacatctccaacaactgatgagctgctcaacggatggcatgcccggtgttgactactccagtcggtaatgagatttcctgcaggaacttgtctattgatctttgtaagttaattatttatatgaataaaataagagcagacatgcttgtgtttgggc

SEQ ID NO: 2634 - DNA, 1141 bp, Zea mays
  Clone ID: 700219918_FLI
gttagaaacggaagaagaacagcaggcgaagcatcgccagattggtatatcgatcgattgatcggtggcggagggaggggaggagggcggcagatggcggcgtgccggggcttcttcgagtgcctgctcaggctgctcaacttcatcctcaccgtcgccggcctcgccatggtcggctacgggatctacctgctcgtcgagtggatgaagatatctgaggacggcagcagcggggggttgacggcggaggtgctggtctccggccggccgttgttgggggctgtcgctctcggtgacagcttcctcgacatgctacccaaagcatggtttatttatttgttcattggtgttggtgctactgttttcctcgtgtctctgtttggctgcattggagcagggacaagaaacacctgctgtttgtgtttctatgccttcttggtcatattgttgatccttgctgaagctggagctgctgcattcattttctttgaccatagctggaaagatgtaattccagtggacaagacacataactttgatgttatgtatggctttctgaagaaaaactgggagattgcaagatgggttgctcttggcgttgttgtttttgaggcagtgctctttctattagctctggttgtcagggcaatgaacaaacctgcggagtatgacagtgatgatgaaattattgcaattggccgaagccctaccatgcggcagccattgatccatgcccaaaatgtgccggccaccggtgttcctgtcccaacactcgatcagcgttcaagtagaaatgatgcctggagccaaaggatgcgagagaagtatggtctggacacgagccagttcacgtacaacccctcagacccaagcaggtaccagcagaatggcgctccacaggctgaagaaaggagtcgatgcactataatgtgaagaattcttcatgacgtcctacgtcataatggttttcttgaacgggctacctcagcttgtgtagtttggtgttgttcagacttcatagctgtgtgtgtggaatacaaaaatcccgaccatattgtttgtcacgcttgatgtcttctctgcaaatgttctatgcacttgtaattttaccgtgaatgacgaactgttagccattgacatc

SEQ ID NO: 2635 - DNA, 1004 bp, Zea mays
  Clone ID: 700219926_FLI
cggagaacgaccccacggtgacgacatgcttgctctgctggactgttactctgagtaagactgctgcttctgctgagcagccgaagagggcccctaagctcaatgaaaggatcctctcttctctgtccaggaggtccgtagctgctcatccatggcatgatcttgagatcggtcctgatgctcctgctgttttcaatgttgttgttgagatcacaaagggaagcaaagttaaatatgagcttgacaagaaaactggactgattaaggttgatcgagtcctgtactcatcagttgtataccctcacaattatggtttcgttccaaggactctttgtgaagacaatgacccaatggatgtgttagtcctgatgcaggagcctgttgttcctggttcgttcctgcgagcaagagcaatcggccttatgcccatgattgaccagggtgaaaaggatgacaagataatagcagtctgtgctgatgatcctgaatatcgtcactacaacgacatcagtgagctgtctcctcatcgcctgcaagagatcaagcggttctttgaagattataagaagaatgagaataaagaggttgctgtcgatgcattcttgcctgcgaccacagctcgagaggccattcagtactccatggatctgtatgcgcagtatattttgcaaagcttgaggcagtagattggaagcaactatttatctgggcgtcttggaatgagtgtgattttaataagtcaaaacacttgatattgtgtgcaaatcttggggttgagaacaatgtcactagctgtgatttacttctgtgacttgcattttttttcttgttaaattatgaataagcgaagtccatacgtctactgtgtggcttcttgctgggttcatcgtctacccatgttcctcaagcttgggaacatggggcttttccccatttccgtgtcttccatgcgaagtaaaatttatttgtatacaatcgtattaatctgttcatgtgagtttttt

SEQ ID NO: 2636 - DNA, 1389 bp, Zea mays
  Clone ID: 700219955_FLI
attggttattcagacttgctggaagctcgtggtctatcactttcgtcagttctgatgaagcaactcagaccctctgttgagcaagcattagattccaatttgaggagaattgaagagagtactgctgctttagctgcagctgatgactggatactcacctatcctccaactggtatacgtccactggctagatcatctggtaatctggcactccagccgaagctctcaagcagtgctcaccgtttcaattcaatggttcaggatttctttgaggatgttggaccactggttagcttacagctaggtggttccgcgatggatgggcttctgaaaatattcaactcgtatgtaaacttgctgataagtgctctaccagggtcagtggatgatgaagttaacttggaaggtttggggaataagattgttagaatggcagagacagaggaccagcagttagctttgttagctaatgcatctttactagctgaagagttgctaccgagagcagcgatgaagctgtactctatgaacccggtcagcaaagatagcttgcgtagaagaggtcctgaaaaccaaaatcgtgcggcagagcagcgggcatggaaaaggaagctgaaccgcatggtagagaaacttagagatagtttctgcagacagcatgctctagatcttatattcacagaagaaggtgacacccgtctgagcgcagagatgtacatcgatatggataatactgttgaagatcccgaatgggttccatctgcgattttccaggaattgtatgcgaaattgaataagatggcaagcgttgcggcagacatgtttgttggtagggaaaggtttgccacgctgcttatgatgagacttacggaggcagtcatgctttggctctcagacgaccagagcttttgggaagaggttgaagaaggaccaagggctctgggtccggttggacttcagcagttctacctcgatatgcaatttgtgatccttttcgggcaaggtcgtttcttatctcggcatgtgcatcaagtcatattggacatcattgatagagcgatgagagcgttttctgccacggggatggaccctgataggatccttccaagcgacgactggttcatcgacgttgcccaggagagtattagtaggatcggcggcgggagggcacgagtcgccaatggggacagggaggtgaacagccccacagcctccgtgtcagcacagtccgtgtcgtcagttagatctctcggcagctcctagcgtgcaaagtttctgtatcaatattactgtagggatttgtttggatgtgtttgtgctggtacatatgtgtgagtaattaattgtatgcctaggccaagaaaatccttgaagctggtcttgttcacc

SEQ ID NO: 2637 - DNA, 619 bp, Zea mays
  Clone ID: 700219964_FLI
gcctggtaataagccaagcccgctctaggtgactgttgttgggcgatccgattaggcggcgaggcaggcagatctccatcaccgtccgctccgacgagtcggcgcggacggtgatggagatctgcctgcgctgcctggccaaggaggcggagcagcggccgtcggtggaggacgtgctgtggaacctgcagttcgcggcgcaggtgcaggacgactggcgcggggactcgcggagcagcgccagcgaggagtcgccgctgtcgccgtcgcagatcccgccgcggagggacagggagaccagcgcctggtaataagccaagcccgctctaggtgactgttgttgggcgatccgattaggcggcgaggcaggcatgcatcaagtgagatttcgttggtaaacaagtgtacagcagctgcaggctgcagctgaagctggaaacccaccacaggatgtgtacagctctttgcttcggcctactagtactagcactgctttattttatttttttcaatgcgtctttgccacctcattgattcacctactatatggatcgtttgactatgtgtaagcacaactgtatttggcgtcaatcttaccagaggtctcagttgtaggacc

SEQ ID NO: 2638 - DNA, 749 bp, Zea mays
  Clone ID: 700219978_FLI
ccacccggccatgcccaggctcccacccgccaggccgccacccaccccactcggccactcccccaggcggcgaggcgtggcgcccatgccccaacccctgttcgcaggtcgcagcagccgccagcacccagatcccagagtcccagaccatgccgccactgcgccttcttattttgtccgccgaacaagccagtagtggctacatcgcgaagggcggcaaggcagatctagggcgatcatggcttacgtcgagagaggtgttggaaggtcttgtttatctgcatgaacaaggtgtcattcatagagatatcaagggcgcaaatatactgagtaccaaagagggaatgtaccatgaatcacatgaatttggtggtcatatgttcaacaccctcctagagggtgttctcgacaaagaaagcttgtaccttaaaacaggaggatacaagaagctgaagtggttgtctgaaggcttttgaactgcttgaagcattagtgtagctttggtgcttttgtgactgatcaactctggagcagctagagtgatgtagttgtgggcttttgaacaatagctggagtgatatgaaacattagtgatgtagttgtgggcttttgaactgcttcaagctggagtgatgtcactgtggtgcttttgtgattgatcatctctggagcttttgtgaatgatctagctagctatctgtaaatgatctagttgtgaatgatattataattgtgatgcttttgtgaat

SEQ ID NO: 2639 - DNA, 1793 bp, Zea mays
  Clone ID: 700220017_FLI
atcgacgagtgcacaaaagctagggagagagagagagagatagaggagggcaagcaataagtgccctgcacgtccttgctttgtgtgtgagacagtgagagagagagagggagggagggatcagagggaggagaatatggataggggagtcgtccacaaatcatcggcggctctagtgcgcgagatgggggaggcaggccatagccatggatggtggagcatgaataatttgctgaggcccccctttgagcagcagcaccacgcttctcttttcatgccgtccacaaccaccagcagcagcaccgccgccgccgcgccctcttcttcttcgtcgtcgccgcctctccaatccttctcctctctgctgctctcgaaccactacccgctgcctaccaccaccagcacgtcgccgtggcagaacgacagcagcagcaccagcagccatggccagccggattcatggagccagctcatacatactggcagcaaggaaagccagatggcgtttccaactacgatttgttcggaatccggaggcggcggcagctacgtcgtctacggtgccgcagcggctagccatgggagcagcacaagtgatgtcgagatccagttgccatggggaagcagcagcgtgctccagcagcagcagcagaaagcgtcctctcctaggtcttcttccagaaccacagcgacgacgacctctcccggaagcaacatgctggagttctccaacaacagtagcagttcaccacgtgagtgcatcagtacagtatctggatcagctttcaagaaggctaggacccaagaaccctccccggctcaatctactgtgaaggtgaggaaggagaagctaggggatcgaataactgctctccaccagcttgtctccccgtttggaaagactgacacagcgtctgtactccttgaagccattgggtacatcagattcctccatagtcaaattgaggctctgagctccccgtacgtgggcggcagcaatggaggtgggggcggctccaagcagaatcagcagctccacgaggctagtgcgcagagagaaagcaggcacagcatatttccagaagaccctggccagctcctgcatgacagcagcgcaataaataaacgggccggactgcagcctgctgatggtgagcaggatgaagaaagctgtgatgaagagaagaagaaggatctgagaagcaggggcctgtgcctcgtcccggtgagctgcacgctggacgtgggtgtggacgtggccgctggccccgcagactactgggcggcagctgcgccggctttcggcatggggttcggtgcgtagatgatgctggccaggacgtacgatcgatgctgtgaggaacacttgtgtgtgtctgtgtgcgccatatgcatgtatgggctgcacctgcatgcatagcatcaggagcagccatcctggtggaagcaggagaatgctcaagaaggctggctcctcttgatgctatatatgcgtatggtatatgtatcgtgcacacaccgacaatgcatgcatgggcatatatagctacagagacgctgagagtaatataacttgcgtttgtgtgtttgtgtgtacgtgatgagatcttgtctagctagctagagcgagagatcaaacaatttgggtgccatggagaggggcgctagctgcagatatttaattgttaaggctaggagtactgcgcgcggatctgtaagcaactcttttaagtcttcgtcattgaggcgtcactgtgtgctatatatatatatgcatggccgaaatgtgtaat

SEQ ID NO: 2640 - DNA, 833 bp, Zea mays
  Clone ID: 700220033_FLI
ccgaatcaggggaccgttgattaccccagcttcaagctcgtcatcgtcggcgatggtggaactggtaaaactacatttgtgaagaggcatctcactggagagtttgagaagaaatatgaaccaaccattggtgtggaagttcatccgttggatttcaccactaactgtggtaagatcaggttctactgctgggataccgcagggcaagagaagtttggtggcctcagggatggatactatatccatggccagtgtgcgatcatcatgtttgatgtaacttcaaggcttacttacaagaatgttcctacgtggcatagggacctgtgcagggtctgtgaaaacatccccattgtcctctgcggtaataaggttgatgtgaagaacaggcaggtcaaagccaagcaggttactttccacaggaagaagaatctgcagtactatgaaatttctgccaagagcaactacaactttgagaaacctttcctgtaccttgcaaggaagctggctggtgatccgaaccttcactttgttgaagctgttgctcttaagcctccggaagttaccatcgacatggctatgcagcagcagcatgaagctgagcttgctgcagcagctgcacaacctcttcctgatgacgatgatgatctgattgagtagaaaggatcatgagtcttgaacttgagcaggagttgtgccttgcgtgttttaagttgttctagggtgaactcttgagttctcattgtctggatcatctttttctccttggatgtgttgcatcttttgagtgtggaaatggatggtactcctcgccatgaatttgctggctactttat

SEQ ID NO: 2641 - DNA, 1499 bp, Zea mays
  Clone ID: 700220078_FLI
cagcagagaaaggccggcctacccactctctctctctctctctccagtctccaccggcagcgctaatcgtaatagccatgggctccaccgccggcgacgtggccgcggtggtggacgaggaggcgtgcatgtacgcgatgcagctggcgtcgtcgtccatcctgcccatgacgctgaagaacgccatcgagctgggcctgctggaggtgctgcagaaggaggccggcggcggcaaggcggcgctggcgcccgaggaggtggtggcgcggatgcccgcggcgcccggcgaccccgccgccgcggcgcgccatggtggaccgcatgctccgcctgctcgcctcctacgacgtcgtccggtgccagatggaggaccgggacggccggtacgagcgccgctactccgccgcgcccgtctgcaagtggctcacccccaacgaggacggcgtgtccatggccgccctcgcgctcatgaaccaggacaaggtcctcatggagagctggtactatctcaaggacgcggtgctggacggcggcatcccgttcaacaaggcgtacgggatgacggcgttcgagtaccacggcacggactcgcgcttcaaccgcgtgttcaacgagggcatgaagaaccactcggtgatcatcaccaagaagctgctggacttctacacgggcttcgagggcgtgtcgacgctggtggacgtgggcggcggcgtgggcgccacgctgcacgccatcacgtcccgccacccgcacatctccggggtcaacttcgacctgccgcacgtcatctccgaggcgccgccgttccccggcgtgcgccacgtgggcggggacatgttcgcgtccgtgcccgccggcgacgccatcctcatgaagtggatcctccacgactggagcgacgcgcactgcgccacgctgctcaagaactgctacgacgcgctgccggaaaatggcaaggtcatcgtcgtcgagtgcgtgctgccggtcaacacggaggccacccccaaggcgcagggcgtcttccacgtcgacatgatcatgctcgcgcacaaccccggcggcaaggagcggtacgagcgcgagttccgcgagctcgcaaagggcgccggcttctccgggttcaaggccacctacatctacgccaacgcctgggccatcgagttcatcaagtgaaccaccgtcgccgcgatgagatggcatggctgccacatgctttgcttgcttggtcctcgtatcgtacgtcgccgtcgtcgtcttcttctggttattgcgctgctacctcgctgctctcgcgtatgcatgtacttttgcttaattttctttcttcatatcatgcactctggctggcctagactgcccccgatccatggtggccggtacgtcttgtcgagctcttgcatgtcgtggattctaaattcttcttctgcgtcgaattgtctctgccatgtgcgagtaataacaatcaaggttatacttacgatacaattacatggcggttt

SEQ ID NO: 2642 - DNA, 458 bp, Zea mays
  Clone ID: 700220117_FLI
tggactcaagatgagtatctggctgatgttgtaagcgcatcaaccagcagcagcaaggacgatagtattctttctctagctcccccaggtcagactaatcagcacgcaccattggtggactgcattaggacacggtggccacgagctgtttgtagctgggttggagatgttccaagcattgtctgacacagtggatgtcgtgtgcgcactagtcgctctagctatgttgctcgtaacctcgttctgaagaatctgctcagagcaagccacttggagcttcctgattgttcatgccctgcaaaaaggaatcgcccaattacatggtttgtttcggttaaaatgagtgatgttttaatgcgtgttattaatcaagggcctggatattctttttttttttttttgcttttattgacattagatgtacacttgatttatggatatgttttgtgtcttgggtt

SEQ ID NO: 2643 - DNA, 1944 bp, Zea mays
  Clone ID: 700220141_FLI
caattctgatattggtggtaataagcatgatttaacagatggtacagaggaactattttggggttcacctatcacagtgcaaaatgagattttaccctccaaaagttttccagaggaacatgacgctgacaaagctgaatcgcagtttagttctctatcatctgatcctcatagcatggcaagccagcgtgcatggaaacaacctactcaaggtctcaggcttaagtcactgctagaaatccaagctgaggaacaactgcgtgcacagaaaggattaactactgaaactgctaagccagcagcttcagttccttcaatttcttggaatggcatttcaatatcttccgagcaacattatgggggttcaaatatatcattgggaagtatggaaagtgctgttgagagaaataaaagaagccagttgcatgatttgctggcagaagaagttctggcgaggtcaagcattgcagataatgagaataatgccaatgatgcatttttctctcctctgtcgcctgctgctgttcaggctgatgctcctgcccttgatgataatgacttcattgaggccaaggacaaaaagaacaaaaagaggtcagcaaaaacaaaagcttctactgtgaaggctccatcacctgttgtttcctttgatccaccagctatttcgatgccttctgaaaagggaaagtctgccaagcaagcacaacaggagttagaaatattgccagctccaccaagtggtccatcgtttggagattttgttctttggaagggtgatcagactagctctgtgcctgctccagcatggtctaatgactcagcaaaggtacagaaacctttgtctttgagagatattcagagagaacaagaaaggagaaccgtatctatccagcaacaagcaccctcaccaactccagcaaaggtggccccgaaccaaagaagtcatgtgaatgcttcttcctggcaagcttctggaccacctccatcacaggcagttgcccctgtccaaatgagttccaatgctcccagtcattccaggtcaagtgctgaagatgatttgttttggggcccttctgagcactccaaacaagatacaaagcagtctgagtttccaagtctgttgagccaaagcagaagttccatgatgaaggatcattctgcactgaatcgtcaaaagtctcaggcaggcagattaccagttccttctgctgctactgcaaaccaatctggcaaagggaaagcagaggctacaaacaagcagactgaggcaatggacttcagagattggttggagagtgaatgggccaagcttactggaacaaatgatgtaagcttccttgagttctgcataaagcaatcaactaccgaagcggaaatactcctccatgagaacattggttcccttgaccgcaaccacgagttcatcgacaagttcctcaactacaaggccttcctgtcagcagatgtgatccacatggccttccaagctcccagcagccgtggtgacggtgcagggcgggcaaaccctgctgctgcagctagaggaggcacggtcatagacgcggatctggatggcggcgggaagaaaaaggggaagaaggggaagaaggtgagtgccgcagtgttggggttcaacgtggccagcaaccgtataatgatgggcgagatccagaacgtggattaggaggatggcggcacaccaccgtgtatataacatagtttggcctttggttacatgccaccgaagtctcagggctcgagggaagctgggggtgctcggaatggcggtctggtctacctgtttttgccgagggtgggaaactgagcttagatgcagggtcttgtgctggtgattttgggttcctgtaacaattggttaggatcctgtaacggacagaaatattttcttctcaatagaaactcaccagatggattcagttcagt

SEQ ID NO: 2644 - DNA, 1801 bp, Zea mays
  Clone ID: 700220177_FLI
gaaagatataccaacgtgcctttggaggacagagcttagattttggcaaaggtggacaagcctaccgttgtgcctgtgctgctgacagaacaggacatgctatgctacacacgttatatggtcaagcaatgaagcacaatactcaattttttgtggaatactttgcattggaccttctcatggacaatgaaggaaagtgtcaaggaatcattgccttaaacatggaagatggaactcttcaccgtttccgtgcttctaatacaattctagccacaggaggttatggcagggcatatttctcagcaacctcagcacacacttgtactggagatggcaatgctatggttgcacgtgctggtttacctcttcaggatcttgagtttgtacaattccatcctacaggcatttatggtgctggatgcctgattactgaaggttctcgtggtgaaggtggtatccttagaaatagtgaaggtgaacggttcatggaacgatatgctcctactgcaaaagatcttgcttctcgtgatgttgtttcaagatcaatgacaatggaaattagagaaggacgtggtgtagggccattgaaggatcacatttatttgcatctgaaccatctgccgcctgaggttctcaaagaaaggctccctggtatttctgaaactgctgctatttttgctggtgttgacgtcaccaaggagcccattccagttttgcctactgtgcactacaatatgggtggtatcccaacgaactaccatggggaggtagtggatatcaagggtgataatccagatgctgttatccctggtctaatggctgctggtgaagcagcctgtgcatctgtccatggtgcaaataggctaggcgcaaattcacttcttgacatagttgtttttggcagagcttgtgcaaacagggtagcagatatttctaaaccaggtgagaagcagaaacctctggaaaaagatgctggagagaagaccatagcctggttggacaagctgaggaatgcgaatgggtcattgccaacttccaagatccgtctcaacatgcaacgtgttatgcaaaataatgctgctgtgttccgtacacaagaaacacttgaagaaggttgtgaactgattagcaaaacatgggaaagtttccatgatgtgaagctcagtgaccggagtctcatttggaactctgacttgatagagaccctggagctggaaaatcttttgataaacgcatgcataactatgtattcggcagaggctcggaaggaaagcagaggagctcatgctcgtgaagatttcacgacaagagatgacgagaagtggatgaaacactccctgggatactgggagaacgagaaggttcgattggcatacaggccagtgcacatgaaaacattggacgatgaagtagagtcattcccgccaaaagcacgtgtctattgatcgattcaagcctaacacctcgggaattccgtgtaaggtgttaataaagcagatgggcgttcctggctgagaacatgacctggagttgtgtccctcattttctgtgtttctgtattctgcctagtttgctagaaataaaagggtaagatagaacacatgctaatccctggctgatgtttgtgtacatgaaattttgcatgggttgttatctgttaatgctctgcctggttcattaacccatgattcatgaatattttggtgattcatggcatggtgcgacgttgtcaaacaacgtagatttgtacgcctgttccttggatatagtataatatatatgtacacatgtgttggagcag

SEQ ID NO: 2645 - DNA, 2555 bp, Zea mays
  Clone ID: 700220180_FLI
gcggcgtgtcgcagatgtgcattgcagatgttcgttcaccagcgaacctgcagctgccgaatctacagagaccataggtgagcaacgacgtagggaaatagggctggcgggggcacgtgggtaacttggtcctggagcattggagaaggagcataccacaaggaaaccaacacggtcagtcaaaaccaaatctagataatcatcatgctacttctatgttttatgtctgtttttgtctgctatgaagtgttcatgcaagtgttatcaagtgttcatccatgccaagatggttactaagcgaacacacgcaacatgagtggtctccatctgatcttgcttcattttgatttattatctctgaggagtgtgtgagttttaatggctttgacggagaaggctattaattggccccttttttggagtgactgtagcaaccacttctaattcattttctaccgcgacaactggcgttgcaaggaatttatttcactagtatgcaacagatggccatgccatcgttcgccataacctcacctccgtcgcatggcactaccttatgggcgcctcatgcttgtcgtcctcaaagactgcacaagagacacgtgcgcagccaagtccgggcagtggcacaagcacagctgcagtaccagaagctaggggactcagacctcctcatcagtgaggtcactcttggaacgatgacttttggcgagcaaaacacggagaaggaagcacatgacattatcgcttattctttcgatcaagtacccagttccaatgaacaaggaaactcaagggagaactgatctttatattggcaggtggatgcaatcaaaaccacgagacaaggtggagctgctatttatggagaggagcgttgatagccattgtcctgggatggtagtccgcatggctgaacgagcactctgccatcaataaactcattagcaaggtggtttggagagcctgtaagggctgctattctgcaaaccgaggcttttcttacaaatgcaaaaggatatccttgtttatcaaagcgccatcagagtctgctaactggattttttaaacattctgttcaggtgataatatatggaagatcaaatcacaatgttttcccagtatctgaatgagtgctctcaggtgatgagagctacgcagaagattcccgtgttcgacatgcattaactccttaccttgaatacattgcgtacctatatcagaagatggatccgcttcctgagcaggaacgcattgagattaattacagggactttttgcagtctcctctgcagcctctaatggacaatttggaagctcaaacttatgagacatttgagaaggatgttgtgaagtacactcaggacagccggagaattttcaaagtaaaatgttcggtgaacaggatgcagaaaaagttaaaagctgcaacgataaggcaaaaaaaatgttcccaaaggtgccctcaaagatcagcttcaacatagttctgagccaattactgaaaacaatgatgatatcacgcaattgttgtttgccgtcattgtaggttcttcctttccatgcttgaagattctaatccagacaggtgcaaacccaaatatgagagctggtggagcaaccccattacatgttgccgtagggagcgcaagtattgaagtaatcagactcctactagaagctggagctgaccctaacacctgcagtgatgatggactaaagccaatacaggttgctgctttgagaaataaccgtgaagttgtggaacttcttttagcattaactatcccatttctaagtgtgtcaaattagagttttgatggaatcacagaatacatgttgtctaaagctgctgtgggagagtcacaagtaaatgaagttacatctctaaattcagccagtttagccggaccacaatctgctggggtgtcatatagcgcaaaaaagagattcgatggaagctaatttgagaggtcatgatgcctataaaaatgaaaattacattggagcggtggatgcttacacacaggccattgacttggattctagcaatgccacactctggtcaaacagaagtctttgctggttgctgcttgggatggctgaaactgccttggaggatgcaaagcaatctcgaacattgagacaagattcagtgatagcttgctacagggaagggatgctgttgaggagggaatgaagtcgcaagccaaacctaaccagtcttccaccgcagccaggagtcttttcgacccaaatttgatgtgatgatgatgtgacaaatgattgagtgttttgcaccagaatccaaaacagttgcaacacaatttgttttttagggaaagtgctaaactgtaatttgataaattgtgatgttttgccacgtttgatgatataggtctggggcttcacgaccagtaggttaagcgcataggatagatgcactgtttggtgctggtttatcatatctactaatagcgaaatatctctgcaccatgagctctcgaacctggttccaaaatcaggacctttggatggatcttgagcttgatctc

SEQ ID NO: 2646 - DNA, 719 bp, Zea mays
  Clone ID: 700220203_FLI
gcgccgcgtcgccgccgaacatcagcatcggatcgatggagggctgggacaaggggaccaagagcacggtgggcgagatcccgctgctgtcgacgcgcgcgggtccgcgggacggcgaggcgtggcggcagaggctcaaggaggagtaccgcgcgctcatcgcctacacgtcggtgaacaaggccaaggacaacgactggttccgcatcgccgccgccaacccggagggaacccgctgggaggggacctgctggtacgtccacaacctccgccgctatgagttccctctccagttcgacatgcccgtcgcctacccccaggtcgcccccgagatcgagctccccaccctcgacggcaagactcacaagatgtaccgcggtgggaagatctgcctcaccgtgcacttcaagccgctgtgggccaagaactgcccgaggttcggcctggcgcacgcgctgtgcctcggcctcgcgccgtggctcgcggcggaagtcccgattctggtcgactcgggcatggtgaagcacaaggatgacgaggcagctccggctgaggcatctgcctctgctgctcctccttcgtagttgccacttgcaacaactgagtgtccggtgagctaaggggatatcggaaatcaactcggcggtgaaccgtgaaccgccaaataagagagatacctgcaaatctaaacatcatgtgaaacatgttccatacctgct

SEQ ID NO: 2647 - DNA, 1260 bp, Zea mays
  Clone ID: 700220213_FLI
ccctctcccgctcccgtccgagagatcccagttgtggccgcttccgcccaagagcaacccctggaggccgccaaggacgacggtggctacgaggtcgtggagctcgacgccgccgagctgctagcggagcacgtccacttctgcgagatctgcggcaagggcttccgccgcgacgccaacctcaggatgcacatgcgcgcccacggcgaccgcttcaagaccctagacgcgctctcccgccctggtcacggccagccgaagccgcccgttggcagcaacgtgcgcttctcctgcccctttgcgggctgcaacaggaaccgcacacaccgccgcttccggccgctcaagtcggcggtgtgcgcgcggaaccacttccggcgcagccactgccccaagctctacgcctgcgagcgatgtggcggcaagaagcgcttcgctgtcctggcggacctccgcagccacctccgccactgcggcgaggaggcacagtggcgctgctcctgcggcaccaccttctcccgcaaggacaagctcttcggtcatctagcgctctttgaaggccacacgccagcagttactaagccaaacaaggatgtggtgacagggcctacagagtccaccattgatgctatggaggaagggggatttgaagaaggcattcctgaccgggaggaggatgaagagggcggttatgatccagagttcttcaaggagtggatggatgagctcagaggtggtgctggtggctccaattggcctggaccagcagcagatggacattagcaatgttgcgagggttaataggaattattcggcaagccaaccaacctagttgtgatgttatgaatatgtcagcttgattgtctagcaagtcatcctcatacaaaaagtgtaagattcaggtgataaatattataattagtcctattgtggaagaatgtaaacaacaaatgagtctatgactattatcaagagagcagagctagtgctagaggatcccacatgagtggggttgagaggagggataaaccaaggcaagcctccccccaatgtggagagactgcttcgatcccgcgacctggtaactcagtgaagcagctctcaccagtcaccactacatcaggcctgctcctcaagagatgaaacttttttgttaaacttttgccaagaactctgactagaatgaacagcatgtagcttgaattcaatggtggctgcacttataagtgagtttcataaagtaatatttagtaggtttta

SEQ ID NO: 2648 - DNA, 1034 bp, Zea mays; identical to SEQ ID NO: 2625
  Clone ID: 700220258_FLI

SEQ ID NO: 2649 - DNA, 2091 bp, Zea mays
  Clone ID: 700220262_FLI
ctataggctatagccatcaccacactcgcctccctctctccctcccacactccaccacccgcgccgccgcctcctactccgccccggcccctctgatccggaccgagcgccggccatggcgctcgccttcgacgagttcgggcgccccttcatcatcctgcgggagcaggagaagaagacgcgccttagggggctcgacgcgcagaaggccaacatcgcctcggccaaggccgtcgcgcggatcctccgcacgtcgcttggacccaagggcatggacaagatgctccagtcccccgacggcgacgtcatcatcacaaatgatggagcgaccatcctggagcagatggatgttgacaaccagatagcaaagctgatggtggagctgtcccgtagtcaagactatgaaatcggggatggtaccaccggggtggtagtcatggcaggggctcttctcgagcaggccgagaagcttctggagcgtggtattcaccccattagggtggctgaaggctatgagatggcgtcaaaggtagcttttgaccacctagaacatatctctgaaaagtttgagttcagtgcagacaacattgaacccctggtccagacctgcatgacaactctatcctcaaagattgttaaccgttgcaagcgggcgttggcagagattgctgtcaaagcagtacttgcggttgcagatttggagaggaaggatgttaacttggatctaattaaagtagaaggcaaggttggtgggaagctggaggacactgaacttgtatatggaattattgttgacaaagatatgagccatccacaaatgccaaagagaattgaggatgctaagattgccatcttgacatgcccatttgagcctccgaagccaaagacaaagcataaggttgacattgacactgttgagaaattccagacactgcgtgagcaagagcagaaatactttgatgaaatggttcagaagtgcaaggatgctggtgcaaccctggttatttgccagtggggttttgatgatgaagccaatcatttattgatgcacagaaatctgccagcagttagatgggttggtggtgttgaattggaattgattgccattgctacaggagggcggattgttccgagattccaagagttgagtcctgaaaagcttggaaaggctggattagtcagagagaaatcattcggaacaacaaaggaccggatgctttacattgagaagtgtgccaattctagagctgtaaccattttcatccgtggtggaaacaaaatgatgattgaggagaccaagcgcagtcttcatgatgctctttgcgtggcaaggaatctgatccggaataactcaattgtgtacggtggcggctcagccgagatatcttgctcaattgctgttgaaactgctgcagataggcacccgggagttgagcagtatgctatcaggtcattcgctgatgcattagatgctgttccactagcgttggccgaaaacagtggtttgtcaccaattgataccttaactgcggtaaaagctcaacaagtcaaggagagcaacccccactgcggcatagactgcaacgacgttggcaccaccgacatgaaagaacagaacgtcttcgagaccctgattggcaagcagcaacagatcttgcttgccacccaggtggtgaagatgatcctgaagatcgacgacgtcatctcaccgtccgagtactgatggaaagaaggaacgggatggctatgctggatatgcgtaggcggcattgctgatgtgttgattggtgtacctccttatccaggcttgctgcctaccactcactccctgtgtgacgttttgccgaaattggtttgtattgtgcacgataatatctggaaatagactctagacagtccttagttatctttttattataaaaaaagtcagtgccttctcgtcagggttgagatggttgcagtattgatgcttttgtagtgtttttatagctcagcttaagctgtcatttttgtttgatgatttgcaatagttggacgccctcatgaacaaaatgcaatggttcatcttttggttcacatggacaaaatgtt

SEQ ID NO: 2650 - DNA, 1347 bp, Zea mays
  Clone ID: 700220335_FLI
gttatcccgagctaccatattcaagcctcagcatccgtaccgccgatgtgtgaatgatgtatataaggactttcctactactgctttaacacttttggaccatctacttgccgtagaacctgggaataggggtaccgctgcatctgcccttgacagtgaattttttacaacaaagccatatgcctgcgatccatcaagtctacccaagtatcccccaagcaaggaatatgatgctaagcttcgagatgaagaagctaggaggcaaagagcagctgctaaaggacaggaagctgaagctggacggaggaagcaacctcctgcacctgatggtaatagtggattgcagcaccgccgagttcagatgaatcctaaaagcagcagttacaagttcactccaaaggaggatgctgtttctggatttccaattgatccgccagcaagagctgctgcagacaatggttaccctcagcgcgttcctctgatgcaagctggccgttcttcctccactctgggtagatcaagtgggatggatccaaaggcccaaagattccacacctcccaaattgtcactactgagatgtccggccaatctactgcatctgggcagcgaggcaatgctcctaagatgtctaacctcggggaaagtgccaggagacaatatcttcgagagcatcggtccagttcaagatacagtcaactcactgctgcggacccttctgacaggcctgaatggaaccatcaattccaagagcggccatcgtcttcccatcggaaggatgatgctgtggcaaacaaggagcatacggtggtgaacgggacaaagaagaacagaatccactattcggggccattgatgcctcctggagtgaacatggatgagattcttagagagcacgagcgacagatccaacaagcagtgcgaagagcgcgccttgacaagggaaagggaaagcacagcggtgagagagaccagtcggagtcactgctgtgtaccaccgggaatctcagggctgatcgctaagttcagtttgagcagtcatcagaagcaaagaaaacagcatcgaatcccttatattttttcggttcccccgccccaccccaacccccaagcggagaggtttttgttctgccagaaactcaaactcctgatgcggtttggtacccaggaggtgggcagctgccaaaagaaaacctgttcctgtagagatttaccgccccagagtctagcatatgcggtctgaaatattttttccctgaagatttgttggttatccatagtcctcaattgtatatctcaaaagtactcacccccaaaaatgaaaaattgatccatacactcgtttttgc

SEQ ID NO: 2651 - DNA, 1374 bp, Zea mays
  Clone ID: 700220357_FLI
gttgcaatcactcaagaaaattctctgttggataacactgccagaatagagggatggttagctcggtttcctatgtttgactgggttggtggtaggacttcagaaatgtcagctgttggtttacttccagctgcattgcagggtattgatatcaaggaaatgctagttggtgcagctttaatggatgaggaaacccggaacactgtggtatcacattattaataacacggacaacttgcagtgatggcatgattatctatattgtgtcatgtcaaacatgtttatctttttattaacaggttaaagcaaatccagcagcattgcttgcattatgttggtattgggcatcggaagggataggcaaaaaggatatggttgtgcttccttataaggatagtttgttacttttgagtagatatttgcaacaacttgtcatggaatctcttggaaaagaattcgacctggatggcaaccgtgttaatcaagggctaactgtatatggtaacaaaggaagcactgaccagcatgcttacattcagcagctgagagaaggtgtacacaacttctttgttacgtttattgaggtcttgcgtgacaggcctgctggtcatgattgggagcttgaacctggagtcacgtgtggtgactatttgtttgggatgttgcagggaacccgttctgctctttatgcaaatgaccgggagtctatctctgttactgtgcaagaggtaactcctagagctgttggagcactgattgcactttatgaacgtgctgtggggatttatgcttctttggtaaatatcaatgcctatcatcagcctggtatgcttctcatgacatagtaatgtagctctataattaagctatttgctatgtgcaattatgtgtgggctatgtaatttacaggtgttgaggctgggaaaaaggcagcaggagaagtattggcccttcagaaaagggttctgactgtattaaaggaggccatctgcgagaaccctactgagccattgactctagatgaaattgcagatcgctgccattgccctgaagatattgagatgatctacaaaataatccagcacatggctgctaacgacagagcacttatagcagaaggcagctgcggctctcctcgcagtgttaaggtgtacctcggtgaatgcagtgtggacgaagatatgcaggccgcatagattctgtgtctggatccgtgtaacattgttggaataaatcagaagcaacacaatagcgatgctatgcatgggtgtcgctgatgctgatgtctcattagtttcttgtttggtggtgcttgcacacgattgccggaacgatgtaattttagaatttgatttttttggccccttaaaatat

SEQ ID NO: 2652 - DNA, 2131 bp, Zea mays
  Clone ID: 700220375_FLI
ctcaaaacgccaaaaatttccccacctctagacgccctttcccctccccccgagatcccatccatggccacctcccgcccccggatctggcgctgagcccgccattgccggatccctgccaggcctccaccccgccgtcgcgctcccggcccggttctattgggcgcggcgtggcattccctctcttctttgtgcgctcaccggggggtggtggttgatctgtactggcggatgcagcgcgccttgcgatctctagctgttgctgcgggaggaccggccgcctcgtcgccgttgccaagcgcgctcttttaaagcccgaagattcgccccctccgcgtgttcgtgtcgccgagaggaggtcggacttgtcggaatggtcgtctaattggggagatttgatgtgttattggtgccgccggatctcgccgacatgtggaagcaatttatcggaaagctatcgtggaagtcaatgaaatccagctctggcagcggggggtcgccgccggcgccactatcgtcgccgcgggataatggagcctcaccgcgggagaatggggccacggggaagcctaacgtctcgcctcggtctcccgcggctggcgccggagccggagccgaggtgaggtccagggaggacgcctttgtccagaaagttaacatttgctgcgcggtgtacgacttctccgaccgaggcaaggactcgccggagaaggagcggaagcggcaaatgctcatgtccctcgtcgactgcattggcgccgccgaggagccgctcacggagacgatgatagcagcgtgcgtgcgcatgttcgctgctaacctgttcagggtcttcccgcccaaagtccggtctggcacctcggcttcggagaccgaggaggacgagccgtttttcgatccgtcctggtaccacctgcaagtcgtttacgagtttctccttaggtttgtgacctcaccactcgtggatgctaaggtggctaggaagtatgtggatagccctttcgtctccaagctgctcgatctgtttgattcggatgacccgagagaaagggactgcttgaagacaatattgcataggatatatggcaagttcatgggaaaccgaccgttcatccgtaaggctgtgagcaacatcttctataggtttgtgttcgagacggatcaccacaatgggattgccgaactattggaggtctttggcagtgtgataagtgggtttgcaaagccattgaaggaggaacataagttgttcttatggaaagcattgataccacttcataagccaaaatcaatgggagtgtatctgccacagctgacatattgcatcacacaatttattgacaaggaaccaaagcttgctgggactgtgatcaggggcctgttaaagtattggccagttacaaatagtcaaaaggaaatgatgtttttgggggagttggaggaggtgctggagttgactgacatggctgaatttcagaagtgcatggtccccttattccggaagattgctagttgcctgaatagctctcattttcaggttgcagagagagccttgttcctatggaacaacgagcacctattcgacatgatctcccaaaaccgccaagtaatcctaccaatcatatacccagctctggagaggaacacccgctggcactggaaccagtcggtcctcaacgtaacgatgaacgtgcggaaaatgttccgcgacatggacgagaggctgcttcaagcctgccacgacaacttccaagaggaagaggagaagcgggccgtgactgaagagcggcggaggctcatgtgggagcagctggagcgaagtgccgctcgcgggtaccaccagccgccggcgatcgctgccgacgcgagcagcttccccgcgccctcttcatcggctcgtcttgtatccctcaccgtgacatgagaacacatgagaacacgaggttgcaaccagatgttgctctgttttcgccgcttggtagctaaagctagatgatggagttgcttgcttcgctgggggatgcacgcacgaaggcattttgttaccttctgtgtatgcataaccccccttgtcaaagtctgtaattaatagctgacggtttgaggacaaagggacgttttggatttttgc

SEQ ID NO: 2653 - DNA, 1771 bp, Zea mays
  Clone ID: 700220416_FLI
gcgttttgcggtgggaggggaagggaggggaggcagccgctggaacacatagggacaagtgcgtttccagcagcatacggatagagctatagatggatcacgcattcaggccctgatgcaagcgctccccccgccatttccttcaacttctgctaagtagcctaatactcccatcggccggtcggctcctctacctgcatttgcggattggcgtcttcctcgtcaccgacccgatccatcccctctctacccggggacggggggtctacaacgtcgtcaggtcgtccttatccgcgtgctggccttcggatctcggctgccgcgttggtttaacacaaaccacgcgtccatgcctgccgcttccgcaggctccatgccactgccacctgggtggcgttttctttccgggggcacatcacacatggcgtccgtccgcgtaggcacagaaggcttctcctggaggtgtgggagctgagttgggaggaggactgctgcagccatgaaggccctcattctcgtcggaggcttcggcacccgcctgcgcccgctcacgctcagcgtgcccaagccgctcgtggatttcggcaacaagcccatgatcctgcaccagatcgaggctctgaaggaagttggtgttacagaggttgtcctggccatcaattaccagcctgaggtcatgctcaactttctcaaggacttcgagagcaagcttggcatcaagatcacctgctcgcaggagacggagcccctcgggaccgcaggcccgctggcgctggcccgcgacaagctcgccgacggatccggcgaccctttcttcgtgctcaacagcgacgtgatcagcgagtacccgttcgccgagctcattgagttccacagggcccacggcggcgaggccacgatcatggtgaccaaggtcgacgagccgtccaagtacggcgtggtggtcatggaggagggcaccggcaaggtggagcggttcgtggagaagcccaaggcgttcgtgggcaacaagatcaacgccggcatctacctgctcaacccgtccgtgctcggccgcatcgagctgaagccgacgtccatcgagaaggaggtgttcccgcgcgtcgcggcggacggggccctcttcgccatggttctcccgggtttctggatggacatcgggcagccgagggactacatcacgggcctgcgcctgtacctggactcgctgcggaagaaggcgcccgccaggctcgcgtcgggcgcgcacgtcctgggcaacgtgctggtgcacgagaccgcggtcatcggggacggctgcctcatcgggcccgacgtcgcggtcgggccaggctgcgtggtggaggccggggtgcgcctgtcccgctgcaccgtcatgcgcgccgcgcgcgtcaagcagcacgcctgcgtctccagcagcatcatcggctggcactccaccgtcggcaagtgggcgcgcgtcgagaacatgaccatcctcggcgaggacgtccacgtctgcgacgagatctacagcaacggcggcgtcgtgctcccgcacaaggagatcaaatccagcatcctcaagcccgagatcgtcatgtgatccgggagtaaatctggggcgccaaatccaaatcacaaggggcccttgcattgcattgcattgcatcgcatcgcatcccatcccatcccgatatgcttcatacttttgttgtttgattttttgctcggttgtttgtctgcaagtgtaaccagttgtcgagtgtttaatttgtcggctatatagact

SEQ ID NO: 2654 - DNA, 1107 bp, Zea mays
  Clone ID: 700220425_FLI
ccaaccccggaaaggcggaaacccatcgcaactaatccccaaccccaaacctccaatccacccatcccctcctcatccactccgggcggccatggcctgctccttcgccgccgcgaccgtcgtctctttcgcccccaccccggccgccaggcccctcgccgctgccccgcagtccgtctctgtttcccgctccgcggtcgccaccgccgccaggccgctccgcctcgtcgcctccagatccgcgcgggccatcagactcgtcgcccgcgccggcggcgtcgatgacttgccgctggtcgggaacaaggcgccagacttcgaagccgaggccgtgttcgaccaagagttcatcaacgtgaagctctctgattacatcgggaagaaatacgtcgttctgttcttctaccccttggatttcacctttgtctgcccgaccgagattactgccttcagtgacagatatgaggaattcgagaagttgaacactgaggttcttggtgtctctattgacagtgtgttctcccaccttgcatgggtgcagacagacaggaagtctggtgggcttggcgatcttaaatacccacttatttctgatgtcaccaaatcaatttcaaaggccttcggtgttctgatccctgaccagggtatcgctctgagaggactgttcatcattgacaaggagggagtgattcagcactctaccattaataaccttgccattggtcgcagtgtggacgagaccatgaggacccttcaggcattgcagtacgtccaggagaacccagacgaggtctgcccggccggttggaagccaggggagaggtccatgaagcccgaccccaagggaagcaaagagtacttcgcggccgtctagactcgccgtctttgacaagctttgctacgtttttgtcatggtgcccgctaagccccccggcagtaggttggagttttgcggagctcgcgtttttacaaatctcggtgctctgaaccgagcgtagtagccccctttgctgttgtgcatcccgattgagtgctgttctttgccaccttgtttaatttcgtcacctgacgacataaggttcattttgcacgtgattgagagatctc

SEQ ID NO: 2655 - DNA, 1196 bp, Zea mays
  Clone ID: 700220436_FLI
gtgaaggcaaggaaaaacacccaaacggccaaaccccaggaagccccgtcggaccctacagaccctaaccctagcgctcccgacgcgccgcggagcgatggcgatggacgcggagcggcggcaggcggagctgatcgcgcagttctccgctcaggcggcggcgctttcgttcgcgccccagctcgccgcgctggtgcttgaggccacctcccacccggccctcttcgccttctccgagctcctcaccctcccggccctctccaagctcactggcacgcagtacgcgtcgtcactggacttgctccggctcttcgcctacggtaccctgaatgactacaagagtaattctggattccttccagcactgttgcctgaccaggtccgaaagctaaagcagctcagcgtgctaactctggcagagtcaactaagatactaccgtatgatcagctcatgcaagagttagacgtttcaaatgtaagagaactcgaagatttcctaatcaatgagtgcatgtattcgggtatcgttagaggcaaactggatcagctgagaaggtgctttgaggtacaatttgcagctggaagagatcttacacctgatcagctaaagaacatgatagagactttgtctgattggttgggaacatcagatagactgttgcatcaaattcaggagaaaatcaagtgggctgacacaatgagtgaggtgaacaagaagcaccagaaagaatttgaagacagagtggaagaggccaaaaaatcaatcaaggcagacattgacttacgggggcatgacgagtttctctctgaatctggaggaataatggattttgaagaggaccgcgtccgaccaaaaaggaggaggcaaccaccggcgtagtttcaattagcccttaccaatctctcccagaatgggacctgctgataccttgattgagacattttgacgccggagttgagtaaactttgtacatctgtcgtgtgatgcctccactgtagcgagtctgtttattttgccttctggtcttggtggggacgtacaaggccaaacctaggcgttatgttgcatttatttggtagtaaatggcccatggaagaaataacgttgttatgattatggcactgggttattctcaagtgtactgaacgataacagaagcacctctgttaaatgatgattgactcgaggcttgctg

SEQ ID NO: 2656 - DNA, 1668 bp, Zea mays
  Clone ID: 700220451_FLI
ctcgctccgcattgcccgcatcgcctccaatctcagcagaccaggtcgagtttcgcccggattttcagtgtgggaggggagtggaggtgtgacgggagcagcagaggaagcgcgccatggacccgtgcccgttcgtgcgggtgctggtcggcaacctcgcgctcagaatgccggtggcgccgccggccgccggtgctggcgcgggcgtccacccgtccacgtcgccgtgctactgcaagatccggctggggaagatgccggtccagagcgtcccggcgccgctcgtggtctccgacggcggcgagcagacgccggcgtccggggccctcgccgccgcgttccatctgtccaaggctgacctggagtggttcaacgggaagccgtcgctcttctcgtcgcgcggggaagccagcctgaaggtttcggtctacgctggccggaaggggagtgcctgcggcgtcagctccgggcggctgcttgggaaggctacgatcgcgctggacctcaagggcgccgaggccaagcccgccgtgctgcacagcggctggatctccatcgggaagcgatccgggaagggcagcaccgcggcgacggagctcagcctcaccgtccgcgcggagccggacccgcgattcgttttcgagttcgacggcgagccggagtgcagcccgcaggtgctgcaggtgcgcggcagcatgaagcagcccatgttcacctgcaagttcggatgccgcagcaacagcgacctgcgcaggccggggatgcagccggagcgcgacgccgcgtcggccaaggagcgcaaggggtggtcggtgacggtgcacgacctgaagggctccgccgtggcgatggcgtccatggtcacgcccttcgtgccctcgccgggcacggaccgcgtgagccggtccaacccgagcgcgtggctcatcctccgccccgcgggcgacggcgcctgggagccctgggcgcggctcgagtgctggcgcgagcgcggcggcgccggcgcgtccgacagcctgggctaccacttcgccctcctcgtccccggcgcggaccacgccgtcgccctagccgactcctccatcccctcgtccaacggcggcaagttcgtcatcgacctgaccgccgcgcagccgctgagccggggcggcacgccggggtgcagcccgagaggcagcggcgacctgagcaactggcccctggggaactaccgcggcttcgtcatgtccgccgcggtccagggcgagggccggtgcagcaagccgacggtggaggtcggggtggcgcacatcgggtgcgccgaggacgcggcggcgttcgtagccctcgcggcggccgtggacctgagcatggacgcgtgcaggctcttctcccaccggctgaggaaggagctctcgcacctgcaggccgacctactccggtgacccaccgggccggcggcaaccgcgaatcacgagcgaattgtacagaagtagttgaggcagacgtgtgctttgttgtagtagttcgattccggtgatcaactagttgatcgtggtcaccttttcttgtgagcgctgagtgcctttgtgtggtttgatttttttggttggtcgcttcgctttagccatgtagggtgtccgcttttacggatctccgtaatttagagaattttttttttgtgatcgt

SEQ ID NO: 2657 - DNA, 954 bp, Zea mays
  Clone ID: 700220460_FLI
gttgtgccagaactaagtgcctttatttgcctcataaaggggctaatcaaagtaaataagtggaatgaagccctgcagttgtgttacagcatgtgtgatgagggtgtgaactggcagagcaacaactcttttgatggaggctagagctttgttttcttacatggttactccagatgaaagcattgtcccataagagcttattttgattggggtgatttggttcaaattcaaaccaaagttattttaatgattcctgttccgaacatcgctctagggagtcattcatttctgacatcttactggaagattacagtatgaagtggttaccaaggagatacggattaaaatgtgcttttgtgcaactcattgatggattgggaaaacagcactatgttttgattaaaactgtatatgttcatatataacctttctgggtgctgaaggataaagtgaagaccttcaaaaaactatgtgcagtcaagctcactcatgtaagcacggttctaattcataatggtggccaatctattatgatgttagctgattatcatcatatttgtgctcttatacagtatggattatcaaattctctctttcagtgctgcacgccattttacattgtcagtgggtgatgaccgaagtaatttctgacttaccttcagatggacaaaggatcatctcaatgtctatcaacttctgtatataagttgctgatggttagacacaagggtgaaatatgtggtgaaagagaacttctgaaatccataattctctattcatcagttcagtgattcatccttatagctccttccagtgtttttgctctcgtaatagagcaataaagatatgatgaaatcacaaaaatgtagtcaaatgtactgcagttcactacttcactgtacaaatgtaaaaattacttcaagttaaaatttatttatttaacctgttgatatc

SEQ ID NO: 2658 - DNA, 827 bp, Zea mays
  Clone ID: 700220462_FLI
tgcatgcacagaagaatgtataattccaaaatcgagagatcttgtaagctgtccatcttaggttgcctctgcatggaagaaagggcctttaggaagctttctaccgacaggaatccagattccatgtccatatatgacacagcttacaagatctctcgattttggaattatacattcttgtgtgcatgcacagattagaaagtaaggagcaaacctcatacaacttcaccagcataatgaaagaatacagatccatacaagacgcctataagacttctgataaatatgcaagcaccgtttgttttagggcctttgagcaccttttggatcgtgagctgattagttttggtgacaatagatggagaaaccaggcgcttgaataccgacctgttaagctcctcatatcctcccgcgagctcgctgagtccctcaagctgaacaccacctgccccgctgtactgcagaagctgtttgatcgtgaaagatacatgtagaatctcctttcagatggccgcgcttcacctgacttgagtcgccgctttcatgtttcaccgggttgtcaagttcatgtttcactgtaaaccggcgattgtattagtatcttgtccactgttcgctggaaaaggtgtgggccgtgtggccaactgcccagcgtgagtcgtgacctgcctgtcaatcgcttgagtcttgaccataggccacacggaattagatatctgtggtgcactgattttgggctaacgacccgatttctatctcgcacaagtttagcagcgtggtgacagtattttggtagctttgaaatgaatgcgctattcggagtttac

SEQ ID NO: 2659 - DNA, 1739 bp, Zea mays
  Clone ID: 700220482_FLI
cgacctcacgcctctccacggccacccagctccagcagtacgcggctaggatgtacggcgggcagatgagcttctcgggtggcggagggctcgtgggccagcagcagctggcggggcgcgcccccatgcttgggcagggccagctggggatgctgcaaggccagggtaacgcggcatctgcggcacattttgggcttcagtcgcagatgttggcgcaggctaggcaaaaggtcatggcacaaaacacccaattgaataatgctaatacagctcaagtgctgcaagggatgcagcccatgggtgtcatgggtgctatggggatgaaccagacgagaccgaatgtaactattccctatggtgctcaacaaaggtttgcccaggcacaaatgaggccacaagcatctcaacaacctgcactgtctccacagaaggtacctggtcaaggtttgtcgaggacagcatcaattaccgcattaaattcacaactgtctggatcatcacaaaatggacagatggtggcaatgtctatgcctcagcaacagcaacagcagcagcaatggttgaagcaaatgcaaccatccatgggctcaccactttccccacagcaacaatatcagaaccagcagaggctcctgttgatgcagcatcttcagcagaagacaggattgaaccaacaacaacttctccaaatccaacaacagcatccacatctcaatgtccaacagctgattaagcagcaacaatttctgaagcagtttcagcagcagcaaccgctacaatctcctcgtgttttagcatctggttcacagaaatctgcgaatcttacaggctcgcagccgggtacaccattgtcaggtggaactatgactggtggaagtggaagtcagggagctgaaggaactagccaacttcttgggaaaaggaaaatacaagatctggttgcacaggtagatcccttaggcaaggttgacccagaagtggaggatttacttctagaaatcgctgatgacttcattggctcggtgactgcatttgcgtgtaccttggcaaagcacaggaaatcatcagttgtcgaagccaaggatgtgttgctgcacttagaaaaaaattggaatttatctattcctggtttctcacggggggataagaatcctcaaagaaattctgcaaagcaactggtagatccccaacattcagaaagtgatgttactggtatcagaggcacaagcaataaacttggtgctaataactcggttggaaatcatcaaatacgacctccgatggcagaaccttcagcaatgccaacaatgggccctctatcaaaagcccctcgcttctagtggttatgcttctcttccctatcgaaggaaaaattcctccttctgaagtttcaggacaatctacctggaaaacaacccgtaggctctaactcaaggattgctagcaagtggaagcacaataaatccacgagcatctgtggcaaactgcagatgcttgtcttacagttacaggaaagcagttgctgacttaccaatcctctacatggggtcatatgtaactttattttattttattttatttttgtgcccgtaaatgcccccatccgttgtatataaatgttttttttttggcaatggggcattatcgtcaccagttttgatgttgctaggtaggtgaacaaatactaaagtggatgcaacttatataatttaatgaaatgtaagattgatgtcattttt

SEQ ID NO: 2660 - DNA, 1003 bp, Zea mays
  Clone ID: 700220496_FLI
ggaatcacaaagcaataaatggaagatacatatacagagcattgtccagggttgtcgacatgaacaacaattctacacatctacgaattaaccaaatcattcagctatacacatatttttagaagaaaccgcgacgtggtggtgactattgattgcttgagattgtgttgcaaccttgcaggtttcagcatctagttatacgtaaacatcagaaccgtgaagatcatgcagctaaactacaatttagctacaagtattgaacctgcaaaccgactagtctgattccctaactacctaatcagtttgctacaacatagcaactgaacccttcaacagtgaaaatgattaggacttcctgataaccttcactgcttcattgccgcttctgatgtcactcattaaagcaatttgatgcaggagttgtgctatcctcttatccttctctttggagagaagcacgagcaggtcccgttccctcctatcccgccgacgggcgtacagaagtgtccccaccacagcagccgccgccgcaaccgaccacacggcgggcctcaccgccgggcacccacacgcgccatgcacgagcacccgctcctgaacgatcccgacaccggccgcccaagcgcgcctcgccgccaagctgcacctctcccatccccacagccactcatcgtcctccccctcgtattcaccatcctcctcgttctcctccttcgccactgctggcatcggcgggacctcctcgggctcgccgtccaggcccagcccctcatgcagccgcggcgggaagatgacgcagtcatcaagccctccgtccacgtggtcaacaggtggggcagtgggggtgacgacctcccagacatcggtgacgggggcgggcagcgaggaggaggacatggaggtgagggaggaggacgagagggagagagttagcgtcttgggcttcaggaagaggtgcgggttcggggagggcaagaggagagggtgtagcgcggagtacggc

SEQ ID NO: 2661 - DNA, 1008 bp, Zea mays
  Clone ID: 700220505_FLI
accttgttcttctttgtacatctactccagatgatctgtttggaggtgctgctcagtggggtgcacaaaagcttttggatttgatattacagctgcttgtagtgggtttttagtcggcttaatcacagctactcgctttatcaaaggcggaggttttcagaatgtcttagtagttggtgcagatgctctttcaaaatacgtggattggacagacagaggcaggattgaggctgtttcatcctcctctgctgcgggatgggtggggtcgtcaccgtggcgtcactcgtggcgtatcgtgcagtagggacgacaacggggagctgtcaagatgggttacctcaagacggatgagttcctcaagaggggcgagagcgggggcacgtgctgtgtcatagcccttctccgaaagggtagactggttgtctccaatattggagactgtcatgtggtgctcagccgagcagggaaggcagaggtgctcacctctgaccatcgggcctcccaggaggatgagaagcagagaattgagaatttgggtggatttgttgtgaattaccatgggacatggcgagtccagggctccctagcagtgtctaggggcaattgggatggacatctaaagcagtgggttgtggctgaccgagagactaggacgctcctcgtcgaccaccagtgcgagttcttgatacttgcttttgatggcctatggggtaagattgataatcaggatgcagttgaccaaaaatctaggcattagcactaacagagaccggtggaaggcaggactttgctgcctaaagtttccatgagtcagcgctatttttgggtgtttaacattcattctttgtcatagaaccatttgttatattattagatgtaattagatctatttgattcattcttcggcaatatttattgagataatgcggggtgatctctcgcttcatgatccattgactgtaaaaggcgatttgcctacgtcaatacaatgatatattctatttatag

SEQ ID NO: 2662 - DNA, 1335 bp, Zea mays
  Clone ID: 700220556_FLI
gagggaggagggtgacgatggcgacggccaagggctcgacgcgtcggcgagcggcgccggggtgcggcacgtgctgaagctcagcgtgatggacacgctccaggattactacatggtggggcggtacgacgacgcggcggacgcgttcgtgccggcggagcccgagcgcggggacgacgtgcgcggctggcggcggctggactacggccacgtgtacgcgtccaagaccttcttcgacgcgcgcgggagccggcgcgtgctgtgggcgtgggccaacgagtccgacagccaggccgacgacgtcgccaagggctggtccggcgttcagacgttcccgcggaagctgtggctggacgaggacgggaagcagctgcggcagtggccggtggaggagatcgaaacgctgcggaggaagcgcgtcgtcctgcgccgcggcacggcgctggccaccggaggcatgaacgagatcgtcggcgtcgcgggctcgcaggcggacgtggaggtcgcgttcaaggtctcgagcctggcgggggccgaggcactggaccccaactggctgctggacccgcagaagctgtgcggggagaagggcgcctcggtgcccggcggcgtcgggccgttcgggctcatcgtgatggcctccagcgacctgcgcgagcacaccgctgtcttcttccgcgcgttcaggtaccatggcaggtacaagcttctcatgtgcactgacctgacaaggtcgtccacgagggcaggcgtgtacaagccgccatacggaggattcgtggacgtcgacgttgaggagcacgagaccatcaatttgagaaccctgattgatcactcggtggtggagagcttcggagctgacgggcggatgtgcatcacggctcgagtgtaccctgagcacgcggagacgagcaacagccacatgttcgtgttcaacaatggcagcggcacggtggaggtgtccaagctcgaggcatgggagctcgcggcggcgaccgtaaattccgttgggggcaacgacagcttggttatgtctgaatctaataaccaaagtgaatcctattaaaatcttcaggttaatgtgtcaaaaatggggtccgtttgatttgattgctatactttgttatggagaggggggaaaggtgtatttcaaataagaaatattggccgattgctgttgagaaattcatattggttgatttggagaggagaataaacaagttctactgatctggcacctctggctagcagcactatcatcggtttgaccatcagccaagagtggagttttgattttcgcgtgatgaaaacatatacttatttggattctttgtt

SEQ ID NO: 2663 - DNA, 2363 bp, Zea mays
  Clone ID: 700220655_FLI
cgaggggagatatttattttccgttccgttttccccgtcagaaaggagtacttccaacaaactgctccgctttcagcacctgcccagcggaggaagagtgcggattgcggcggcgccggcggacgaaacaatggcgtcggcgagggacgagcatcttgatgggattcgcgcgctgatggcggcccactcgccgccgctccacgggctggtcgtcccctccgaggatgcccaccagagcgagtacgtgtcggagcaggataaacggcgggagttcatctccgggttcacagggagcgctggcttggctcttatcaccatgaaagaggcattgttgtggacggatggccgctacttcttgcaggcaacacagcaactgagcgatcgttggaaacttatgcgcatgggagaagatccaccagttgaagcatggattgctgataatctggctgatgaagctgtcattggaatcaatccatggtgcatctctgttgattctgctcaaagatatgagaactcattttcaaagaggcaccagactttgtttcagctttcttctgatttggtggatgaagtatggaaggatcgcccgctagttgaacctaggcctgtaattgtacacccagtagaatttgcagggcgcagtgtaccagaaaagatgaaggagctaagagaaaagcttgtgcatgaaaaagccactgccattataataactgctcttgatgaggttgcttggttgtacaacattcgaggaagtgatgtggattatagcccagtggttcactcttatgctattgtaacattgcacagtgctttcttttatgttgataagagaaaagtaactgtcgaggttcagaagtacatgtctggaaatggtatcgaaataagagagtatgaaactgttcaatcagatgcaagtttgcttgcatctggcaagctacaaagttctgtacatgtggaaaagtatatggatgaggtggagagttcaaaaatttggattgattctggctcatgttgccttgcactctactcaaaattgattccacatcaagttttgacgcttcaatcaccaattgcccttccaaaggctgttaagaaccccacagaactggatggattgaggaaggcgcatattcgagatggtgccgctgttgtacagtaccttgcttggctggataatcagatgcaggagaactatggagcttctggttatttcagtgagataaaagggtcgcataaaaatgaacatttagcaaccaaacttactgaggtgtctgtgagtgacaaacttgaaggcttccgtgcaacaaaagagaactttaaaggtttgagttttcctacaatttcatctgtgggaccaaatgcagcagttattcactataaacctgaagcaagcacatgttcggaaatggatgctgataaaatatatctttgtgactctggggcacagtacctggatggtacaacagacattacaagaactgtacattttggtaaaccctcagcacatgagaagtcatgctacacagcagttttgaaaggccacattgcactagacattgctgtgtttcctaatgggacgacaggacatgctcttgatattctttcacgagcaccactctggagagagggtcttgactatcggcatggtacaggccatggaattggatcttatttgaatgtccatgaaggtcctcatctaattagcttcagaccttctgctcgaaatgtaccgctgcaagcatcaatgactgtgacagatgagcctggttattatgaagatggggcctttggtataagattggagaatgtacttatttgcaaagacgccaatgctaagtttaattttggagataaaggttatttggcatttgaacatataacatgggctccataccagaccaagctgatagacaccgagcttctgacccctgttgagatcgactgggtgaacacgtaccactcagactgccggaagatcttggagcctcatctgaacgagcaggagaagcaatggctgatgaaagctactgagcccgtagctgcaagaggctgagccttttcgtcaacgttgcatgccaccgagcgccaggctcatcttctgcgtggcatacatataagattggctgcccccgctggttaaataataatagcggcgaaggaacaggatagcttgttctcaacgctgatcttcgccgctaaagtggagtgtttggcaggatgctattttctttcccattagggtacgttcgggttttacggaacggtaggtttttatacggaacggtgggtacaacaattcctagagccggattgtttctctaattatttatataaggtttgatcaattgaaataattttggatc

SEQ ID NO: 2664 - DNA, 1748 bp, Zea mays
  Clone ID: 700220657_FLI
agaaggaacgggaagaacgaggccgacgagaactgggaaggcatggcgatggggttagaggacggcgagtacggcgccttcatggagaaattcaagatgctgccttcgcaatctcagcatcagcagcagctcccgcttcacggcctcaccttcgctatcaaagacatcttcgacatcagcggccgtgtcactgggttcggcaacccggactgggcgaggacgcatgcccccgccggcgccacctcccccgtcgtcctggcggcgctggccgccggcgccatcagcatcggcaagaccgtcatggatgagatggcctacagcataaatggggagaacgcgcactatggcacgccgactaatccgtgcgctcccgatagagtccctggaggatcctccagtggatcagctgttgcagttgctgcaaaactcgtcgacttcgctctgggcactgacactggaggtagtgtgagggtacctgctgcctattgtggcatatttggactcaggccttcccatggattggtttctacagaaaatgtcattccaatgtcacagatgtttgacactgttggatggtttgctagagatttatcgacgttatcttgtgtaagcaacgtgttgttgccactagctgctgacaacactatcaagcaaccaactcatgttacaattcctaaagactgttttgaaatcttaggctctctgagtgaccaaacatatcagattctcaatgcttcggtagctaagagatttggtaacgatgcagtagacaataggaaccttggtgagttcgtctccgccaatgttcccactgttgggaaattcattagcgacttctccagaagcgaagcaccatctgtacctggtctatctgttatttcatatgtcatgcgatgcctccaaaggtctgaattcaaagctaaccatggagagtgggtcaaaactgtaaaacctaacctaggccctggcatccgagagcgggtgcatgaagccattgcatcagaagatggacccatggaggattttcatgttctgaagactgaattcaagtcggcgctttctgctcttatcaaggatgatgggatccttgcgataccgacagttcctggttctccgccaaagctgcgcatggaggctgttgcattagaaaacttccgcgcaagagcattttcattgctgtccatcgccggactatctgggttttgccagctgagcattccacttggagtgcgccatggtgttccagtgtcagtctccctagtggcatgccatggtgcggaccgtttcctcctgagtgtggctcaggagctgtatgggacgctcaaacaggagaccaagaaagcctggagctggagttcatcagactcctctctctgagccatcaatcatgattcatatgcaaagttcaggttccaccggctctcgctcgctccgtgtcctgcacgactgcttgttgatctactctagtagatgtcgatgtggcacaggcgcactcgatccatgtgtaccgaggagacaatatgttttgccacgtaggcacatactacaatttgctgtttctgtatgcatatggtgatagagagtgcctactacaaattcaggcatgttggaaattggatctctggatttcaatatgacagcagcaagtccaaaaatcgtggaataggaatttgtgtgtgaataatttgtgcataaaagggcacagaaaactgttgatatcagtatatgtgtgagaaatggtggaactc

SEQ ID NO: 2665 - DNA, 1502 bp, Zea mays
  Clone ID: 700220675_FLI
gtctggtgctgccttctccttcaccgacgacgtggatccctccaccgagccgagctttgaccccgtggtggtccgcgtaaagtccgatgttgttgagcagcagatccgctccgcccgggacatgccccgcgagagcgacctcctcttctccgacaccaccaagcagatcaaccccctctatgctgctgtggaccatagcaccaatggtggctccgatctgaccctgagccaggtggcatgccgggcgatcatcctcgacggcacgtccatgccgccgcaggcgtacgagagcatcatcaccgtgttcatcatcgatagttgtggcgtgcgcgggatcattcccggcaccatcctcggcttcctcgtggagaagctacaggagttcgccgccaaggacatcaacgacttcttcctcgagcacaatcctaggatccttccgcctagcagcggcggcgatcttttgggtctgttctcgacgctgttggggcccaagcacgacgaccagtacctccacgccctcgtgcgggagctcctcgacgagacgaggttcatccaggcgctgcacaacagtatcaatcccaatctggtagctatggtgacaattgtaagcacaccttcttccaccttgattgatgctcaagtggtgttcgatgaaatgcagccaaggatgaacgtgaacacaggtgttgctcgtttgaatcctcaaggctcgtttcaatatggatctatcaatctgagccaggtttacaagctggggaatgaaccacatgttatcatcaatgggaagaaacggactacactgtatttccgaccagctactcctcgtagtttgggagctctgtacaacaagaagaatgtcttcacactcgacttccctacaatgccaattgatgggccagtgatcagaacatctgtcattaactccacatacaagaactttttggaaattgtatttcagaacaatgacacatctgtccagacctaccatgtagatggatatgcattctgggttgtaggaatggactatggtgagtggactgagaatagccatggtacttacaacaagtgggatgttgtttctcgttgcacgactcgggcgtttccgggagcatggactgctgtgacgctgtcgcttgacagcccagggttttggaatgtacggacagaagatctggacacatggtatatcaccaaacttacttctgcatcttacatgggtgttgttctattgggtagtagcgccattaaatttctctgcatcatgcgtgggacacaaggtgtcttgattgtggcttcagctttacagattatagttaccttcagtggcctttggcgtaatgttgccaggtatccaagttcactttcagctgctcctttggtggcactagttgtgtttggactgtatgagctagaaattccctcggttaccaaatgtgttgagattggtctacctggcctcatccttcttctgatctttgcaatgtacctgccacatactgttc

SEQ ID NO: 2666 - DNA, 673 bp, Zea mays
  Clone ID: 700220713_FLI
ttgacactctttttcaacatatatgactgttttcattgttataacctcttgccatgctgcatgtttcattcataatctatattgtttctattcagattgccatctctgcatccaacactggaggtgcctgggacaacgcaaagaaatacattgaggctggtgcatctgagcatgcaagaaccttgggcccgaaaggttcagacccacacaaggctgctgtcattggtgacaccatcggtgatcccctcaaggacacctcaggcccctcgctgaacatcctcatcaagctcatggctgtcgagtcccttgtctttgctcccttcttcgccacccatggaggcatcctcttcaaatggctttagaggaagaatggaagatggatgggtagtttatttttgccgggggagagcactagatatatgtcatagagaagtttcagtttacccatatggtgcacttcatccttttttgtttcgcttgtactgtgtcgcagtcttgttgaacttgtcagccgtggtatcacctagttgttgggtctagttgcagtagccgagtggagcaaaaacgtctagcattctacaggattggagtttggacatggatgtgttgggaagtttgatactgcatgtagatatttcgatgatgatgatcaaggaatgcacaagtcagattt

SEQ ID NO: 2667 - DNA, 207 bp, Zea mays
  Clone ID: 700220728_FLI
ctgaggaggccctcgctacccagccattagcaaattcccttatgctgtccaagacttatcttacgctatgtctgtagccttttgttattacaagtactcaagttttgagtttttgagatgtggctatgacaatgtgatgaagaaccctaaaccatcgtattagagtgaaacttgtttctatatagagttccaagtttcttgaacctc

SEQ ID NO: 2668 - DNA, 1246 bp, Zea mays
  Clone ID: 700220754_FLI
gtgagagaggccgtggaaaggaatctttcagctcacacctccctatccctccctccctccctcccttctcctcctactgctactgctcgccaggtcccctcgctcgctcgtcgtcttcaacctcacacaattatttgtgctcccgctccttccgtccgtccttcctcccccctcccctctccctcttccaaccgccgctcctgctgccttgcctctcagccgagggacgccaaggtctctgccaggatggtgtaggccgtgcctctcgcgcattatgaggtgtggtggtgagggatgggcgatggcctttgcagatgaaggagcgacagcgctggcggcctgaggaagacgccgtcctgcgcgcctacgtccggcagtacggcccccgcgagtggcacctggtgtcgcagcgcatgaacgtggccctcgaccgcgacgccaagtcgtgcctggagcgctggaagaactacctccgccccgggatcaagaagggctcgctcaccgaggaggagcagcgcctggtgatccgcctgcaggccaagcacggcaacaagtggaagaagatcgccgccgaggtgcccgggcgcacggccaagcgcctcggcaagtggtgggaggtgttcaaggagaagcagcagcgggagctgagggacagccgccgcccgccgccggagcctagccccgacgagcggggcaggtacgagtggctgctcgagaacttcgcggagaagctcgtcggagagaggccacagcaggctgccgctgcgccgtcgccgctgctcatggccgcgcccgtgctgccgccctggctgtcgtccaacgccgggccggccgccgccgccgccgccgccgtcgcgcacccgccgcccagaccgccgtcgccgtccgtgacgctcagcctcgcgtccgccgcggtggcgccgggcccgcccgcgccctcgccatggatgccggatcgcgccgcggccgaccaggcgccgtacgggttcccgagcccgcctcagcacggcggcgccgcgcccccgggcatggcggtcgtggacgggcaggcgctggcggagctcgccgagtgctgccgcgagctggaggaggggcggcgcgcgtgggcgacgcaccggcgggaggcggcgtggcggctgaagcgcgtggagcagcagctggagatggagcgcgagatgcggcggcgcgaggtgtgggaggagttcgaggccaagatgcgcaccatgcggctggagcaggcggccgc

SEQ ID NO: 2669 - DNA, 1235 bp, Zea mays
  Clone ID: 700220824_FLI
cttcattaacttctgacgaacaaacattaactgatttgaaatcaatctcccagaggcattttctgccactgtacccttcttttgcagaggatgaagatcccatacccatatttgctcaaaaactgctagtaatgctaatggaacatggttgtataaaagtctctgatattctacacaaagcaacagtatcccaatgctttgattttttgctaggagatctgtcaaatgcaaatgtaagcaatgtcaagctttgctttgccctggcatctgcacctgagatgaacacccatattctttctcagcttcaagttgttagaaggatagggaacctacttgagtttgtcgctgcaaaagacatggatgattttcttgaaccaaccctggagttttgcagagctttcattattcgtggcactggcagcaacagaagtgtcgccctctccgaaaacccagcacttcttgttgacagtgccttcagcatgagtattgctgttgatcaacaaacttgtgtcacggatatatgcgactttggtggcaacatgggtacttttcttgagctagctggcaattcagatccacagataagtaatttagcgtcagactgtgtagtgttgttatccaaggcagcacctcgagaggctacagtgggcttgttgacaaatcttcctaaattaagcactgccatggacttgctgaagcatgagagctccctacgtctgattcgcttattatatggcctagccttctcatgcagacaatacttggcccagggaatgatcctgtcaatatcagtgtcagctttgatgcgagttgaagcacttgtttcagttttcaagggctccaatgatagccttcttgctgatgctgcttcttatttgagcgccgaactgcagcgcttacctcgctgtggttgaagctgcaacttgtccaaggaggcaaggatgcacttgtttttgctgtggttgaagctgcaacatgagctgagcaagtgagcaggacatcaagtacagccagggtgttttatgctatcatttatgtccagttcggggctgctgtatatggtgcttttgaaccatatttggaaggtggctagaaggaaagaacactttgtttcctcgcgaattttggttggcaattaccccagtttcatgtaattctgtagtacctgtaatttctctgagaatactgtagttcaatatcatgtgtaaataaatcatctataaacgcatgtgaag

SEQ ID NO: 2670 - DNA, 1355 bp, Zea mays
  Clone ID: 700220832_FLI
gcgagaaggccctcgctgctttcatgtcaaaggacaaagctgccgagcgcacccttggcgatatcattctccagaagatcagggagaaggacgccgaggtcgcaactggtgaaggacgacctcgtgtaaaattggacaacagcattattgaactttataaagaggttgggaagttcttaagccggtacacgagtgggaaaattccgaaagccttcaagcgcataccatcgctggagtgctgggcagatgttgtgcagctaacggagccagagaattggtctcctaatgccgtgtatcaagcaacacgcctcttctcttcgaacatgaacacaaagaatgctgagcggttctatgaagccattttgctaccccgtgttcgaaatgacataaggaagaacaagaggctgcattttgcactctaccagtcgctgaagaaggccctttataagcccgcggcatttaacaagggaattttgctaccactctgtcgggaaaggaattgcaccctacgcgaagcagtgattattgggagtattatccagaaagtttccattccatttctccatgcaagtgtagctctagtaaaactagcagagatggagtactgtggcactacaagttacttcatcaagctatttctagacaagaaatatgctttgccataccgtgcacttgatgcagtgcttgcccatttcatgcgttttgttgatgatgagaggatcatgcctgttatatggcatcaatcactgcttgcatttgtggaaagatacaagaacgagttagagaaaaaggataaggagaaacttgcacgtttgttggatcaccagaaacactatttggttactccagaaattcgaagggagcttcgagggagctgcaacaggggtgaaaaagatacaaatttgcatactttgtcacctatctccgtcattaccaagcctatcgaggaagacaaatgggacgtaccacaagtgccaatggaggaagattagccagattctccaacatcgatttttacacttcatttgtttttgaattaaatttctaaagatattgctgtattttattgggcgtgaacttttagtgccaatattggggtaaaataggttcccagtagattgggcccccaatgttctgagggcattttgcagtcggaatgtgattcacacacagaaaagtttgttttgatcatttggagtattccaagggggcattcagcatggacatgtagcatactgtctttcgcagaagtgggtaagaaatggttgatcatgttactttgtagctgcgacaactaaaggtgtaccatacttgaaccagaaatgaaaatgaataacccggagttcgtttggttt

SEQ ID NO: 2671 - DNA, 1355 bp, Zea mays
  Clone ID: 700220858_FLI
gatgatttttctttggaattgtcaaagcttcatacctatgatgatgttgttgagagagttgctcgccaacttgaattggacgatccagcgaaaattcggcttacaccccacaattgctactctcagcaacctaaaccacagcccgtcaaatatcgaggagtggtgcatctgtcggacatgctcatccactacaatcagacgtctgacatcttgtattatgaagtgttggatataccactgccagaattgcagttcctaaaaaccctgaaagttgcatttcaccatcctacgaaggatgaggttgttattcatagcatcaggcttccaaaaaatagcaccattgctgatgtaatatatgacttgaaaactaaggttgaactgtccagtcctaatgctgaactacgtgtactagaagtcttctaccacaagatctataagatctttccactacatgagaagatagagaatataaacgaccaatattggacactacgtgctgaggagattccagaagaggaaaaaaatataggcccaaatgatcggctaattcatgtttatcacttcaagaaagatattaatcagactcagcagattcagaactttggagaccctttcgttttggtcgttcatgaaggtgagactttagcagaagtcaagaagcgcatacagagtaaactgcaagtctctgctgatgaattttccaagtggaaatttgcatttatatcaatgaatcggccagactacctccaggattcagatgttgtacctactggctttcagaggagagaggtctacggagcttgggagcaatatcttgggatagagcacgctgatactgcaccaaaaagggtctatacagtgaatcagaaccgtcacgcatacgaaaagccggtcaaaatttacaattgagatttctaactaacatggccgcacggtgaaggcctccatacgagaggagcggccagaaaagggaggacagggaatttatactgtcagggggaaaacctcatagttagcgagccattcggtgtggcacggccatgtattccagcgctagaggccagccactgttatttcatctgtagcagccagcagctcctatagcaatgattttctttttgtacaagattttccttctttgccttagggtgatggcgcgagcgcattggtgtccgtttcggttgggcaattgcttcattcttagagcaaagctgggtacataagattttggtaggaagcgtgtatacaggcaggctgtatagttgtggctctctcggcttgatccctcgtatcttgtcttgtgctattgttaatgcagtgacaggggctgactgtaaatcgtggttccaattttc

SEQ ID NO: 2672 - DNA, 1560 bp, Zea mays
  Clone ID: 700220859_FLI
atcttcaacataccactgttgagcattgcaacctcatttgtggcagaggatatttctaggagtgctaccaagcatcctagttcaggcaaattggagctgacatctgtatcatctgccctgatcttagctgctggaattggtataatggaagcattagcattgttcctaggatcaggattgtttcttaaactaatgggcgtgtcacctgtatctccaatgcacagacctgctaaactctttctttcattgagagctctcggagcacctgcaaatgtgattatgttggcagtccaaggtatctttcggggattcaaggatacaaagactccggtgttttatataggtttgggcaatctttctgctgtagcccttcttcctctacttatatatggctttaagcttggcataactggtgctgcaatttctacagttgtgtcccagtacattattacagttcttcttatttggtctctaagtaaaagagctgttttgcttcctccgcgaatagatcaattagagtttggtggatatctaaaatctggtggaatgctgttgggaagaactctttcaattctgctaactatgaccattggtacatcaatggctgctcggcaaggcccaacagcgatggctgctcatcagatttgtttgcaagtatggcttgctgtatccttgcttgcagatgcattagctgtttctgcccaggcgctgatagcaagctcttatgcaatattggactacaaaaaagttcaaaagacagcaatgtttgcgttgcagataggagtgtttagtgggttagctttggccattggattgtatgcctcatttggcaatatatctagactgtttaccagtgacccagaggtcctaacggttgtcaaatcttgtgcactgtttgtctgtgccagtcagcccatcaatgccctggccttcatctttgacggtctacattatggtgtatcagattttgaatatgtggctcaagctactatcgtggtgggtgttacgtcttcactcgtcctgttatgggctccgtctgtatttggcttggctggagtttgggctggtttgactacactcatggggttgcgtatggctgcaggcatcctgaggttgctacagaaagcgggcccttggtcgtttatgcacgaggagccataagctgaggtgtatcaactaccagcctgcgcagtttggagctgctaacttacttctgggagtttacatcactgcaaagattatccgagtgtcatggactcgctgaagatgttacccctgttactcctccggctcagaacaaaatctgacttcattgaatttcttaaaatcagtctgctagatggcatggtttggtttggattggtttggtgaaggcgtgaggcccatctgaacatcggtgcggcctctattttttttggcgaactcctttgtatgctatagcagctgtgcagtttctgtagaagaaaagatacaaggatcatttatagcatcgatatatgatgtatgcaactcctctgaattgtactcggtgtaaattattttagaaccgttttgttgatt

SEQ ID NO: 2673 - DNA, 1003 bp, Zea mays
  Clone ID: 700220888_FLI
agaccatccagccagcatggtattaagacggtaatctacctacttaaaaaatacatgtttaaaatgaaaaaaaatgatgttttgaacctgaatatgctcaccgtgagcattcagcaaattcctgcatattttgccatctcgcttgagcaaaatgttaacatctgcatgcaaatggttgcaggaaattcagaagcacttcgtcagttacatgataaacgataccctcggtgccatctccaccgcccacttgatccacgcagaccgtgatccgctgaaagctcgcagccccgagtgcgtccagctggccgctctgcactccatggcggtcgacttcgccaagacgggagctccagccgagatgcccctggcgctgaggccccgggagtttccggacttcatggaacggtgggagaggccaatgtacgtctccaacggcgtcctcggcaagctctaccgcgctgccctgcggcacgaggaggacgcagaagcgctcctgcctgcgggcccaccgagctgcgtgtacgacccggacctcgaggtcgccggtttcgacgagttcctggacgcagcggaggagcggtacgaggcgtacgccgagaggctgggcgccctgatgacctactactcggcggagcgcgaggacgagattctgacaggcaacatccggaacaagctggtgtacctgcggcgggacaacaagcgctacttcgagatgaaggaccggatcatcgccgccgtcgacgcgctgcacgcggaggtgagggggtggctcagggcgtgcaaggaggacgacgcgtcgagggtggcgtcggcgtggtaccacgtgacctaccacccggaccgccgcggggagaagcggttctggagcttcccgtggatcgtctgcgacaccctgctggccatcaaggcggcgcgcaggtgccggaagcgcgtggaagacgccgccgtgcccatggactgcgacggttcctagacggaggtgccactgtggcagtgaagtgag

SEQ ID NO: 2674 - DNA, 2368 bp, Zea mays
  Clone ID: 700220913_FLI
gccacgccatcgtccccgcttcgccgcctgcctctccggactcccactcttcaagccacctaccttcctacacccaactaggagtacctacctgcgcagagcccacgacggctcggactccggcgtgtcgacaccgctcctgccggagcatcgaggctacattaccaagtagtaggaaaccatgggccctgcgccgagggagcccatgaagcagcgcgtgaaccgctgcctgctgcgcctctcggaccgggacacggaggcgatggccgcggcggagctggacgcgatcgcgcgcgagctggacgccgacgagctgccggtgttcgtggccgcggtctccgacgcgcggcccaccgacaggacgccgctgcggcggcactcgctccggctgctggcgctcgtcgccggggagcacccgcgggacgccgtcgcgccgctcgtgcccaggctcctggccgccgcgctgcgccgcgtccgcgacccggactcctccgtgcgcgccgcgctcgtcgacgcggcccgcgccgcggcgggcgccgcggcgtcgccgcccgcggcgctggccccgctcgccgacgccgtgctccacgagcaggaccagtgcgcgcagctggccgccgcgctcgccgccgccgccgccgtcgaggcctcggagcccaccgacgacctcgccgcgtacctccgggggctcctcccgcgcctctacaagctcctccgcagcgcggcgttcaaggccaagcccgcgctcatctccctcatcggcgctgcctcggcagcctccggcggtggagccgcctccgccgccgtgccttgcctccgcgacgcgctcactgccgacgattgggccgccaggaaggctgccgccgaggcgctcgctttgttggccctcgagcacggagacgacctcgtctcacacaaatcttcctgcattaccgtcttcgaagccaagagatttgataaggtgaaaatagtgcgcgagtccatgaaccggttgatcgaagcatggaaggagatcccggatttggatgaggaggtctgctccttaccatcgtcccagtctagatcttctctcacagatactgcaagtgatggccgatacccagctgattcctcgggctccacctctagcccttcaattacaaggaggaactcatggccgactaacaggcagccccaaccggatggatcgaacaatgccatcaacagaaaaggcagccctccttccatcgtggctaagaaaaatctgcctccttcacgccgcagcacagaccagttcaagaaatctgaggacagggttgttgttactacggctccagacgcaacgccaattaaaatggtggctgaggaaaagcttctgaaagaaggcaatgttagggagaggcttgaagcgcggcgggtgctgtttcagaagactggtgacaaaggttacaagaaggtggctggtcccaagtcaggatccagagttgttccatacagcggggaaggggatggtgactcggaagagccggctgagactgaggacgcgcccgaagaatttcagtcagctcacaaagatgaggacttgtcgaagatcaggatgcagctcgttcagattgagaatcagcaagccagtttgcttaatcttctccagaaattcatggggagctcccagaatgggatacgttccttggagacaagggtgaacgggctggagatggtgttggacgagatatcccgtgatttggctgcttcctcgggaaggattccgaacagcgagcctgacacaaacgcttgctgcattctgagcccaaagttctggagaaggcatgacggaggtaggtacacttccaggtaccctatatcggacgcagcaaactactccgaggagagcagaagtccttacaagtgggacagacagcagaaatttggagtccatggtggttttgtcaccaatcccttagcagagccgaatgattcatctgtaaggagcatagctggttcccagcaagggaggagaagagactcggctcaatacagatcaaggttgagttaggtgtgacaggaagtggtccatgtgaagtgagaacaacgagcttcagcaataaggccgggtgtttgaagacgatcccactgttggtgtattttcgaaattttcttttctccaagcttagagctgagatcgtatgtcctatactcctatggggcttttattcatgaattgtcaagggttcagacagcctaaactctaaagcaagaccctcgccgctggctcggtaaccatacgatggtttagcagtgagaaaaattgagaatcgacactcattgtccagtcatggatgtaccttgtactgcttgtaaatagtttctatacagtgattcatgtgctcgc

SEQ ID NO: 2675 - DNA, 2412 bp, Zea mays
  Clone ID: 700220943_FLI
gcgagcggtactccggggagttatcaaacgcattggcatattgtgttcatgctcttcatgcaaaggccgaaaagttgtttcaccttactactttgaggtgcatgctgggagtaccaaaaagcatccatcagactacattttcctggaaaatggaaataatctgcatgatgtgttgagggcatgtacaaatgctacattagacatgttggagcctgcaatacgaaaggcaataggcccagcacctcaggagagaatatccagatgcaaatcatgcaaaagttcattcagtacactccgcagtgggaaatttgctttgttttgtgattcgtgtcttgagtccaagggagctaagaataatatcagttcatccaaagttgggcgaagtcaaacttcatctgccaaggtatataagagtgcatcaccaggagcaaagtcttcaagtgtaggaaggcttacaagaaaggataagggtatgcataaggtcgttttcatgagtggcattttaccagagggcactgatgttggttactatgttggtggaaagaggttactggatggatatataaaggaacttgggatctactgtcattgctgcagcacagtggttagtccttcacagtttgaaggtcatgctggtcgagctgctcgacgcaaaccttaccacaacatatatatgtcaaacggcgtttcactacatgagctgtcaatttcactcttgaaaggtcaaaagatgtcaaacagacaaagtgatgacttgtgcagcatttgttcagatggtgggcaactactcctttgtgatacctgtccaagagcttttcatagagaatgtgttggcttatcttctgccacaaagggaacttggtgttgccgatattgtgagaatagacaacagagggaaagttgtttggcatataacaacaatgcaatagctgctgggagagttgaaggagttgatgccttggaacaaatattcacgcggtcgatacgtattgctacaacacttgagactggatttggtggttgcgcactgtgcaagctccatgatttcagcaaaaagaaattcagtacccgaaccgtgctgctttgtgaccaatgtggtagagaatatcatgttggttgcctcaaggaacataatatggctgatctgacggcattgcccgagggagcctggtattgttctacggactgtgtgaggattaaccagacactgcaagatttacttaacagtggtggagaacctgttcttgccatggatttagatgtcattaagaagaaacgagaagtgaaaggttttaatgatgatgatgctgaccttgatgttagatggagagttttaaaggacaagagctcagacgacagcaaactagtgctctccaaagcagttgccattttccatgaaacttttgatcccattatccaggtttcaactggacgggacctcattccagccatggtttatgggaggagtgcaagggaccaagattacacaggaatgtattgtactgtgttaactgtgaacaatattgtagtttctgcgggtcttttccgcatcatgggtagtgaaattgctgagctgccgttggttgctacaagtagggatagacaaggcttggggtatttccaagcacttttttcctgcatagaacgtctgttgtcatctttggaggtgaaacattttgtgctaccagctgcagaggaagcggagtctatctggactgagcgttttgggttcgcaaagataagccaggatgagctgcgcgaatacctcaagggtgggcgaacaactgtgtttcaggggacgtcaaacctgcacaagctggttgcgaaacttgaatgctagttatgtgagaattgtatggcaagagcaaggacatgaagctaagaagcagctcattgtttgtgtgcctctgggattgatgcagacaggaaagaggcaccctgatccctttcttgtaaatgttggtgagcatgttggcattggcatcttgatctgtttccataggtaaggtgaagaggattgtgtaagataaaagggacaagctgtatgtaaagacaagccaaagctgagtgaatttcaggcaccttattgtgtggagggtcctgtgtttgttgagtaggcaacgctcgggctggtgtgagatgatgactgcatttgtgttgtgttggtggtattttcactgctgacatgactgttgtatcggatgacatcttttctgttttatgacagtggcagtgtgatactaggctgttaggaggggacgggggaggtcaaacccaacgtacatcatgagtggagctgctgtaatgtaacagaagtattgcacccccccccccccctctgtcctgtgtatgctttaacggagatgcacgttgtacccgtggtaatatatataaatttgcgttgtaaagatc

SEQ ID NO: 2676 - DNA, 1469 bp, Zea mays
  Clone ID: 700220960_FLI
atcagcacatcgatgccatcgagcggctctgccatgagcgcgccctcactgccttcggtctcgaccctgcctgctggggcgtcaacgtgcagccgtactcgtgcacgtctgccaatttggctgtctacactggtcttcttcaacccaaggaccgcatcatggggctggagccaccgtcgggcggccatgttagccatggttactacacgcccagtggcaagaaggtgtcaggtgcctctattttcttcgagagcatgtcgtacaaggtgaacccacagactgggtatattgattacgacaagctcgaggagagagcaatggatttccacccgaaaattctcatatgtggtgggagctcttaccccagagagtgggactttgctcggatgagattggttgctgataagtgtggtgcagtgcttctttgcgatatggcacatatcagtgggcttgttgcagcaaaggaatgtcgtagccctttcgactactgtgatgttgttacgtcaactactcacaagaatcttaggggccctagaggtggtataatattcttcaggaaagggaaaaatttaaggaaacgagctggatctttttctcaaggagatgagaatgaatacgacttcgaggataggataaattttggtgtttttccttcaatgcaagggggaccccataataatcatattgctgccttggctattactctgaagcaagtcgcaactcctgagtataaagcgtacattcaacaagtcaagaaaaatgctcaggctctggcatcagcgttgctcagaagaaaatgcagattggttactggtggcacagataatcacttaatactttgggatctcagaactcttggcttgactggtaagatctttgagaaggtctgtgaggcatgccacatatctatcaacaagacaccaatttatggggataatggctcaatatcccctggtggtgtgcggatcggaacacctgcaatgactactagaggttgcctagaagaggacttcgagtcgattgcagacttcctcataaggtctactcagattgctagcaatgttctgaaagaacatggcaaagtgcaaaaggagtttctaagaggcctaatgaacaataaggatgttatggaactccgaaatcaggttgaggcatttgcgtcacagtttgctatgccaggttttgatgtatgaatgtgcatatatactgtagtcagcaattatccagattcacagcaacattgtcatccgctcagttcctcgaatactagcaagtcttgctctcgactgcacaacgattaggagagtttttattaggttgtagagggtcttgactcttgattttgattcaaacaggaaagttgtgatgagttatgtatgtcaaccttggtatcacgagttactatagtctataggagacctgttgtggccttcggagacctgttgctgccgagactgaataagcttacc

SEQ ID NO: 2677 - DNA, 2079 bp, Zea mays
  Clone ID: 700220975_FLI
ggtaaccctactcccggcgacggggatcctgcactcttgggttcttgcatcccgcataccctcgaaagctcgaaagatcccgcggcgcagcagccacccttctctcctctccgctcccaatcttatcgtcgcctccctcgaagtcgccgctgccttcattccaccatggcgcttcacgccccggtccacgtgatgaaggactcgctgaagcgggagtctggcgcgaaggtttaccaagccaacatccaggcggccaaggctgttgctgacatcattcgcacgacattgggtcccagatccatgctgaaaatgcttctggacgctggtggaggtattttggttactaatgatggtaattctattttgagggaaatagacatcgcacaccctgctgccaagtctatgattgaactaagtcgtacacaagatgaagaagttggtgatggcactacatctgtcattgttctagctggagagatgctacacgttgcacaggcattcattgacaagaactaccatcctactgttatttgtcgagcatacaccaaagcgcttgatgatgctattgctgtacttgacaaaattgcaatgcctgttgatgtgaatgatcgcggggcaatgctaggcctcgtgaagagctccattggtacaaaattcactggccagtttggtgatcttattgctgaccttgctattgatgctacaacaacagcaggcgttgaccttggtcagggtatgcgtgaagttgatatcaagaaatacattaaagttgaaaaggttcctggtggtcagttagaggattctagagtccttaaaggagttatgatcaataaggatgttgtggctcctggaaaaatgaggagaaagatagttaacccccgtatcatcctgttggactgccctgttgagtataagaaaggagaaaatcagaccaacgctgaattgatgaaggaagaagattggcaggttctcctagagatggaggaagaatatataaagaacctttgcgctcaaattctaaaattcaagcctgatttagttatcacagagaaagggctcagtgatctcgctatccattatttgagcaaggctggtgttactgcaatccgtagacttaggaaaactgacaacaacaggattgctaaagcttgtggggcagttatagtgaacaggcctgaggagctccaagaatctgatgtgggaacaggagctggcctgtttgaggtcaagaagataggtgatgaattctttgcctttattgttgactgtaaagatcccaaggcatgtactgttctgttgaggggagcaagcaaggatgtattgaatgaagttgagagaaacctgcaggatgccatgtctgttgcaagaaacattttgaaaaatccgaaactccttcctggaggtggtgctacagagctgactgtatcagcaacactgaagcaaaagagttcttcagttgaaggcgtggaaaagtggccctatgaagctgctgctctagcatttgaggcaattccaaggactttggcccaaaattgtggtttgaatgttattaggataatgacacaacttcagggaaagcatgctaatggtgaaaatgcgtgggttggcattgatggaaggagtggcgatatcgttgatatgaaagagcgaaagatctgggattcctacagcgttaaagcgcagacgttcaagacagcgattgaggctgcttgcatgcttttgagaatagatgacattgtcagcggtatcaagaagaagcaggctcctggagcctcagctcccaagcaaccccaaattgaaactgagggtgatgccgacaatgagcagatgatcccagagtagaggctgtgaccaacctgcactgtcaaagttgtttactagtgccggaatagcactttgaatagagttcattttatttgagtgttggtggttagccttaggttttatatatagtttgatacactcgtccgagggttttttgtagtgtggttgctgcgcattttgctttggacagatggacgaacttcgcctgttgtatgccgtaaatctacctaatacatggtaatgctgttgtttccc

SEQ ID NO: 2678 - DNA, 1607 bp, Zea mays
  Clone ID: 700221047_FLI
gtggaaaccctactcgtccccttccgcagccgtcgccgcccaattcccccacccaattcccactctccgctcgacagatccatacatgatgggagaggccaaggagaacgacgtttatgaggaggagctcctggactacgaggaggacgacgacaagacggtcgatggctccgctgctaagcccaccggagaggtcgcaaagaagggctacgtcgggatccacagttccggtttcagagacttcctgctcaagccagagctgctccgtgctatccaggattgtggttttgagcatccttccgaagtgcaacacgagtgtatccctcaagccattcttggaatggatgtcatctgtcaagctaaatctgggatggggaaaactgctgtttttgtcctttcatccctccaacaaattgaccctgttgcgggtcaggtagcagcacttgtactgtgccacacaagggaactggcttatcagatatgccacgaatttgagaggttcagcaaatatcttactgaagttaaagttgctgtcttctatggaggtgttcacatcaggaagcataaagatttgttgaagaatgaatgccctcatattgtggttggcacgcctggtaggatacttgctcttgccagggataaggatctctccttgaagaatgtgaggcacttcattcttgatgaatgtgacaaaatgctggaatcacttgacatgcggagagatgttcaggagatcttcaaaatgactcctcatgataagcaagtcatgatgttttcagcaacgctcagcaaggagatccgtcctgtatgcaagaaatttatgcaagatccgatggaaatatatgttgatgatgaggcaaagttgaccctccatggtcttgtacagcactatataaaacttagcgaggcagagaagaaccggaaactgaatgatctcttggacgctcttgatttcaaccaagttgtgatattcgtgaagagtgttagcagagctgccgaactgaataagttactttgtgaatgcaacttcccatcaatctgcattcattctggaatgactcaggaagaaaggctaacaagatataagaacttcaaggaaggccacaagagaattcttgtggctacagatttagttggcaggggcattgacattgagcgtgtcaacattgtgataaactatgacatgccagactcagctgatacttatttgcacagggttggaagggctggacgttttggcacgaagggacttgcaattacctttgtttcctctgcttcggattctgatgttcttaaccaggtgcaagaaaggtttgaggtagacataaaggaactgcctgagcaaattgacacctcgacctacatgccatcataaatgggaaggacaactgagaagagaggaggataggggagtgagcagccgtctggagatggttacctttgaactatccgatctggaggatttgatttgcctcctttgtgtactttaaaaagggcagccaggatgatgatctgtattttaagacaatgctgtctgtttgggtttaggattttgctttgtcgaaaactagcacacttattgtactactgagcagcatatttgtttt

SEQ ID NO: 2679 - DNA, 975 bp, Zea mays
  Clone ID: 700221075_FLI
ccttttacaaactcaactgaagatcaaaaagcagcgcaaagggccagggacttccatattggttggtttcttgatccattaataaatgggcaatatccaacgataatgcaagacattgtgaaagaccggctaccaagtttcacacctgaacaggccaagctagtcaagggctcatcagattatttcgggatcaatcaatatactacatactacattgcagatcaacaaactcctccgcagggaccaccgagctactcgtccgactggggcgtccaatattactttcaaaggaatggcgtgcaaattggacagatggcgcactcaatttggctttacatcgtcccatcgggcatgtatggagtcgtgaactacctaaaggaaaagtaccataatccaatcatcatcatatcggaaaacggaatggatcagcctggaaacctcacgcgcgaggagtacgtgcacgacgccgtgaggatcgatttctacaagaactacctgacggagctaaagagagggatcgacggcggcgcgaacgtgatcggctacttcgcgtggtctctcctggacaacttcgagtggctgtcgggctacacgtccaagttcggcatcgtctacgtcgacttcgcgacgctcaagcggtaccccaaggactcggcgtactggttcagagacatgctttcggggacgggctccaaggctgctaccccgcagactggttcaggcggcaggccggctggttcggcttcagccacctcgaacggacctgccttgctggtctcccttttggtctccttgggtgttctgcttccatccatcttcatggtttcctcggtctaattagaaatgtattttcatagtacggatttgtagttgtgtggatgacaacatgttccttttaagaatcaggacatgttgcatcgatgcgggacctgttgtaggaatgagaccatgattcagggcttattgttcagagcc

SEQ ID NO: 2680 - DNA, 1069 bp, Zea mays
  Clone ID: 700221087_FLI
ctctcatattggcataattccaaatttctctcgtccgcaccgccgccactcgccttttcattccgcaccgccgccaacccgccgcctcttctttccatggaagtggacgacggtagccgcgccaccccgccactggacgccgtggccgccgccttcaagtcccaagtcatggagttgcaggacctcgtcctcgcccgcagcatgttcccggccacggcgctgcccgacctcgccaacgtggacgcgttggtgacggcgatggagtcgcaggtggaaaccatcagccgccgccttcaggaggagcttgacgccatccctaaggccaagaagctagtccagcggtccttgaaggaggaagagaagctgcagcatatgcttgcgaacttaccttctggaatgcgcaagaatgattttgctaatcagcacgaacagagctcatcaaggatgctgcctcattttaactcttcttttactgaagctaatgaatgtgaactgaagattaaggatgaaccagttgcagctcctaggaagggaagagcacctgcacctcgttggtatatctcaaccgaggagcttgattcactctcatcgtacatgaggggaagactgactttggaaaaggttaatatcgcaataaatgaagtggcttcatatgcagatgccaatgctcatcttgttacatgccctaagaaaaagttgtcagaagatacatgggaaaaagctttggaactaagggatattgcagcaagtggtgcagtaaagggcaaccatttcttcctggaagcagatataaaaggacctgggttaaaacttgacaatactggcaaagctattcttaccgttcttcgccaccttgggcgcttccatgaagttcggattgggcaccatcgggtctttatactgtcaaagcaggcatgaagatatttcatttgatttgagttggtgcactgtaattcggcaaaatccggtagcctccaaaccgtgatattgcaaaatgtatttcacatgcacctacttattaagagatactccatccgttcataaatatatgacatcattgatttttttt

SEQ ID NO: 2681 - DNA, 1591 bp, Zea mays
  Clone ID: 700221107_FLI
tctcatcccactgactccacccacccacccgcccgctgcctccgccggatctcgtcggactcggatccgcccgaccacgaccaccccgcgccgccgccgcgcagcagcagcagatcagagaagatggccggactcgacaccttcctcttcacctcggagtccgtgaacgagggacaccctgacaagctctgcgaccaggtctcagatgctgttctggacgcttgccttgctgaggaccctgacagcaaggttgcttgcgagacctgcaccaagaccaacatggtcatggtctttggtgagatcaccaccaaggccaatgtcgactacgagaagattgtcagggagacatgccgcaacattggtttcgtgtcgaacgatgtcgggcttgacgctgaccactgcaaggtgcttgtgaacattgagcagcagtcccctgatattgctcagggtgtgcacggccacttcaccaagcgccccgaggagattggagctggtgaccaggggcacatgtttgggtatgcgactgacgagacccctgagctgatgcccctcagccatgtccttgccaccaagcttggtgctcgtctcacggaggttcgcaagaatggaacctgcccctggctcaggcccgatgggaagacccaggtgacagtggagtaccgcaacgagggtggcgccatggttcccatccgtgtgcacacagtcctcatctctacccagcacgacgagacagtcaccaacgacgagattgctgctgacctgaaggagcacgtcatcaagccagtcatccccgagcagtacctcgacgagaagacaatcttccacctcaacccgtctggccgcttcgtcatcggcggacctcacggcgacgctggcctcactggccggaagatcatcatcgacacctacggtggctggggagcccacggcgggggcgccttctccggcaaggacccgaccaaggtggaccgcagcggggcctacgtcgcgaggcaggctgccaagagcatcgtcgccgccggcctcgcccgccgtgccatcgtccaggtctcctacgccatcggcgtgcccgagcccctgtcggtgttcgtggacacgtacggcaccggcgcgatccccgacaaggagatcctgaagatcgtgaaggagaacttcgacttcaggcccggcatgatcatcatcaacctcgacctcaagaaaggcggcaacgggcgctacctcaagacggcggcctacgggcactttgggagggacgaccccgacttcacctgggaggtggtgaagcccctcaaggcggagaagccgtcttctgcatgaggcgcctcctctgttttggaagaagcttttggtctggtctggtctggtctggtgtgcctgcgctctatcatgcttttttatggctcctacttgtgattcttgatctgccccttgcttatcatttgtactgtactgtcactgtcctaataagtggtacgtgtgcggggtcgtattgtgtctgcttattcacctagaggattatttctggttttgctgcttatgtaatgcttttaaaaccatgaaagaagctacaggctcctacagctgctttgag

SEQ ID NO: 2682 - DNA, 1318 bp, Zea mays
  Clone ID: 700221225_FLI
ccgtcaccatggccaccgccactacgtccgcctatcattgcaacgccgtcctccaccttcccagacctccgcagttccgccggctcctgccccctctcccctccctcgtcacccgcagagccgcgagcgtcgggctgggggtcgcccgtctcggttcgagggcgagggcaagggcaagttccgtaccgccaccgccaccattttttgaaaccgtggaggaggaggaggaggaggaggaggagcgtgggtggtcggatgcggaggcgggattcagtgacgaggcagaggatgagcaggagtggtcgggcggcaacggcgcggcgcgcggggaggacctgggcgcggacgccggcgaggaccttagcgggtgggcgcggcagtggccgcgcccgcgggagctgttcgtgtgcaacctcccgcgccgctgcgacgtccaggacctgctcgagctcttcacgccccacggcaccgtcctctccgtcgagatctcacgcgatgccgagtccggaattagccgaggaacggcttctgtgacgatgcgatctctagcagaagctcgggcagccatcgacgctctggatggattcgacatggatgggcgtgaggttttcgtgaagctagcgtccgacgtcatttccaacaggaaaaacgtgaacctggcccacataacgcccacgaaggaccacatcttcgagaccccgcacaaggtctacgtcggcaacctcgcgtggtctgttcagccgcaagacctgagagagctctttacccagtgcggaaccgttgttagcacgaggctgctgacggaccgcaaagggggcaggaaccgagtctatgggttcctctcgttttcttccgcccaagagcttgaggaagcgttaaagctcgacagaacggtcttcttcggacgggatatcgtagtgaaggaagcccatgtagagcgccagacgcgctgagccgctgagtgttacccttgagaactgcactttttttgtctgcctcgttgactgactaagctcatgctccaggcacaagctacacagctgacgaagaagcaattgagcggttcatcgcgaaagagttaaaaaaaaaaaacggtagtgtaaattagtaccattgctgcaactttgtcagcgccgccgtggatgctggtgtgagaaattctaggacgaactgagaactggtattgtagtggtaatacatgttgttttagcttcttataataccctccatacagtaatagtgctccttcaccacacgtttctaatgtctcgaatttttgtttgtgaaagggattctaattgagttggtcagattgtag

SEQ ID NO: 2683 - DNA, 465 bp, Zea mays
  Clone ID: 700221258_FLI
ctcgagaaggaatatgaggaggctgagaaggcccgcaagcgacgaattgccatgggtggtggtggtgagagtgatgatgaggcagcagatgacgaggatgaggaggaggcgctgccctttgcctgcttcatttgtcgggagccattcgttgatccagtggtcaccaaatgcaagcactacttttgtgaacattgcgctttgaagcaccactcgaagaacaagaagtgctacgtctgcaacaaaccgacgctgggcatcttcaacgctgcacaggagatccgcaagaagatggcacaggacaagaagcagcagcagcaggagtaggagagctcaaaacacaccgttgctaatttagctgtgttgtacaacgatgattggtgcgataactagagtccggtatttttcgccatcagataaaagagaccaagttttgaacgatcacaatgaatgcattcagatccagtc

SEQ ID NO: 2684 - DNA, 1640 bp, Zea mays
  Clone ID: 700221260_FLI
gtgttaagtaacacaagtcaagaactatcaagtagtagcaatgatggtgcagccattgagttttcggagtcaactggatctgtaaaaactgaacagactgagaagtctgatacggatttttttgaagctctaccccgcagtatagaaaatatttcagtttcagcatctactacaaacacagggagtcttggaggtgatggaagtgagaagtccaagcctaacttagtgctaagtaatattgatttgagagagatgcctaataagaagctatctgcttctgcaccaccgtttaatccatctccaccatctgtacttagcccactttctggcaatgttggtctcccgccaccaggtgccattccaggagtagcaccttggcctgtgaatgtatccctgcatcctgggcattcaactatggtgccaagtggtcctcctttgtgcacttcccctcatcatttataccctcctgctccccgatctcctaatctcatgcatcctgtgccatttatttatccaccatatagtcaaccacaggtggttccaaacaccacatttcccatgaacactaatatttttcggcctaaccattatggatggcaaccttatatgggcccagcgccatcagaatttgtgccaatgtcagcatggtcaagtagccatacaattgacttcattcccacaccacatgttgttgatcctatttctcaatctttagcagataagcatattcaatctgatgcagctgttgttagtataggcccttcactggacagtagcgctgtagtggccaaagaggagatggagactcctgcagtggcagtaagtggcaatttgataagcaacaaacatgatgatcaagataaacaattaaaggatgccactagaattgaactgagtcctgaaatgcaagaagacaacaagcatgatgaaggtagtttcaggatatatgtaaaggggaaaagccgtcggaaacaaactctgagaatcccaataagtttgcttaacaagacatatgggtcacgctcatttaagcttgtctataacaaagtagtcagagagaatgacatcttcaggccttcaagtgtgtcctttgctgaagttgtttcatctggcaactaggttatgcaaattctaaagcatctaattatgacattagtacccaaaagaaaattgtcatggatctccaattcaaatgtactgaaatgaagttattatttggaaggcagcattattctcataccatattccagatatgaaatcccaccactcgaaactattcaaaaaggataaatattttttcatttcaaatacggtaccgacaatcctgtgtagagtccagaaaagatgcaaggaattttgtgagatccagaactaataggagatggaagtattacgaataataatactagactgtctagacaggctgaattttcttcaattttgatagattaagagaaaggaatcctcttcaatttttggagctcacttttgggcttttgaagccgagcctttagattttgttcttttgttacgctgcggcacctaataaatgacttgccttctatgttttcgagaaacttacattattcttttttatataacaataatactgtctattcagtaaagctgcttgtttgtgg

SEQ ID NO: 2685 - DNA, 1389 bp, Zea mays
  Clone ID: 700221264_FLI
cacggcggtgccggcgatggcaacccgctactggatcgtctctctccccgtgcagtctcccggcgccaccgcgacctcgctttggtcgcgcctgcaggatggcatctcccgccactccttcgacaccccgctgtaccggttcaacgtcccggacctccgcgtcggcaccctcgactccctcctcgcgctcagcgatgacctcgtcaagtcaaacgtgttcgtcgagggcgtttcgcacaagatccggaggcagatcgaagacctcgagcgcgccggaggcgtcgacagcggggccctcaccgtcgatggcgttcccgtcgacacctacctcaccaggttcgtgtgggatgagggcaagtaccccacaatgtcgtcgctcaaggagatcgtcggcagcatccagtcgcaggtcgccaagatcgaggatgacatgaaggttcgagcagcggaatataacaatgtaaggagccagcttactgcaatcaacagaaagcaaagtgggagcttagcagttcgtgacctttccaatctggtaaaaccagaggatatggtctgctcagagcatctagtaacacttcttgctattgttccgaagtactcccaaaaagactggttgtcaagctatgaatcactcgacacatttgtggtacccaggtcatctaaacagctctatgaagacaatgagtacgcactctataccataacactttttgctaaggttgttgacaactttaaggtccgtgctcgcgagaagggtttccagattcgtgattttgagtatagtcctgaagcacaagaaagtagaaagcaggagatggagaagttactgctagagcaggaagttatgaggacctcgcttctgcaatggtgctatgccagctacagtgaggttttcagttcctggatgcacttctgcgccgtgcgcatatttgtagagagcattcttagatacggtctgccaccatcgttcctgtctgccgttcttgctccgtctacaaagggcgagaagaaagtaaggagcatcttagaggacctttgcggcaatgtccatagtatttattggaaaggcgaagatgacgtggcagttgctggtctgggaggtgaatcagaggtccatccttacgtctcattcaccataaactttgtctgagcattactggtgttacgccctcaagtaaatcgaaacgatggaatggttctgtacattactagtgttacggcaattctttgttgatctgtcagcttttatctgatcatgtaatttatatattggacatataagccgatcaataatgtagcttttgaggagactggaagtagatggatcacgatcaccatgtaatttgtaaaatggggctactgttactgtaataaaggcacatgtcaaat

SEQ ID NO: 2686 - DNA, 2206 bp, Zea mays
  Clone ID: 700221310_FLI
tattttctaatcaagataaaactggagcagaatttgctagatgcttactctggagatggatggaatgggcaaagccgagagaaaataaagccagagaaggaactgcaacgtgccaggaaacaaatcataaaatgcaaaattgctatacgtgatatcatccgccaacttgatttgtatacttctactgggagtgttgatgacccactaatgcctacagatcagtccaccaatcccgaacataccatgtgctcaacatgcaagtctcatgaatcatttcccagcaataaaattatcttctgcaaagggccctgcaaaagggcatgtcatgagaaatgtttggaacctcccttaaacaaaagcgtacttccaacaagtagccatgggtggctttgcaaattctgtttgtgcaaggtgaggattttagaaactattaatgcacatctagggacgagttttacagtgaagtgccactttgaagatatattcaaggaaactactgaactaatagactctgaggatgcactagatgaagattggctttctgagtattcaggtgatgaggactatgatcctgatgaaaatgaggccagtggcgactgtatggacagcggggagaagattatgtctgatgattccaatggttcaggaagccccctttattctccaaatgacgatattcctgacttcatatcagcagacttaaatgttgtggaagggttttgtcataccaatttagatttaggcattgatgccgttgaagatgattttgcacagatcctcacctaccaaaggccaagaagagatgttgattatagaaggcttaacgaggaaatgtttgggaaaataaccgggaatgaagaacagagcgaggacgaagattggggccatgaaaggagaaagaaaaggacgcattcaggtgttgctggggataattctgttggtttcttgaacgttatatctgatgaaaagagccagaagaaggggagaaaacttttcaggattcctcctgcagctgttgaggtacttcgcagagcttttgctgaaaatgagcttccaccccgggatgttaaagaaaatctctcaagagaattgggaatttcttttgaaaagattgataaatggttcaaaaatacacggtgtgctgctctcagagatcggaaggctgaaggaaacagtcataatacagctcccagcaaaagctcaaaaaataaaggaaaagctggaatctcaggcaagactggaaggaatggtcatgttactggtccctgcaataatttgagaacaaatgaagaaaaaacaggtatatcggggaagtttgattcaggagacaactcttgtttggttcccttctctgaagtcatcaatgtgcctacgcgattgccacacaactttgagatgaggaagatggaatcaactagaagtcctgcgaggctacacaataaaggagggtgcctgtctgcaacaatccaaattaaggagagtacattgttacccacaggcaagccttgttggcagtcagaaatgagccatccaacaactaatgaagtgagcacttcagcgcaagctactacttggatcgacgcgggggcgtgtgccgaggagcaagaacctactccttgggtggacatcggggcctcagactaccagcctttcctggatgtgatcgacgacatgtgcggacttgagtggaggctgcagagactgaaggagaacatgctctcatctagcatagacggccaaaccgccgccagtgagagtgacaaaagaaaccagaccgtggtgctcgtgccaactgccgagctcaaggaaaaactgccgcatgacggtttattcgggcattattgcccataggtcttatatacatagcggataaactgtacagagaaccaagaagaagaagaaaacaaaagggaaacagcaaacagacaggtgcccgcttacataccggtccatactgtcaggcactgctctcctttcttgggcctcgacacgactaatactgtgctagtccagaacagatgagccatagccattacctgtgtgcctcggaggttcagttcatatgttgtatgtatatcagaagagtcgtgcttagtagtagcaagaacctagtcctgatccagaccgtgaatctggatcatcttgtcgtgtggttgtaccgtgcagaacagacagatgtcggctagtcgtttggttcttaaggaag

SEQ ID NO: 2687 - DNA, 1167 bp, Zea mays
  Clone ID: 700221317_FLI
ctgctgaccccgagcggcaccagcgcgcccgccccgccatggctatccccaacgcctttgactcctccctcgcggtcaggtcggccgtcggcgcggcgctggcggccgtcatcgccgtccgcgcggtacgccgccgctccctagacgcctcgggcggggtcgccggcttcgtcgtcatggcggtccacatcgcatgcggctacaggtacggggcgctgctgttggccttcttcttctcctcgtccaaggtaaccaagatcggggaggaccacaagcgccgcatcgaggagaacttcaaggagggcgggcagcgcaactggatccaagttctagcaaatagcacaattgccactgtactggttgtgatatttgcactaatgactggagggcaagatcagtgcatggactcaaatggttcaaagcttataactggcatcataggtggtatcattggccactactgttgctgcaatggagatacttggtcatctgaaatcggtgtgcttagtaatgaacaaccaaggcttattacatcccttaagcctgtcaggaagggtacaaatggtggagtcaccttacaaggacttcttgctgccacaggaggaggccttatcattggtctcactttcgttgttgttggactgttgactgctgaatgttcttccgatatggccatcaggcagctcctagtactgcccatctctgctgcagctggtttgcttgggagtctaattgattcattgctgggagctacacttgaattcagtgggtattgcagtgttcggaagaaggtggtcagcaaaaggggccctacggttacaaggatttctgggatgactatcctggacaacgatgctgttaatgcagtatctattctgctaacaactgtacttacagcttatgtatgcatttacatcttttagaaaactagttgggtaaatcttgagttgaaccctatttttcattgggcaatgtattgcgaccttagcctgcacggttcctggaaatggaacagcctgcaacttctctgtgactgtattggtagaatttgtattatggcacagaaaggccgattcatctccagcttgatactaatggttcactggaaactttttttattcccattgcaaaatgttacgatattggaattatccttcatacggattt

SEQ ID NO: 2688 - DNA, 810 bp, Zea mays; identical to SEQ ID NO: 1783
  Clone ID: 700221318_FLI

SEQ ID NO: 2689 - DNA, 616 bp, Zea mays
  Clone ID: 700221443_FLI
ccgacacgcatcgactcccgccgccgccgcttccgcttccgctccgtcgctcgcctcacgcctccggcgccacctccaccatggccccgaagaaggagaaggccccgccgccatcgtccaagccggccaagcccggaggcgggaagcagaagaagaagaagtggagcaagggtaagcagaaggagaaggtcaacaacgctgtgctcttcgaccaggccacctacgataagctgctctccgaggtgcccaagtacaagcagatcaccccatccatcctatctgagcgcctcagggttaatggatccttggcacggagggccatcaaggatctgatggcaaaggggctcataaggatggtctctgttcattctagccagcagatatacaccagggcaaccaacacatgaggggtgttttgcgtcttgcggacgttatctagtctagacgacttgatgttgctattatatcaagtttattttaatcgtggctcgatcaatcttactgtcgtgttgaatgtcgaatatttttgagattattgtactattttaatatcatgtttttttataacatttaagaccatgttgccatccaaattttaatcttggtgaggaatatc

SEQ ID NO: 2690 - DNA, 919 bp, Zea mays
  Clone ID: 700221461_FLI
caacattgcacagtttgctgcagaccttgggattccctttcagttcagtgctatcagcgctgatacgatcaaccctgcagagctcgtttctgccaccgctgatgaagttgtagctgttgtcctcccggttggttgctctgctcgtgcaccaccgctgccagcgatccttcggttggtgaaacagctggctcctaagattgtgatagccatagaccatggcgctgatcgtgctgaccttcccttctcgcagcacttcttgaattgcttccagtcctgcatgttcctccttgattcgcttgatgctgctggcattgatgctgattctacctgcaagattgagaagttcctgattcagccaagaattgaggatgcggtgcttgggcggggcaaggtggacaagccaattgcatggagaagtgcatttgcagctgctgggttcgcacctgttccacccagcaatttggcggaggcacaggccgactgcctcctgaagcgggtgcaggtccgcggtttccacgtggagaaatgcggggtcgggctcacactatactggcagtgtggcgagcttgtcactgtatcagcatggcggtgctgatcagcgatccacgcctgtgcgcaccatgttccaccaacatttgctggcatcttcaacccgagtaatgtgtattttgtcttgcaattaaatgctactaaggaaactgatatattgctgttgaaccctccatgttcatcatctttgcaacttacgagctagaactagtggatttttagcaatgttggtgccaatatctctagtgtaatgatgttggcctaagattttaccctgcttgctctcagctcactagacattcccatgtcatttggaacactgcttgtgaggagaggttataattaacctatcaaatgtctgtggtatagt

SEQ ID NO: 2691 - DNA, 1822 bp, Zea mays
  Clone ID: 700221523_FLI
acccgatcaagctgtgggagcgctacgtcgagtggctctaccagcacaaggagctcggcatcttcgtcgacgtcagccggatggggttcacggaggagttcctgcggcagatggagccgcggatgcagcaggccttcgtcgacatgcgggagctcgagaagggcgccatcgccaaccccgacgagggtcgcatggtgggccactactggctccgcgacccggccctcgctcccaactccttcctccggaacaagatcgagaccgcactcgacaaaatcctcgccttctcccaagatgtcatctctggaaagattctttccccatctggtcgtttcacttcaattctctctataggaatcggagggtcagctttgggccctcaatttgttgccgaggcacttgcacctgataaccctccactgaagataagatttattgacaacacagatcctgctgggattgatcatcaaattgctcaactaggacctgaactggcaactactcttgtaattgtcatttctaagagcggaggcacacctgaaacccgcaatgggctactggaagtacagaaagccttcagagatgcgggtctgcaattctcgaaacagggtgttgcaatcactcaagaaaattctctgttggataacactgccagaatagagggatggttagctcggtttcctatgtttgactgggttggtggtaggacttcagaaatgtcagctgttggtttacttccagctgcattgcagggtattgatatcaaggaaatgctagttggtgcagctttaatggatgaggaaacccggaacactgtggttaaagcaaatccagcagcattgcttgcattatgttggtattgggcatcggaagggataggcaaaaaggatatggttgtgcttccttataaggatagtttgttacttttgagtagatatttgcaacaacttgtcatggaatctcttggaaaagaattcgacctggatggcaaccgtgttaatcaagggctaactgtatatggtaacaaaggaagcactgaccagcatgcttacattcagcagctgagagaaggtgtacacaacttctttgttacgtttattgaggtcttgcgtgacaggcctgctggtcatgattgggagcttgaacctggagtcacgtgtggtgactatttgtttgggatgttgcagggaacccgttctgctctttatgcaaatgaccgggagtctatctctgttactgtgcaagaggtaactcctagagctgttggagcactgattgcactttatgaacgtgctgtggggatttatgcttctttggtaaatatcaatgcctatcatcagcctggtgttgaggctgggaaaaaggcagcaggagaagtattggcccttcagaaaagggttctgactgtattaaaggaggccatctgcgagaaccctactgagccattgactctagatgaaattgcagatcgctgccattgccctgaagatattgagatgatctacaaaataatccagcacatggctgctaacgacagagcacttatagcagaaggcagctgcggctctcctcgcagtgttaaggtgtacctcggtgaatgcagtgtggacgaagatatgcaggccgcatagattctgtgtctggatccgtgtaacattgttggaataaatcagaagcaacacaatagcgatgctatgcatgggtgtcgctgatgctgatgtctcattagtttcttgtttggtggtgcttgcacacgattgccggaacgatgtaattttagaatttgatttttttggccccttaaaatataaaatacaaagat

SEQ ID NO: 2692 - DNA, 507 bp, Zea mays
  Clone ID: 700221588_FLI
tcactaccctgtgaccatggtgcagtttcaaagatcaagagggtagtgatggacagagatacatacccaaggaaatggggacttggcccggtggcactcaagaagaaaaaactggttgctgagggtctacttgacaagcatgggaagccaaatgagaagacaccaactgagtggcttcggaatgtggtgcttcccactggtggtgatgtttcaattgccagcattgcagctgctcctgagccagagaaggtgaaggtggagccggacacagctgtgactgaagaggtcaaggagaagaaaaaaaagaggcagaaggatgatgctgaggatactgatgcttctgttcctgcgaagaagatcaaagttgaggaagccactgaagcagtggaaggggagaagagtgagaagaagaagaagaaaaagaaagacaagggcgagtcagagccagctgaggtcgttgagggcaaggaggaggttgctacaggtgacgagaaggggagtgagaag

SEQ ID NO: 2693 - DNA, 1459 bp, Zea mays
  Clone ID: 700221591_FLI
gggtgcagaaatttcaatatctgttgcggtgcctcaaactatgggcaagaaaaagaggacttcattgccatctacttggcttcttcgctggaattcatttggctatccttgctgcatatgtttgccgcagacatccgaatgctagtataaatactctgttgtctttgttcttcgacatttttgttcactggccttggcctcttccagtgagtttgcttgatccgcctgttccttgtcggggtcctgatgggtgctctctcatgcccataatgttgccatgtattccaccagaattttgctcctctagtacaacagaaagtactttcagcaaaattaaagaagaactttggcgtggctatgctctaagcaaggataccagaagtactgattttaactggagttggctctttgcaccttttccatatggtgcaagatacaaatgctttctccgcatagttctctctgctccgatgggagaagaattgcgtgactgggttggatgggtgaaatcacgattccgcaaccttcttctcaagctggagagtcttggtgtttactgtgaccctgatccctcagaacaagttgatcataccatcactgatccaaatgttgtattcttctggggtctcatctacagaagtaatattcaaatatgtataagttctctcaaagaagatttcatgaaaagtgtctgcaataacatctatggaaaggaaaaatgtgcccattcagacatcacaatgtccattgttgggcctccccagctgccaaaaagtgtctttgatctctcagtgtactctgaaaagctgccacaacatatgatggggcaccaactaatgaagcagaactacaatgcagtcagttaggctcagctgtcatattgcgtgcgagcttcatatgtcaatatcacaacagcaagaagctgctgttgaagtcgttttcaacatcagatttgaattttgtactgccctttttagatgtaggggcttgttcatgcctcgggaacaaggaatatgggagattttttccttgtgaagctggatgtcgatagctggatctcttcaagcatccagcaaaatgagatggaagcatctcttgaagcattcaagcgacttattcctgttatgaggtgtgtgtgcaggtacatgcatattcatgtacacatcatagcaattggtatacaagtgaggaggaggtacggtatagctgtatgtaaactgtagatgtaatgtttgtactcagcagcagaaatgtgtaaattgcttcctgttagcgctgcttctgggcacagatgccgaggttgatatggaggccatgaatggaagctatatattccaggccagtatgcaaatgcaagtgttttggatcgattcgacccacttttgttttttaggctgtaaaaaaactgtgtcctagaatccaaggattcttatggtaatgagtaatgactttgtggaag

SEQ ID NO: 2694 - DNA, 784 bp, Zea mays
  Clone ID: 700221618_FLI
ctgagactacctgtgtccggacgcccggtctagcaactagcaagcgccgcatccctcgcctcttcccgacttgccccctcgattcgatccgagcttacttctagggttcttggccccgctccaccgtcgcccatggcagacgatgccaaccgagcggccttcatggagctgcagtcccggatgatagataccaccgcgaagatcaagcagttacaaacccaaatgcgttctaaagaaggggaaaagaagcgtgcctaccttactttggaggaacttcgccagttgccagatgataccaacacctacaagactgtcggaaaagtgtttattctggagccaaagtcagttctgttcaatgagcaggagcaaaagcttaatgacagtgagagtgcgatagcttcaatgcagacatccaaagactaccttgagaaacagcagggcgaagtggagaacaatattagggagctgcttcaacaggacccaggacttgcgcgtcagatcctctcaatgaccgttcaatgagagttgtttttctctccatttaattttttagataatttgtaatgtcgcagtttgatcagtcatgctgtggtcttgccttatctgtgagacatgtgcggtctgtaatttctgaggtgtttggctggtggaatgatgtggtccatcattatctcactctagtgctttgtttggtttgtggaatagattgagttaattcatcatcatcccattcctcacaagctaacaattaatgcaaataatagcataaggaatgggttatttc

SEQ ID NO: 2695 - DNA, 2124 bp, Zea mays
  Clone ID: 700221624_FLI
atttcgcttcggcgactggacgggttcacaattggaatggcatccagcaagagatcacgggcagggtgcagcggaaagttctttatgagatcagttctgctgttcgaatatttgggagtgccaatgatactgaagtgcgtgctactctgtgggtacaagaatatggtcgtgagcgatatgtgggactggccaaaaaccagacttctgatcagcaatggacacatttgaaaggaaagttcctccttcatgctccctttaccaaagctgttattttcatagaagggcctcctgctggaattgacattcttgtagatggtcttgtcttatctccagcaagaaagctccaagctgcaccatgcccaaaaattgagaatgttctgtatggaactaatctattgcacaataatggcttcactcgtgggctttctgggtggagtcctatgggttcatgtcgattgagtatccagactgaagcaccccatatgttaccttctatcttgaaagaccgtgcaagccagaagcacataagtggtcattatatccttgccacgaaccgcacagatgtttggatgggtccttcgcaggtcataactgataagctaagattgcatgtcacttacagagtatctgcttgggtacgagttggttctggaggacatggacgtcaccatgtaaatgtctgtcttgctgtggataaaaaccaatgggtcaatggtgggcaagtggatgctgatggggatcaatggtatgaaataaaaggagcattcaaacttgaaaagcagccatccaaagttactgcatatgttcaaggccctcctgcaggtgttgatatcagagtcatggactttcaaatatatgccgtcgacagaaaagcacggtttgagtatctgaaggagaaaacagacaaggtaagaaagcgtgatgttgttctaaagttccaaggatcgaatgcagtgaatcttctaggttcatctttgaggatacaacagaccgagaatagctttccatttggatcttgcatcgcgagacacaacattgagaacgaggatcttgctgagttttttgtgaagaacttcaattgggctgtatttgagaatgaattgaaatggtaccatacagaagcagaacaagggagacttaattataaagattctgatgagttgcttgagttttgtgagaaacataagatacaggttcgtggccactgtttattctgggaagtggaagacgctgtccaaccttgggttcagtcattgcaaggtcaccacttaatggctgccatccaaaatcgtttgcaaagcctattgtcaaggtacaaaggtcgatttagacatcacgatgttaacaatgagatgctacatgggtctttctatgaagacagattgggaagggacattagagcttacatgttcagagaagcacataagcttgatccttctgctgtcctatttgttaatgattacaacgtcgaagatggatgtgacacaaaatctacccccgagaaattggttgagcaggtcgttgatctccaagataggggcgctccagttggtgggatcggtgtgcaaggtcatatcagccatccggtaggagaaatcatatgtgattccctggacaagctcgccatactgggtctcccgatctggattactgagttggatgtcacagcagagaacgagcacatacgagctgatgatctagaggtgttcctccgggaagcatttgcacatcctgctgtggggggaatcatcctctggggattctgggagatgtttatgtttcgagagcacgcccatctggtcgatgctgatgggacaatcaacgaggctggcaggaggtaccttgctctcaaacaagagtggctgacccgtatgaacggcagtgtcgatcaccaaggagagtttaagttcagaggataccatggttcgtacacagtggaagtgaacacgccttcaggcaaggtagctagatcgtttgttgttgacaaggatagcccggttcaggtgatcgctctgaatgtttaatgtgtgggaaatcatgcgcgtgtcctgtattttagcgatgtactgaggtgttgaacacagatagtttcatagctgatgccacgccttcagtgtacagaat

SEQ ID NO: 2696 - DNA, 2100 bp, Zea mays
  Clone ID: 700221631_FLI
ctcgtgaaggccaaagagcagttgctggacaacgagaaggagaagtgcagagttcttgctgagctggagcgtgccaagaaggtggctgatgaggccaatgccaagctgcaggatgctcttgatgtgcaaaggagggctattgaagcgcaggaggcagacaaactccctgctggagagtcggagcaggcaagcatccacgaccagcaggaggctgatgacactgtgctgcggtcgacagtggagcagcttgagaaggctaggtacgagctggccaacgcaatcgatgccaagaatgaagccctcagccaggtagatgatgccgttagggcttctgaggcgaagacccaggaagttgagcatctcattgcagaggttacacacctcaaagggctggttgattccaaggtggatggcaacaggaagaagactgcagagaggatacagaatcttgaagaagagaactttgcattaaagcttgagcttcagaaaaaaaaggctgctgaagaaaaggcaattcgattggagcgcatgattgatgaacttcagagtgatgttgatgatgctaggaattttggttccaagtcaaagcagttagccgatgaatggcagaagaaggcacagcttctcgaggtcagattggaagaggctgatcagtcaaatattttgaagggcgagtctttgaattcagcaatggaagaattggattcaacaagtagtttgcttcgtgacagagaatctgaagttgctgctcttcgtgacaaagtcaggttcttggaggatgagctgacaaagctcaagaatgatattgttgtgtccggccaacgggcagatgcagcagagaaagaggcggcggatctatggacagaggttgaagggcttaggctgaagctccatacagtggaagaagagaaaatagaggccctgaacagtgataagagtactagcttagaaattgagaccttgaatgaacagaagaaccagctggctgacaagctcgaggcaaacaaagatgagcttgagaaaactaagaaggcaatggagggtctggcctcagccttacaggaaatgtcagctgaatccagagaggcgcgagagaagtaccttctcaaacaagatgagattgagcgtgctcaggcacaggtagaggagcttagcttgagtctgaagaatactaaggagaactatgaactattgcttgatgaggcaaactatgagaacgtttgccttacgaaaacagttgaaagactgaaagcagaagcaaagagtgcacatgatgaatggcattccaaagagctaagttttgtcaattctattaagaattcagaggaagagatagttgctatcagagttcagttggacaggaccttggaggttgttaaggagaaagaaaatgaaaacactgagttgcaggagaagctgcagcagcttgagtctcagctaatggaagcaaacagaatcagagaggaagccagcgctgaaactatccgatggaaggagaacatattagaccaagagaatgaattacagaacataaaacaggagaacgacgacctgcaggcaaaggaattagcagcttctgagaaggttagggctctctctttccagcttgctaatgtaaaagatagcatgataaatggtaacagcaaggaaggagataatgagaaggagggtactgaagaggttgatgaacctgttgtggtagttgccaaaatgtgggagaacggcaagtttgctgactatgattcatctaaggagaaggataatgatggtgactcacaggttgatttggaatcaaacaagggggatgcaggtcttgacagcaatgggttgcactcaactaaggagagcagtggcatggtatcaactaaacagccgcaacagcataagaagaagcctttgctgaagagattcggtggtttgctgaagaagaaaagcgaaaattagcataaaaccatctgatgatattctttgttctatcttttgacatatttcttggattagctatctaattcctgagtcccccctccccccccacccatattatggtaaactgagtgatggatgcttcaaagaatacaaaatgtcgactgtatttacatc

SEQ ID NO: 2697 - DNA, 1005 bp, Zea mays
  Clone ID: 700221670_FLI
gttcgccacaacattaaccgggcttcattttgtgactactaccttgatgactatcttatttcgttggttaggcctgagtcagccatcccacttacccctagcagatctagttaaatttgtgatattttcgaacttgtcaattgttgggatgaatgtgagcttgatgtggaactctgttggcttttatcagatagcaaagctgtgcatgatacctgcatcatgtcttctggaggttgtatttgatcatgtacattattcccgggacacaaagctgagcataatggtcgtgcttataggagttgcagtctgcacggttactgatgtcagtgtgaatgcaagaggtctaattgctgctgttatagctgtttggagcacagctttgcaacaatactatgtccattttctccaacgcaagtactccctgaactcattcaacctcctgggccacacagctccagcccaagctgggtcactgctgctagtgggaccatttgcggattacttgttgacaggcaaaagggtggatcagttcagtttgtcatcgcttgctctgtttttcctggcactctcatgcttcatcgccattggtgttaatctgagccaattcatctgcatcgggcggttctctgccgtatccttccaagtcctaggccacatgaagaccgtacttgttctgtcccttgggttccttttctttggcaaggagggcctgaaccttcaggtagtccttgggatggtcctggccgttctcggaatgatatggtacgggaacgcgtctgctaaaccaggtggcaaagagcggcgcagcatcctgccggtgaggtctgcgagtctcaagggaagttccgaagaaaaggccggtgccgagaaatagtcttgctatatctgactgcaaactttttatttagatggggaatttttcgttccgaaggttaaatttctggtgaggtgacgcgagtatcacagattgggagctctgcattatgtctgacgcgcacaaaacaa

SEQ ID NO: 2698 - DNA, 1061 bp, Zea mays
  Clone ID: 700221747_FLI
gaaaaagctcgttctgcccccttccttcgcatcgaaacaaaccctccgtctccaaaagagagcccaatcctaaattcccaatccctcaaaggaaggaggattcttcagcgtctcgcttgccggccccgaatcgcagtcgccgcccggatccgaggaaacaagtcgtcgtcttgctccaccgtccgcccgccgccatgagcttcatcttcggcaagaagaagactcctgctgagctgctgcgggagaataagcggatgctggacaagtccatccgggagattgagagggagaggcagggcctgcaggcccaggagaagaagctcatcaacgagatcaagaaggtggccaagcagggtcagatgggagctgtaaaaattatggcaaaggatcttatccgcacaagacaccaaatcacaaaattctatgcactcaagtcccagctacaaggtgtatctctacgtattcagactctgaaatcaacacaagccatgggtgaagccatgaagggtgtgacaaaagccatggggcagatgaaccgacagatgaatctgcctgccctgcagaagatcatgcgggagtttgagatgcaaaacgagaagatggagatggttagtgaagtgatgaacgacgccatcgatgatgccttggagggcgatgaggaggaggaagagacagaggagctggttagtcaagtccttgacgaaattggcatcgatatcaactcagagcttgtcaaggctcctgcaactgcagttgcgaagcccgtcgcagcggggaaagttcctgctcaggctgaagccgcaggtgggccagatggcggcatagatgatgacctgcaggcgcggctcgataacctcaggaagatgtgatcactggctggagcctaacaaaacatatccacacgctttgtttgtagttttgtaccataaaaatatagccatttattatggcaatcttctttttcgtatctgagttgcagagtgtttggcattctgtccattgtacatataataatatatttaacaccatgcactaggccgtgcgttctgttcccaagttcc

SEQ ID NO: 2699 - DNA, 1183 bp, Zea mays
  Clone ID: 700221779_FLI
cccccactcccgagtggccgaagccccgaccggcgaccccgcagatctgtcccattgttctccgtcctccccgtcgtgtcctccttgatccttcttcgagtggcaagtgctgacctcgcctcctattcctccggtagccctactggagcgccgggcgcacagatctgcccacccctggacgctaggcgctgcccagctcttccctgccagccggtcgcggcggctgccagccagcacggcagggctgctgttgcctgctcttgtcctccggcacagcgcagggtgtcggggtcgctcccagctggccatcctctcggcccccttgttgcacagcgagtcaatttggtgaatccccctcccctctcacgctccaccactgatcatggggctactcagcattatccgcaagatcaagcgcaaggagaaggagatgcgcatcctcatggttggcctggacaactcagggaagacaaccatcgttctcaagatcaatggggaggacaccagcgtcattagcccaacccttggattcaacatcaagaccatcaagtaccacaaatactctttgaacatatgggatgttggaggacagaagacaatcaggtcttactggagaaactactttgagcagactgatggattagtttgggttgttgatagttcagacataaggaggcttgatgattgccgtgctgaactccacaatctcttgaaagaagagagactagttggagcttcattgttggtttttgcaaataagcaagacatacagggagctctaaaaccagatgaaattgcgaaggttctgaatctggaagtgatggacagaagcaggcactggaaaattgtgggctgcagcgcttacacgggagaggggcttctcgagggcttcgactggctggtccaggacgtcgcttctcggatctacgtcctagactgatgctatttgccgcgtcagtcatcctagactgatgctatttgtcgcgttggtgctacttgagcatcattagagtgtggtgcgtgcattaaagcctgtactaaggccctgtttgtttagggtttatggttttagggtttagggatttgtgttcactcttactcgcttcggatttgcggtggtatttgtttgcttgtgttacattgaggtaaatctaaacgttcatgagttcatttctctttattt

SEQ ID NO: 2700 - DNA, 1578 bp, Zea mays
  Clone ID: 700221810_FLI
ctatagtacgagctccacagtccaagttcgcactcgcgagtgctagcatctctcgggaatggcggagtcgcgtggcttcgtgatggcggctgtgatggtggtggccgtggtatcggtggcgccgcgcggcgcggaggcgaagacgacgatcgagccgtgctcggggtccgactcctgcccggcgctgctgggctacacgctctacgccgacatgaaggtgtccgaggtggccgcgctcttcgccgtcgacccggcggcgttgctggccgccaacgcgctcgacttcggcgccccaggggcggcgcaccgcatcctgcccatgggcctcttcgtgcgcgtgcccacccgctgctcctgcgccgacggcgtccgcaagtccgtctccgtccgctacgccgcgcgcccggccgacacgctcgccaccgtctccgacgtcgtcttcgcggggctcgcctcctccgaccagatccgcaacgagaacggcctcacctccgccgaccccgacgcgccgctcgacgccggccagaagctcgccatcccgctgccatgcgtctgcttcaactcgtccgacaacaacctccccgcggtgtacctctcctacgtcgtgcaggtcggggacaccgtgcccgccatcgctgcaagctacgagaccaccgtcacggatgtcatgaatgtcaatgccatggggagtccagtcgccgcgccaggcgacattctcgccatcccattgccagcatgtgcatctacatttccaaaatccgcatcagaccatggactgattgtagcaaatggaacttacgcgcttaccgctagcaactgtgtgcagtgtagctgtggacctggcagcctcaatctatattgcacgccaacttcactgtcgggaacctgtcctagtatgcaatgtcctaacagcgacgtgatgcttggcaatgtgagcacccatccaaccggtgctggatgcaacgtctctgcttgcagctacggaggttttgttaatggaactataacagcttcgctaaccgcaggtctccaagccagatgcccaggaccacgccagtttcccgcactgacggaaccacctaccacagtgagccacgactcgacgtaccttcctccgttatcagcgcctgggccagcggaagctggtggcgtcatgcctgagccaggctcgccagggccaggctcctcggtgcaagcagggcccttcacactcccgaaagtgtctaaggccaatggccccgccggcagcgtttcagcagctccgttggtgggtaaaccacttcaaatcctacccgtcctggtctcctgcctagccttctacttgcagctctaagtgaacccacatcgcgatgaatcctttagctttgtcctgtccccgcagcctagtatatgcttttgaagcaccacgggacatcattgctcgatcaaactccctctgagttgttgttctagctttgtttcgcgaaatctccccggcaactgcgcgcctaaacggcatatctgatgatgtgttcgctgcttttgtacaaaaagacaatggccctgtgtaaagcagtaaagtggtagctattgttcttc

SEQ ID NO: 2701 - DNA, 1080 bp, Zea mays
  Clone ID: 700221812_FLI
gctgcactcagatagtagaaatggcaacacggtggccaagaattattcatcagttaatgaacacacaaattcaagttctcttgtttcctctgtggccgaggtagatgatatacagtcttcagttggcaagaatggggattcatccttttttactggtttcctcaagaaaggtttaaaggacctttctttattcaaccagtctgtagacagtgctaaggtttatatcaacggtcatccaatctctgaacgagctctccggaaatcagagaagaaagttggtcctgttggccctggttcatattggtacgactaccgtgctggattttggggtgtcttcggacaagagtgtagaggcatcataccaccattcataaaagaattcaactatccaatgcccaagaactgcgctggtggtagcactggggttttcgtaaatgggagagagctccaccagaaagattttgatttgcttgtagggagagggctccctcgaatacctggaaagtcatattctgttgagatatcaggaagcgtgatcgacgatacgactggcacgaagctacgtggtcttggaaagcttgcacccacaatcgagaaaatgaaacgtggctttggcatgcacgtccccgaagagacaaagtagctctatggatacttttgttgatgcttctgttgaaagttttacacacctagaaagctgccaattaatgggagtccaggtttgttgatctgttaggattggtgacagcggtagaaaggctttcacgtcttgaagctcgacagcgatgcagcctccggacattgagagaagaaatggagagatgtcataactcatacgcattcgcatcatcctacttggaattaaatgtcgtgtttccatggtgacagctccggccggcggcatacagttcctgtctccctctcgtttgtaaaattcgccacaccgtaggtgctaggtagcattcggagcatgtatccgtttcgggtttgtgatacagtggcgcaactcttcggctatataaatgtacctagtactttgtaacatgttgtccagtatgcaacgacgcatcagatttgtat

SEQ ID NO: 2702 - DNA, 1184 bp, Zea mays
  Clone ID: 700221819_FLI
gagctagagcaagtttcgtcactctagaagctaaatattgaaacagaaagagttaaaaatgactaaaagaatatcttttaccattttagttacttttagctctttatgtttggatttttagctcacaaagtggctaaattagttcatgggattcaaataggcctttaatttgttgcattgacagtgaagcatgtgattttatgtaagaggtactgatagttttggagcaaggaaaagctgaagcattggttcaaggtgtgtctgtgtctgcaaatgagaagaaaaataaacggaattttattatgtgaggttttgtaccgtcatttctgagattgcaagtgcaccttcttaccagggaaaaataggattgactcaactttttgtggtgtattgaacagagggcacgtgtgcatcttggttgttagaatcacatagtgacatagagatgcatcaacagagataggtaggtagtaggacagagacgataaccaagaagacagtagcaccaggaaaagatacaaaaaaatcaagggaccatcagtttgaagtacagtcaaaaaattaaaaaggaaagggtaaatcagtagtgtgcgtgctctatgttgctagttttgcttttttgtagcaagatgaccctgaattactcatcattttgtgtaattgcaacggtgtactttgaattttttttgtaggtgagtaagcttgagggatgagtttgcttggagctcatattccaaaaccaattggaagtaaaagagtgtttgcgccagtttgcatctctttgcgttaagctgcagccagctgtgtatgcagagtattgatctgtagaagaagacaaatcttggtgctgcagagtattggattcaagaaaccatctgctccgtggattacgtgttttcaggcacctgtgtatgttctggcggcgcttctcgtcacggccgtagcattgtttactgaactgcttcattgatgcagtagtgcaacagcagtagtagtagtagcattgttcatgagaaaaacaggcatagattcagattcagtgacacgtttatctctccccccaatgctaaggcggacgccaaacactggtcaccgttactggttttacaatatgccctgctagctgcctttgcatttagatgaagtgtcttactttaagcctttagccatgacaatggcaacgg

SEQ ID NO: 2703 - DNA, 1444 bp, Zea mays
  Clone ID: 700221865_FLI
catccgttccccttcccttccctcctctcgcgcgccggctccacgcagatccaggagatatgcctcgctatgatgaccgctatggaggcacgcgcttgtatgttggcagattggccactcgtactcgttcccgcgatttagaacatctgtttggcagatatggaagaatacgagaagtggagttgaagcgtgactatgcatttattgtacgctaagtttacctccctcagttcaattcagtatctattttcgttttctgtgcccatttgttattgtgtgggaaatgtatttcttttatatacatggttttgtttgttttgcttcttgccaaattaccatacaggagttcagtgatcatcgcgatgctgatgaggctcgataccagctagatggcagggatgttgatgggagtcgtattgttgttgagtttgctaaaggggtcccacgtggttcaggtggctcacgtgaatatatggggagaggccctccaccaggtacaggtcgttgtttcaactgtggagttgatggtcactgggcaagagactgtaaagctggtgactggaaaaacaaatgctaccgttgtggagaaaggggccatatagaaagaaattgccagaacagtcctaggagtctcaggcgagagagaagttactcacggtccccatctccccgccgtggacggggccgcagtcgaagctatagcaggagcaggagccggagtcggagctatagtcgatcaagatccctgtctagatctcctaggggaggtcgtcgtgaccgtgacgataggagatcaaggagtcctagctatagcaggagccccatgcgatctgcctcgccaccagtaaaggaaaaggagcgcagccccgcacctgatggaagcaggagcccaaggagtcgcagcccccaggatcaggtgatgagcccaccaccaaaggataatggcgaaggcaatggctcagaccgtggcggcagccccagagggagggagaacagcaggagctgcagccgcagccgcagtccatctggtagtaaccgcagccctgcggccaatggacgtagccggagtcctggaggtgagcggagcccgagtcctggaggtgagcggagcccgagtcctagaggtgagcggagcccgagtcctagggctgaccgtagcccaagccccaatggcaatggtaacaatgatgctgctgctgatgtcgatgctgatgctgctgcccgcagtggctcccccactggaagcaagtcaccctgagcgctggcggtcccagattgtggtggtgcttctcaatgcaatgggcaatcgtattgctattttttgctaccatatcgaagacacaatagctacatcattttcttctctgaaacaaggactttattttgcttgctttgagatatgactcttaccctctcatggataatatatatatgatatgatgcc

SEQ ID NO: 2704 - DNA, 1092 bp, Zea mays
  Clone ID: 700221869_FLI
gggacccggcctcttctccgacatcggtgggaaggaaggatctactcattaaggactacacctacgaccagaagctgtccatctccaccgccagcgcctctggagtggatacctgaccaggacaagagatagagtctagttcggtcctttaagcgaatcagaatccgttcgtcggagaggccatgggctcggcgcaggatccgttctacatcgtccgggaggagatccaggagtcgattgataaattgcaaagtaccttccaccgctgggagcaaactgcttcaaacacaggagaatatgttcatctgacaaaggagcttctgatcagctgtgaaagtatcgagtggcaggtagatgagctagaaaagacaatctcagttgcatcaagggatccggcatactatggacttgatgaagttgagctttccagacgaagaaactggactggttcttctcataagcaggtcggtacagtcaagagagctattgaaaagggcaagagcaatgcagcaacttcaaaataccaggatacaagcaggaccaaccactattctgccgaagataatgatgactttctttcttcagaatcagatagacagcttctactcatgaggcagcaggatgaagaacttgatgagctcagtgaaagtgtccaaaggattggtggcgtgggactaaccatacacgaagagctgtctggacaggaaaggatcctaaacgacctaagcttggagatggagactacttccaacagacttgatttcgtgcagaaaagagtggccatggtgataaagaaggccggcatcaagggtcagatcatgctgatcgtgttcctggttgttctgttcatcattcttttcgttttggtgttcttgacatagccaagtgcaccagggtcctcggttttctctctcatttgttgtgcctccctagtacgaacactagtaaattggtcgcgctccgcgtgagttgttgcttgatgtgcttacataagatgtagaatcttgttgctataggcatgtatcaacaggtgctagcagcttgcagttctccttctaacagaaacaggtcgaagcagattttttgttctcc

SEQ ID NO: 2705 - DNA, 1089 bp, Zea mays
  Clone ID: 700221913_FLI
ctaccatcaatgtgtggcagccgaagatcgagcaggccaatgagttcagcctgtcccagctctggatcctggggggctccttcggccaggacctcaacagcatcgaagcaggatggcaggttagcccagacctgtatggggacaacaacactaggctcttcacctactggactagcgatgcctaccaggcaacaggatgctacaacctgctgtgctcggggttcatccagataaacaaccagatcgccatgggcgccagcatcttccctatctccaactacggcggctcccagtatgacatcaacatcttggtctggaaggaccccaaggagggcaactggtggctgcagttcggcaacgactacgtcctggggtactggccgtcgttcctcttctcgtacctggcggacagtgcctccatgatcgagtggggcggcgaggtggtgaactcggagcccgacggcagccacaccagcacgcagatgggcagcggccacttccccgaggaagggttcggcaaggccagctacttcaggaacgtccaggtggtggactccaccaacaacctcaaggcgcccaggggcgtgggcaccttcaccgagcagtccagctgctacgacgtgcaggacggcagcaacgccgactggggcacatacttctactacggcgggcccgggaagaactcaaactgtccatagcccaagactgactgagctgagccgccgcctatcacactcactaccagagccgcctaaccttaacacacctcagctgtatcattcatgcatccggtcaattagtttatactgcctcagatttttaacttttttttcgttttgtttcgctctttcttgcttctacctaccccctagtttactgactcctaccctaggtgagtgagcgtgtgtgttgtagacatgtgagattgttctctctgcctcagagagagtgagatgaaggagagatgtcggtcgtctggttctagggaagagatgaggaggactgtggccagttttctgaagagaaaacaaggcctctcatggttgctgtgccttttgcctgtcaaataattttgttttgtttcatccc

SEQ ID NO: 2706 - DNA, 1541 bp, Zea mays
  Clone ID: 700221930_FLI
cccgtcgcatcccatcccactaccacccatctcgtcgtccgccgattcgatccggttcttccaacccaggggcagtgatggcgacgaagaggagcgtgggcaccctcggcgaggcggatctgaaggggaagaaggtgttcgtgcgcgccgacctcaacgtcccgctcgacgatgcccagaagatcaccgacgacacccgcatccgcgcctccgtccccaccatcaagttcctcctcgagaagggcgccaaggtcatcctcgccagccacctgggtcgtccaaaaggtgtcaccccaaagtacagcttgaagcctcttgttccacgcttgtctgagctccttggagttgaagtcgtgatggccaatgattgcattggtgaagaagttgagaagttggctgccgctttgccagaaggtggagttctgctcctagagaatgttagattctacaaggaggaagagaagaacgaacctgagtttgctaagaagctagcatctgttgctgacctttatgtcaatgatgcttttggcacggcacacagagctcatgcttcaaccgaaggagttaccaagtatttgaagcctgctgttgccggcttcctcatgcagaaggaacttgactaccttgttggagctgttgccaacccaaagaagccatttgccgctattgttggtggatccaaggtctcaagtaagattggtgtcattgagtccttgctggcgaaggtcgatatcctcatccttggtggtggtatgatctacacattttacaaggcacaaggatattctgttggaaaatctctcgtggaagaggataaacttgagctcgcaacttctcttattgagaaggcgaaggcaaagggggtttctcttttgcttcccactgatattgtagtagcggacaagtttgcagctgatgctgagagcaagattgtccctgccactgctatccctgatgactggatgggtcttgatgttggccctgatgccaccaaaacattcaacgaagcattggacaccaccaagactgttatttggaacggccccatgggagtgtttgagttcgagaagtttgcagctggcactgaggcgattgccaagaagctagctgagcttacaaccacgaagggtgtcactaccatcatcggcggcggcgactctgttgctgctgtcgagaaggctgggctggccgacaagatgagccacatttcgaccggcggcggtgcgagcttggaactcttggaaggcaagactctacctggtgtccttgccctcgatgacgcctagatccgctgctgctgctgctactcaggttctgccagctttgcgtgtcatcttgtttcggaccttggtgtagcactgcaaggctaaggtttactcctccgcacatggacttttggggataggcttgccaccgtgttttgctagatgagtcgtggaataagcttttacttcctcgctgctgtgggtgaagtgactggaattcggaaatttggaactaacaaaaccccccgtggatttgtatgatatgttttgttcgac

SEQ ID NO: 2707 - DNA, 1659 bp, Zea mays
  Clone ID: 700221931_FLI
gtcggccgtcgccaactcgtctgctcagcccatctgtatcacaattcccaagagcttgagctccaagtacccggcctgcgcccacggccgggcccaggaaccgccgttctgctgcaccggcggcggaagaagagacggatagcgtggggatccggctgatgcgccggcggcaatgggcatttgggattccattctccccggcggcggccggcgcttcatcaagcgcaaggacagcgacgccggcgaggcaggtcgggcactagaggaactgaggggctcactgtacaacgactttcatacttcagaaggggccaggcgccagcagcagaagctttgtggccctattgttgcactgacattcaactttgtggttgctgttgggattatcatggcaaacaaaatggtgatgggtgctgttggatttaacttcccagttgcactgtcattaattcattaccttttcgcttttgctttaatgtctgttctcaaggcattatacttgctgccaattgcttctccttccaaatccactcctttctcctcattatttgctttaggtgctgtcatgtctttctccactgggcttgccaatatcagcttaaagcataacagtgtaggtttttatcagatggctaagatagctgtaactccaaccatagtggtagcagaatttattcttttcaagaaaaaggtttcccttcgaaaggttagcacgctggttgttgtctcatttggtgtggccgttgcaaccgttactgatttggagttcaatttctttggtgcttgtgtagcactagcttggattattcctagtgctgtaaacaaaatcctgtggtcaaatttacaacagagtggaaattggacagctcttgcgttaatgtggaagacaaccccaattaccatatttttctttattgttttgatgccattgttggatcctccaggccttttatctttcagttgggatttcaagaacagcagcacaattatcatatctgctttgttcggtttccttcttcagtggtctggtgccttggcacttggggcaacctcggctctcgctcatgttgtgctgggtcagttcaagacgattgttataatgctctctggttatctggtatttaaatctgatcctggattcaccagcctgtgtggagctgtcattgccctcgcagggatgtcagtgtacacttacctggggatgaaagagtcagccgccagcggtaggagaaattccttaaattcaaggcaaaattctcatttgaagaagcccaaggctattatagatggagaaaatccagaaacaaagcctatggattctgtgtaaaatgagtgccgtcctcctgctaggtttaagaacctgccattggaagcaatgaggtttggtgagcatacttatggagtgagtttccttcaccaaccagttcatccgaaaacttcatttcgctttctttagttcttgcttggagttctattattctttaggcaatggtggtcaaaattgttttcatcgttgatcacattcattgcacgtaggaattatcattgattctagttttaggtaactttggttactgttccaatccatatcctgtcatgctttatttgtttacttgccgtgtggattctgttcctcagaaaatagatgaaaggtggctg

SEQ ID NO: 2708 - DNA, 135 bp, Zea mays
  Clone ID: 700221989_FLI
aatatctaacacatcagcaccattagttccccgaggggagtgaaagatagtctgttgtctttgcatcaccagtattgcgcctgcctcgcttaaattttatgattgagatggttatttgatggatgagaatttccc

SEQ ID NO: 2709 - DNA, 1051 bp, Zea mays
  Clone ID: 700221993_FLI
caatcacagtcgtgaccagagcgcgagagctagctagagggccgtgaaaatgccgatcaataggatcgccctggggagccaccaggaggtgtaccacccgggcgccctcaaggcggcgttcgctgagttcatctccaccctcatcttcgtcttcgccggccagggctccggcatggccttcagcaagctgaccggcggcggcccgacgaccccggcgggcctgatcgcggcggcggtggcgcacgcgttcgcgctgttcgtggcggtgtctgtgggcgcgaacatctccggcgggcacgtgaaccctgccgtgaccttcggcgccttcgtgggcggcaacatcaccctgttccgggggctcctgtactgggtggcgcagctgctggggtccaccgtggcgtgcttcctgctccgcttctcgacgggcgggcaggccacgggcaccttcgggctgacgggcgtgtcggtgtgggaggcgctggtgctggagatcgtgatgaccttcgggctggtgtacacggtgtacgccacggcggtggacccgaagaagggcagcctgggcaccatcgcccccattgccatcggcttcatcgtgggggccaacatcctggtgggcggcgccttcgacggcgcgtccatgaaccccgccgtgtccttcggccccgccctcgtcagctgggagtggggctaccagtgggtgtactgggtcgggcccctcatcggcggcggcctcgccggcgtcatctacgagctgctcttcatctcccacacccacgagcagctcccctccaccgactactaaaagccgaagccgaccgacctaggggtgcgcagcgcagctagcgcatccagctctctctccccgctcgccgccgtttagtttctctcgtgcacgtgcatgcatcgtcgactgtctcaggccgccgctgcgccggcgccgctcgcatcgtttgcttccttggaccagcagtcgtcgccgtcaggctgaactgcttgtaaccgtgaattccggacccgtttgcttctgtaagatttgtgcatttgcctgagt

SEQ ID NO: 2710 - DNA, 2351 bp, Zea mays
  Clone ID: 700221995_FLI
cttgcttgccgccgccgtggccgatcttcgctgcctgccagccatggaagacttttgtgcggtgtgcgcagatacgctggagtgggtggcctatgggtcgtgcgggcaccgcgacgtgtgctccacatgcatcgtccgcctccgtttcgtgatgggcgacaacaagtgttgcatctgcaagaccgtctgccccttcgtctttgtcactaaggccatgggtaaatacactagagtgatcactgatttctctgtgttacccgctggtgtaaatgagggcaaagctggggatttctggtaccatgaagatacaaaggcatactttgatgatgcggaccactaccggatgatacggaccatgtgtcaactttcctgtaatgtttgtgacaacgcagaagatcaggttgctcaagcaaagcgcaaaagcaagttcaggagcattgaacaactgaagggacatttatactgcgtgcataggttgcacatgtgcaatctttgtttggaggggaggaaggtgttcatttgtgaacaaaagctttatttgaagtcacagttagctcagcatatgaagactggcgactctgaagtggatggctctgaggtagagcgcaatggttttgctgggcatccaatgtgtgagttctgcagaagttcattttatggagatagtgagctttacatgcatatgtctagggaacactattcttgccacatatgcaagaggcagaaccctggtcgtgttgaatatttcgcgaactatgaggacattgagttgcattttagagaagatcatttcctatgtgaagatgaagcatgtttggaaaagaagtttgttgtcttcctgagtaaagcgcagctgaagaagcataatgctatggagcacggtgggcggatgtctcgttctcagaggaatgctgcacttgagacacctagcagctttatatatcgcagaaatgagcaagaacaacggcgtggcaggggccgtaatgctttccatgatggatctgattgtcatatctcatcgtctgcaaatgctttccatgatcgatctgactgtcatatctcatcatctgcaaatgctttccatgataaatctgactgccatatcccatcaactgcacaaaaagaccgggcagctgccgatggccatgcagggcgtcttgacaatgtttcagagtcgtttcagtcattaagtattggatccagttctagggaagctgaagttggcgaaggctcaaggactggacgagtgctggaacagttgtccttccgacctctttctgacccggatattcctgacaatagtgttgaaacctcattcccttcattatcagagcagcaatccagtctcaatcagagtgcaagggacgctccgaggcttggagatgagtcactgttcccccctttgactgggtctagtaacaagatgaagcagcctgtttttacgcctaagcgtcctcgaacttttcctgctgccgaggatatccatgctgcaaagatgcgctatgctctgggaatgaacgaggacatgtactctgcgttcaaagagatcgctggtgaataccgtcgaggtaccatagatgcttttgagtatctttcatatgtcgagcagttcggactgtcgcaccttgttcctgagatggttaggctattgcctgattctcgaaaacagagggaacttgctgatgcgcactatacaaatacacggttgaaaaacctccaagaaaatggaaataataggaaggggggattcttcttatcaaagaagaaaagcctccaagaaaatggaggtggaactagcgaatggaggtggaactagcagaaaattcatattacagaaagcactgccgacggatgatgtgaacagggcacaagcagataatatttaggacacttttagaaggcttcaatcaaaccatcttacttagaaaggagaagctgaggtgttgtccaaggatgggtattgatctttcatggggttcaaccggccgctgctggacccttcatctaatatggacagtgaaagtcatctagtgcaacggaggaggcaataaggaaccgaagaagacatcaaggtttctcagagctcgttcaagtgacaactcgttagccatgcttgatttaagacagccaagtgcaagccatgaatgtccacaaaggaaattacaaggcctagagacgtgattggtgcttggaagaagaagaatggtggggggcagaaactctttttgatcaattgacggaagagttattgcaactgtatttagacgtagtattttttgaattttgagatagagtcgtggtattgaaaaatattacagtatttttttccaagaagtgtttggcaaccttgt

SEQ ID NO: 2711 - DNA, 1027 bp, Zea mays
  Clone ID: 700222024_FLI
cgcaagcaaatcctcctatctccaagcctccaatctgtgaacggtgaaccccaatcgaatgacgccgacggcgagcctcctcctcccggctcccccattcgtctctatctccgatgtgcgccgcctccagctccccccgcgcggcggccaccggcctcgcccctgctggaagggcttggagtgcggctccgtacagacgcggatggtctcttctttcgttgggagcagaacacgccgcagaaacgttatatgtgcttccctgttcggagttggagctcccgaagcactggtcattggagtagtcgccttgttggtgttcggccccaagggtctagcagaggtagccaggaatttggggaagactttgcgtgctttccaaccaaccattagagagatacaggatgtatcaagggagttcaggagcactcttgaacgagaaatcggaattgatgaggtttcccagtcgacgaattatacacccacgaccatgaataacaaccaacaacctgctgccgactcaaatatcaagcctgcacctgcaccttacaccagcgatgaacttgtgaaagtaactgaagaacaaattgctgcatcagctgctgcagcttggaacccgcaacaacctgcatcgtcgcaacagcaagaagtgtacactactccgagtgaggacgctcctacatcaggaggaagcgatggtcctgctgctccagctcttgctgcgagtgactcggatccaaagcaagtgaatctggacaaggcggaaacacagagatgactccgcttaacagcttgacactggatgggatgagcacactgaacacgtcaggacgagcagtcttattttaattttgtaggcgatggacttcagattaaagccagttatttggactgctgcagctataatctatagagacataacactgtaaaaatagtagaatccgttttagattaaagccaaacgagatgagagcgttttctgtgtttactaggcttgttctgtagcagcatgcatgggcaggttcatacc

SEQ ID NO: 2712 - DNA, 1437 bp, Zea mays
  Clone ID: 700222088_FLI
cgcggctggttctgcggaagattatgggttcccaagggctatagcatttgctgcttctgcaatccgcagttcagcagttgttgctgtgacatgtgacaaagagataattactggtggccacgttgatggttcattgaagttgatatccctagatggagcgaagacaattgaaactgcttctgggcatattgctccagtgacatgccttgcgctgtcacctgatagcaactaccttgtgacagggtctagagataccacagttatactctggaggattcatcagacaggctcctcacataagaaaaatgctcaagaacctccaccgactacaccaacgacaccacgcagtcctctctctggcagcactagcaccatgagcagcctctcagaaacaaagagacgtcgcgttgaaggtccaatgcatgtaatgagaggacatcttggggaagtaacctgctgctcggttagtccagacttaggacttgttgcttcctcatcaaatgcaacaggcattcttctgcattccttacgcacaggcaggctgataaggaggcttgatgtcgatgaggcacatgcaatatgcttatcttctcaaggaatcattttggtttggaatggaacaaagaaaacattatctaccttcactgtcaatggactccctattgctaactcagttctgttgcctttctctggacaagttagttgcatcgagatttctacagatggccattttgctttatttggaacatctttgttcaacaactacaagtgtgataacagtactgaaactggggatcatgagcttggacccaatggcactgatgatgtatcaaaaaattctgaacaatctgttcacgcgccttcaatctgctttgttgacctgcatacactgaaggtttttcatactctgaagctggcaaagggccaggacatcacagcaattgctctaaacaaagagaacacaaatcttttagtttctactgctgataaacagcttatagtctttactgatcccgctttgagcttgaaggtggtggatcagatgctgcggcttggttgggaaggtgatggcctacttcagtaatgacccgtggcaaagattcaatgttcagctgtccattacttgcttccagatttgctatctactagttatcatagacagtagtaaagtaatgaaaattaaggcatgagatacactgtttgtacaaaattgagggtcacaatgggtgcaaaggctaggtcatttagatgggaaggaaaccaacggattttggtagagtagctttgtaaaaaatctcagatggttttgtagaatgagtggatagtaattgtacacaattttgcagcccattttttttgtggtcttcagtacagtgcggtgcagcacaatccttgaagcactttgtatatctgaaatgaatctattgactgttggcc

SEQ ID NO: 2713 - DNA, 2617 bp, Zea mays
  Clone ID: 700222133_FLI
gcacgtgggcctgacgctagaggggaaaagagcttgaccgcgtcgagaagtgtcttaatggacaagtgggccgcgggcccgcggccaccatacaacccagcagaaaggcgaggagacgaaccgaagattggccaaatctcgcttgcgtttctggggtggtgtctctgactctctggctccgtccccggcaccggcgggcggtggcgtgatggcggactgggaggggatcccgccgcgggagcggcggcagatggaggagatcctgcagctcgacatggaggagctcaacgtggaggtcgtcgacgacaacgaagaagacgaggaggaagaggagggtgacggcaacgaggaggactacgacgtcgatgccttcctcagagataacaatggagatggagtggctagcacctctggaccattcacattcaataggtctctagcttcactgcacacataccttggcggtaaatgtcaacctaatcttaacatgtttatcatgccgattgcaaactgtgaagctcttttttttatatcactcagaggttgacgatactcggggtagagttactcttttagatggtggcacaatcctcaacttgccaatgttttatcttcaaggcgttgttctatttcctggagctaccctgcctctcagagtaattcaggatagattagtagtaactattgacaaagctttgagactggtcgatgctccatgcacaattggggtggttctcatgcgacgactcccaaatcatcgacattatgctactgcttcagttggaacaaccgcagagatacgtcaatttggaaggttggaagatggttcattaaatgttgttgcccgtgggcagcaaagatttcgtttaaggaggcattggattgatgttgatcgggtggtaagtccaaacatgttatcattcttttgaaatatgaacattttaaagaatatagctagcttcatttactcttctcaataggtgtggggtgaggtacaaattattgaagaagatactcccttgagaactcctagagatgcatttgctcaggtagctgcatgcaataccttcaatttgcatgcttcgtcatcagtcatcagtttggataggtctcctatgaaacaagatcatatagattcagaactagagtgcaacactccatcaccaaacagtaaaataagcaacccttcatcaatggattcaaggttgtgccatctaggttcacagtcaagtgactcgatgaaatcatcctcagatgaagacggggatttgatgcccaaacagttttggaagcggaaacaacattctgttagggaaagtggtgcatcaagtcattccgacaagaagaccaacatgagaaatgataacaatctttgcttgacgcctctccagtcatcgccaatagcaaaaacaagagatgctaagcggcggcgacagtaccatgcttactcaaagcaggcttctcatgcaccattatcattttggcctcggtgggtatatgaaatgtatgattcatatacacttgctcgcagtgctgcaggtatagaaatccaatctcatcaacctatgttttatatctgcagttttgtaaaactcttttcctgttactctaagataagtgcaagctgcctgaggtctcattggaatatttggtcaattgtttgaattacaccggtgccttggttgcagagttatggagacagataattgcaaacccaagcatggacgatcatgtaagaaagccagatattttgtcatttcacatcggaagcaaacttccagtctcagaatctgtgagacaaaaacttctggagattgatggagtttcatatcgcctacagaaagaaattcagcttctcaaggccttcaatcatattaaatgtagaaattgccagtctcatatagcaaaacgtagtgacatggtggtgatgtctaccgacgggcctcttggtgcctatgtcaaccctcacggttgtgtccacgagacgattacagtcagcaatgcaactgggctagcactcattggcaatccttcgaaagtccacagctggtttcctgggtacgatcttgcctgtcgtttgctgttcgtttttgtgcctggctttttttctacaacacaacttaaactacgaaattaagtccgaagagtgctacttgcaactctagtaaatactcttttttttttgccgtgcaggtactcgtggacgattgcagcatgcatggcctgcgagtcccacataggctggctattcagagccaccaagaagaatctgcggcctaggtccttctgggggatccgcagctcacaaatcgcagacgacacacaagtagatcagggtgactgatgctccaaacttccatgcgtataaggccatagtagcagtggactactaagtcatatatgacctggtgttcccaatcctccagtcgtgtctggttcatacgcactgcctgccttttttgtgttggcatagtagggacggtggagttccctgtaaaacaatcactctttttctactgttgtagtagtgctctgcactgaagggatttactgaatctctctttttttggtctaaataagatatctgttttcaatagtatatgcatgattttcattt

SEQ ID NO: 2714 - DNA, 1283 bp, Zea mays
  Clone ID: 700222155_FLI
gtttgatcttgcacaaacacatttatctcaccgtgagatatggaggtgtgctacttggttgacgttaattgtccccactagcatgacagcctacctatatctgtactcacatggagaagtgtcccttgcagcatctcaaccagttctcttgtatgctattcttctgatgatcctcctttctccttttgatatgttttacttatcatcacgcttttactttctgagaacagtctggcgtataatactgcctttacaagcaattacatttcctgacttctttttggctgatatttttacatccatgtcaaaggtgttctcagatctggagcgttcagtttgtcgtatggtgaatcgccaggttgcaacaatcgcttggtttgaagcagattctatttgtggcagccattccgtagctattcctcttgttctcgtgtttccctacttgtggcgtttcttccaatgtctccgtcagtacaaggatacaaaggagaagacatgtctcttcaatgctctcaagtactcgacagcaattcctgtgattttcctttccgctctcaagtatcatgtatatcctgatcaatgggttggcttctaccgccccctctggcttatctctagtgttgtaaattcactgtattccttctactgggatataaagcgagattgggatttgagcatcctaaccaggattttcatgttcaaaaatccaagcatatggactaatcttctttacgggcagaactgggtattctactgggtactgggcagcaacttggttctgcgatgcacatggacatacaagctctcggcgcatctccggcacaactacctgacagtgttcaccatagcagctctggaaatcctgagacggtggcagtgggtgttcttccgggtcgagaacgagtggaacaagatgacggccaaacaaaacttggagatgtcatctgacatgccttccgaaggagacaggctactggattcgagtaaccacacagtgtgagctgaacagcagcctcacatttctcgatacaaattcattgccattcttttagcgtgaccattgtggccaatcttacgtcgacggttcagattttgtctgtagagctcaaaaggtcaaagggatacacaataggtttctatataaaaaaagttgaaatttgttggcggcttcggatgttatacctcttgaggatgtatactgttatagccctcttgaacgattgaatccaacaggagatattcgttgagacatgaaagaataaaagtaatgctgaaattttacg

SEQ ID NO: 2715 - DNA, 1981 bp, Zea mays
  Clone ID: 700222157_FLI
cgcatttcgctccccacagcggctcggccacaacccacagccagaaggtctcgagctggatctctaccgttccagcagacagcagtgcgcgctctctctctccctcgtggcgacgactgggcgaccgctgccgctgccgctgccgctgccgctgcccttgtgccccggtctccgtcggtccgttcgccaggtctcctgcgggctcttcgtcgtcgacaagctccgcctggttgctgtgtgaagtccaaggttgtcacatggattcagcacaagatttccaacccaggacattctctataaagttgtggccaccaagtgaaagcacacggatcatgcttgttgacaggatgacaaacaatctgtccacagagtccattttctctcgcaaatatcgccttttgggaaagcaagaggctcatgagaatgcaaaaacgattgaagaactttgctttgccttggctgatgagcatttcagagaggagccagatggtgatgggagttctgctgtccagctatatgcaaaggaaacgagcaagatgatgttggaagttctgaaaaaaggcccaaggactactgcagaactggaggcacctgtagctgacacacctcttgtgtctgctgatactgtactagatatatctggtggcaagcgtgcttttattgaggcagatgaagcaaaggaactgctgagtccacttaccaaaccaggaaattcatataaaagaatttgctttagcaacaggagctttggtattggtgctgctaatgttgctgggccaattcttgagtcagttaagaatcagctcacagaggttgatatctcagattttgtggcaggaaggtctgaggatgaagcccttgatgtgatgcgcatattctccaaagcattagatggttctgtcctgagatatctgaacatctctgacaatgctttgggcgagaagggtgtcagggcattcagtgagctcctgaaatcgcaagaatccctggaagaactttatgtgatgaatgatggcatatcagaggaagctgcaaaagctctatctgagcttattcctgcaactgagaagcttaaggttcttcacttccacaacaatatgactggagatgaaggtgctatgtatattgctgaaatggttaagcgttctccaaatgtagagagtttcaggtgctcagcaacaaggataggatctgatggtggagtcgcattgtctgaggcattggggacatgcactcgtctgaagaaacttgatcttagggacaacttgtttggtgttgatgcagggttagctctcagcgaaacccttccaaaactacctgatcttgttgagctttatctcagtgatctcaatcttgagaacaagggtactatagcaattgcaaaagccctcaaacagtcagcactgcagttggaggtccttgaaattgctggaaatgaaataaatgccaaagcagccccagatttggctgaatgtctagcagtaatgcagtcactcaagaagctgaccttggctgaaaatgaactgaaggacaatggtgctgtgataattgcaaaatcattggaagatggccactcagatctcaaggaacttgatgtgagcacgaacatgctgcagagggttggagctcggtgctttacgcgggcagtcgcaaataaaccagattttgtgcagctgaacatcaatggaaattttatctctgatgaaggggttgatgaggtgaaggaaattctgaaggctggtaagaaatctctggatgtgctgggcccactagacgagaatgaacctgatggagagcctgatgatgaggatgctgaggacgatgaggacgagctggatttgaagctgcagagtgtgaaggttgagcaggatgaggatgattgacgatccttaggttaaatatctttagctactcagtaatcatttggatgtccatgagctacgcaaacttttaattaaaaagaatgtactgaggcttttgc

SEQ ID NO: 2716 - DNA, 2621 bp, Zea mays
  Clone ID: 700222159_FLI
gttggttgatggtttgttcatgcaggaagttgaggaatgtttaattaaagtagagcagtcacctcgcgaaagcatatcaaatgctcttcgcccagcaactgaagctctggtcaagaaagagctgctgggccatgctgattcaaatgttagacttgctgtggcatcatgcatatctgagatcacacggatcacggcgcctgatgctccatatgatgatgatgcaatgaaggatgtattctctttaattgtgggggcctttgagcatctggatgacatagagagccccttctttggaaggagaacttcaattcttgatactgtggcaaaagttcggtcctgcgtggtgatgctagatcttgaatgtgatgatttgataaatgatatgttccatcacttcttgaggactgctaattctggacattcagaagccatcatatcctgcatggaaacaataatgagattggtaattgaggagagtgaggatgtccaaccacagattgcttcatgtctactccaaaatgttagaaaagaagaaaaggaatcttcaccttcctttgagcttgctgaaaaagtgataggtacatgtcgtgaaaaacttaagccagtctttctgcaatcactaaaaggcacttccttgagcgaatacagccaaatcgtcgcatcagtttgtgaagaggtttcagatgacagggaagataacaatgctaatccttctgggaaggacatggtggatgatggcaagctctctgaaaggactatttctgatgaattacctcaggaatcttcaaagatggagcaagatgttagccgtcctgaacaagacggtacttctatgaatggtgatacagttactgctattagcagtggtgctactccgccagatactagtgagtctgatcaaggaccaccttccacaaatgagaagattgaacaaccatgctatgcccaaaacatagcagatgctatgcagttgaaatctgaccacaatgaaggtgctgagtccaatgctgcaaagcccaataagaaagctacccttggttcagtaaaaaatactaagctcaaaccgtccgataaatgtgaaccaactgtgcattctgatgctgacactaaaaagcaagatcttgtagcatctgcagagggatccaatggagcagccgatgatacatcaagacctgctgatagtacacctaaacccaagcgaggtcgtcctcctggtccaaagtcattgcagaaggctcctgggaaggatcaatctccaggtttggatttgaaaaaggtcaatgatgattcagctgggaagctggcgaaacgatcagctaaggatgagaagccttctgcaaaaaacactggtgaaggagaaccatctaagaagactcaaaagaacaatttaaaacagcataagggtgaaactctttctgaggatgatcctgccaaggatctgagcttaaaggaaatgatatcgctgaaatcttcgaccaagggcccaggtagaaccaaagggcaaaccacagagaatagcacacctaagttgaagcaagaacaagaaactgatgagcctccacgttcaaggaaaaacaaaggccttgatagaagtctagttggtgcaaggatcaaagtttggtggccagatgataagatgttctacaatggtattgtggagtcatttgatgctgtttctaagaggcacaaggtagcatatgatgatggggatgtagaggtactactgctgagggaggaaaagtgggaattcatcagtgaggagaaggaagcttctatggcatctgaaacgccacgaggcagaaaaagaaaagcggatgcattgaaggaagaaaatacagaaacacctaaaagtgatgctgtggatcctccaaagaaaagaggacgtccaaaaggtgtgggatccagcaatgggacacccagtacctcagctactccgagcacaaaggggaaaactgccggcaaggttaccaaagaaacacctaaaactggccccaaccttaaaaaagaacttgagaagaactccaaggacaaggctaatgtttcaactgggacaaaagatgataagagtgtgagcaaacctaaggaggctattatcaaaggcaaggattcaaaagacgaaggcaagtccactgaaggaaaagctaagcctggtcggaaaccaaaaaatgctggtactcctgcgggtgattctgacaaagagaagcaggaggtagaagtcaaggcagctgaaatagaggaggcatcaggaaatgcttccacagggaagaagcgtaggaggaaggcttgaagttagcgctgatgaacttctcttgtaaatggatgtgctccctcctaggtttgctcctttaggaccttgtattattgagtgttaacttggaatttcgtctgattggtccctagtagttagttaggtgtggaagcaacatttgctatagccgtagtgttaggagtaccatgtgttcgttgtggtcaggtccatggtgcattggtgctgagccttaagcggaatgaaccctatgctcgctgtgaggcccatggcatcgtgttgtcgggtggtgttgtagcttgttgatgccctattttatattattatacgcgattgaagcagtggattttgtagc

SEQ ID NO: 2717 - DNA, 842 bp, Zea mays
  Clone ID: 700222178_FLI
ccgatatgggaactctcagctgggtcagaaactgatgagggcacgtgtagttggaagtcctccatgtggagcggtggcggcggaggattgctgccgtggcccgtgcgtgggatttagctcaggaacccacgcctgacatcccctcttcctccccggccggcgatgtcgtcttcgtcttccgcgctggccaaaggcaagtcggcaatcggatccgcagccggatctgccaaattcgaggccaaggggaaattctcctcctcctcctccccagctgcggcagctaccaagcgtggaaccaccaccaccagcagcagaggtagaggtagagggaaggccgacaagaaggtctactccttgcccggccagaagttcgatcctccggaggagagggagcctctcaggattttctacgagtcactgtccaagcagatcccctccagtgagatggctgaattctggttgatggagcatggtatgttgtctcctgagagagcaaggaaggcatatgaaaggaagcaaaagcggcagcagcaagtgaggatgggtaccccaatcaagtcttgtgcagtgagaaaagataataaacctgaaagttccaagaagccaggcattatggattccaaggcaaagagaagagttgattacagtgaggacgacgacgatgacttcattgtgaaaatgaagagatccaggggatgacatttactttacttgtaattttttttattaattatatcaagtacagataccaaaaagacatgctttatataagctagggtcctaattaattaaaccctgcaactgtacccgcatgcatcttgaatagatatactgaggtttgc

SEQ ID NO: 2718 - DNA, 1139 bp, Zea mays
  Clone ID: 700222232_FLI
gaaacttcgtctttacaaaaacaggcgtctagtcattcaaacctctcaatcaataggtgatgccccatatggggaccattttactgtagagggcatctgggatgttgaacaagatagcctagatgagaactgttgtgacctcaggatatacatcaatgtagccttctcaaagaaaacaatatttagagggaaaatagagcagtcaacaaaagatgaatgccgggaagttttcagtctctggattaagctcggtcatgatcttttgaagcaggagtatgatcgatcaaaaggcgcctccagcacacctgattctggtgttcaaccaggggctacaacaaacgaggaaagtgccgtggaagtagcagttccagtggtgagttcctcacatgatgaatctggtgcgagaagcctcattcctcctactcaagatcaccagcagaggacaggaagagatccttccatcacgtccacttcacaagaattgtggggttctctatcgtcatacatgaggtcaaggcaacttggtccagtactagcaatgtcactggtagctctcattatcctaatgcaggtgaccatcatagttctactaacaagacccccccaggtccaaatggatcctcatgggatctggacgggcagttcagggtacagcaaagaaagcatagagtgggtgcagaagcgcctcagcttactaagcgaggagatgcagctcgcggaggcacacatggagacgatgaggcgcgagtttgcctggctcaggtcttacctggagagactgcagaggacgcggggcagcacatgacggcggcgcgtgtacatggcacaggggcacgagttcgctacgcgaattcggaggtgtatacaaatacaatacaatacaacccggaggtggtgttcagtgtttcttctgttgttacagatggtacagatgcaaacagagagaggtggattgttgtttgcagaggtatttgccgtaaggcagaactgcaagatcccggtatagcgttcgatgtaaatagctggagcttccccattgcgctggggtgatgtacaatgtcagggacgagtcactgcgatcacgctacggcggtgacgcgttatgttatttataaatttctgactgaattttaacttct

SEQ ID NO: 2719 - DNA, 1212 bp, Zea mays
  Clone ID: 700222275_FLI
gtcgttcgtgaggtcacagagtgctggcagaggcagagccgtccttgcaggtcagcagacctccaaggggtctccagggaagaactcctacaccagtctactactccaccgagcacaccgtcgacccgtggcaagtccgcgagcttagagtcgctgatacgagcggacaacgcgacgagcagcttcaggatccttgaggaggaggaggaggaggaggaagatatcgtcgtgcccagtacctgcccgaagctgaagccggcgaacgtgctggtgcagctcatcagctgcggctcgctttcggtgaaaggacacgaagacgccgccggacctgttcgggcatacaagccgaggctcccaagcatgaagctcccctccccgtttgtttctcgcgccatggcgatgggcgagcttgactacctgtcagagaactccagcaggttggtgggagtgaggctggaggagaaggaatacttcagtgggagccttgttgagacgaagacgcatcgagatggtccggctgagaggtactcggcgctcaaacggtcttcttcctacaatgcagaaagggccagagacgctctggattgcacgagacgtgaagagggtgacacagacgacagatcgtcgtcgcgcgcgaggtgcctcccgcggacgccgatgatcctggcatccttcctgcacccgaggggcgacccgctcaagtctcccgtctcggactgccgccggagctcctcggcccgccagcaggactgcgacgcggcctccggcgacggcgacagcaggaggttcgccgccgacgcctctgtcgtcgcgtccgcggtggctacagtgaaggaggagaggctcgtcagggtcgaggaaagttaagtgccgcccgcccgtggcctttctttacctcaaacgtactgtgaactctgtcagtgctgggctgtcgtccggagcccgcgtcgtgatccactgcaccatcgcttgcaacgacagcgacgaaggctctgaacgctcagggtcaggggagtcacgatggctgcagggagatcatgctgctgctttggaaaattagtgagagtttacattgcttgaaacgtgtattcagctagatgatccttttcactttcttaatttctttccttagaaattttatttaggtccccttatcattgtatcagctatgcgtttcgccaaaaaaaaaagatgtgtcgtttatatactgtc

SEQ ID NO: 2720 - DNA, 1087 bp, Zea mays
  Clone ID: 700222317_FLI
tcgaggggtacctcatggccactctcttctacgagccctccacgcgcacgcgcctctccttcgaggccgctatgcggaggctcggcggggaggtgctcaccaccgagaacgcgcgcgagttctcttccgccgccaagggggagacactcgaagataccataagaaccgttgagggttattctgatattattgttctgagacattttgaaagtggagctgcaaggagagcagcatatactgcgaatattcctgttattaatgcaggtgatgggccagggcaacatccaacccaggctttgttggatgtttatacaataaagagagaaattggcacactagatggaataaaacttggtttggttggtgaccttgctaatgggaggacagttcgttctctggcttacttgattgctaagtaccagaacattaagatatactttgtatctccagatgttgttaaaatgaaggatgatatcaaggactacttaaattcccaaggtgttgaatgggaagaatgttcagatttgttggaggtggcatccaagtgtgatgttatttatcaaacacgtattcaaaaagaaagatttggtgagaggattgatctttataaagctgctcgtggtaagtacattgtggataagaaggtcttagatgtgctgccaaagcatgctgtgatcatgcatccccttccaaggcttgatgagatcacggcagaagtcgatagtgatccaagagctgcatattttaggcaggctaagaatggcctctacataaggatggcattgctcaaacttctgcttgttggtcactgacatatctgctagtgtgtgagcttgtgctgcgtcaagggatgaggaaatgtactaataatcagcagctcctgtcaaaattcaacgttcctgcgctgtcagggtaataaaagtctggatccatgctggagtgcagcaaagtttggcatggccatgttaatgtacaaatggtgttcgaaatagagttttgctgttctcatgtgatgtgagaacatggaacgtcattgatttgcttgcacaaattcatttgccggcttcagttgatgattatctgatac

SEQ ID NO: 2721 - DNA, 834 bp, Zea mays
  Clone ID: 700222346_FLI
acacaagtcgtagtttatgcaacgcaacgcaacgcaacgcagtgtactgacgtccccgtcccgcgcctctgcatccccgctctgcaaaacagacagattcccgcagaacagacagggcaaacggatcggctcagcttctgcgtgccttcactacacaacagctagcttacactctacaggctacagcagcacagctaaaccaagacgatacatagaatacagcaccacatcgtggggagagagagaggatcaggcacacgcacactggctggcacacaccctaggacactggaggttacagatcaacaaacagatgcagtagtggtggtggtggtggttacttattattggactttgtaaaaacgattagcccgggaagtaagtaaaactcttgcgttgcgtcaaaggatgaggatgaggagggggagtcctcgtggaccggtcaggcgagcagccagaagttcttctgccaccgggtgctcacgaggtagccgcccacgcccttgctccgccgccgcaccgccagcgtcaggcactccgcccggtttatgcactcctccaccagctcctcctcctcgctgctgctcctgctccgcaggaagcagcagaaaggcgagggtttgcgttggctgagcaccagcacggacgcctccagcttcagtcctgctactcaaggctgcaggtgtcgaaaaaggttcaaaagagccacaacggcagaaggtgggaaaggtaacagtggatcaagtgcgtgcaatagctcaagagaagttgccggacttgaactgcaagagcatcgactctgctatgaggatcatcgctggcaccgccgccaac

SEQ ID NO: 2722 - DNA, 1997 bp, Zea mays
  Clone ID: 700222406_FLI
tcttaaagttaggaggccgataaacctggaagactacactccacctgttgagcttcttcagatattacccctgaagtccagcgttagaggaaatgatgttggcccccaaatcggtccaaataactcaaaattttctccaggaatgcaagcattattagacctgctgtttgctgttgaagattctgtatcagatgcagcaaagattttaggcctaagcaccggtgctttgtcaagattgattctgtcagatgattctctccgaacggccgcgaatgaactgcgagcttcgaagggcaccggtgctgtactacgtgctcctgacgttgcaggacagcgtgcacaaggtcttctacgccgtcgtcgaggccgctgcagttcgcgcagacaacagccatcttggagggttggcgaggtatccggtctctgcaactcttccacagattggatccagattattccttacatggggtgtcttctggagttttcctgaggtatcgccactagcaaattttcgtgttttcatatatgacaccatttttaggaatacatcttaatttgtacatgaactttagagtttccaatttataattttaaattttagattagatacatatctatgtgttgttgtttggcgggacctcgaattatgacgcagttctaggtttaatagcatttgctagaactagagaacacatgtgttagatgattatgggacttttaggactaaggttagtcgattatttaattttttattccaataatggaataagaaactatgagtgggtattgtaacaagtttctacagcaggcgtattagaaattgataaatagcgctttttaccctatttcaactgggctgttctattatatttctggacctgcaattggatgttgatgttatgttcttgccataaagtccaatgtatcgtgctagctgtacactgatctgtaacaggtgattgactgactcgagaatttgccgacgcttgaagaaggacctaatgtgagcttttacatacttgatgaacagcttgagctcttgagcaaggtgctgaatgcaggggatgacatgattggtgttgagtgcttagaagaagattgtgatggcaaggttctatttgtttgaggttgcttcaccattccccaaagcacattgcatcttgttttagtgtttttttgattgccgtcgtcgaggccgctgcagttcgcgcagacaacagccatcttggaggtatctaattccaatattgtatgtctcggttgaacttgtgaaggcgttgcaagcacatatcattaactgggatattcatatgtttgatgaggagatcggcaataccactcagggtggcaagtttgaccatgcagatcgtttgttccaaagcattgagaacgcttacataaatagcttatcaaatacaagtgacgtcaaagagcttattccagaattcttttacatgcccgagtttcttgaaaattcaaattcatatcatcttggtgtcaagcaggatggggaacctataggcgatgttgctctccctccatgggcaaaggatgataactcaagtgacgagtttgacaaagattctattgagagtgatgatagatctcttgaagagctaagctgggagacactagaacttcttgtggtacctcatatattcagcatcagacgaagcacatggagatcaaccttcacttcgtccgtgagcgtgtcgccgacggtgatgttcgcattctcagcatcccgaccacttcgtagtttgccgacattttcaccaaggggctgccgtcgagtgtattcactgagtttcgatctagtctcaacatctgtacaggatagaattgagactgtaggaggtgttagactcctgctaagggttaggcctgggccttcttgtatttacctgattacccctatgtaatgggcttggcccacctaactgccatatataaattaatataatttacacccaactctagattagggttagggtttc

SEQ ID NO: 2723 - DNA, 1026 bp, Zea mays
  Clone ID: 700222504_FLI
ccccatccctatccagcggcttctggctcctccgccaggtcttgccgtccagcggcctcaccgccctcgagatttgctcggcacggtcgccttgtttgccgcctgcagcgttctcccactcggctacgggctacgcctgacgccaccgttaacggcgacatccgaacgggccccgacacccatctcgcgctcagaaaagggataagcagttgtgatcctgtcctcttggtcggatgcggggttactatgacatcgatgacatcctcatggaggatgagcctatttcagttgttttccaagtaactgcaaatggtgttggcctgctagatcctggtgctgaaaataactgtgtagagaagggtgccaaggtggaccttccattttggcttgcgcatgggctgctgtctctggaacaagctgtctcaataaacccgcctccatgcttcacacagaaaactcggaaggagatacaagctgatgcgtcctgtgtggatttgagggctcgttgcccatacttctatgagctaggatgcaagattgttcctttggtgagtgacaagagcattggcctgttcttgcgatatgcattcaccagtaggtacaaagaggttctaagcaagtcccacagttcttccatgatgacagtgcccaagtttgttccacgccttacaaaagaagaaactcgagtgtttgaatctgccagagaatcgatggctgttttcaagaaatggcgagtaggtggggtgagactacaaaaggcttccattcttggccggaagaggaagacaaagctgcctgatggaccacctacttcttgaatgagttttaaagtctccatggaaaagagtggttgatggttgaggtgatgtgcgatgttttgatttgctagctctctgagcaaagagaaaagttaatggcaaatctggatgtactatatgatctgctgtacattgtgcacttttgtatagtcggacgacagcactgatcggtccatccattgcaaggaaaatgaacacccgaaccatg

SEQ ID NO: 2724 - DNA, 739 bp, Zea mays
  Clone ID: 700222581_FLI
acagaaaaccctagccgccgccaccgaagcggcctcccaggtaagcaagagcgtccaccccgccgccgccatgaagcgcaatccccgcgtcacgagctctcgccggaagtgccgcaaggcgcacttcacggccccgtcctccgtccgccgcgttctcatgtccgccgggctgtcgacggagctccgccacaagtacaacgtgcgctccatcccgatccgcaaggacgacgaggtgcaggtcgtgcgcggcacctacaagggccgtgaggggaaggtggtgcaggtgtaccgccgccgctgggtcatccacgtcgagcggatcacccgcgagaaggtgaacggctccaccgtgaacgtgggcatccacccctccaaagtgatcgtcaccaagctgaagctcgacaaggaccgtaaggctctcctcgaccgcaaggcccggggccgcgccgccgacaaggctaagggcaagtttactgccgacgacgtcgctgcagccgccgctggtggcgccgccaccggcgcctctctccaggagatcgactagactcttcacggtcatctgatggttgtcgtaccgccttttcctcatctcttttgtttttgctaccaatgattatgtgatagaggttttatgttatttgaaaactgctctgtgcctggatgagagtttttggaacataatgtgaacctgtgtgtctgtgacctgagctttgaagatctcattatgtggttaatgtct

SEQ ID NO: 2725 - DNA, 636 bp, Zea mays
  Clone ID: 700222584_FLI
gaggaaagctcctccaacattccctttccttatcgagatgagggagcggcattactgggtaacacatcggacagaaaggagcgtagatatgctactgcatggtaagaagccgctggttgaggttaggaaaagggatagcgagtttcaggttgtaattgaaagatgggcaacatatgatggcgatggactctgaacttgaaaccctgtcgtcataattgcttctatcaaagttcttaatttagtacttgatgtttctgtggacaagtgtgatctacactaccaagcctcttgttctgaggtcgtacgtggattgcatgggcgaacattcgactgacaagtgacaactatccgaagcctgttcttacactgaaggcagcccacgaagcaattttgacatttcagctactttttagcggtcgaaaattgatgtcaattctaatgtatatatattttcctgtaagagaaggaacctaatgtatgtcagtgcttctaaattgtatgagatgtgtacatatgcatatccttattgttgttaatatactcattccccccttttttttttccctttgatttttaaacattggtgaactgaggtcctctattttactatgtatgtgagtattcaatgttttctct

SEQ ID NO: 2726 - DNA, 918 bp, Zea mays
  Clone ID: 700222611_FLI
gcggagcctctccctcgacgccgccttcttcgacggcctctcgctacagggaggcgggggcgtggcggggcacaagaggagcggctctatggacggggccacctcgccgttcgagggcgagtccgcgccgacgtccgtgctgccggactacgccaagaaggccgtgcccgacgacaggctcgccgagctcgcgctcctcgaccccaagcgcgccaagaggatcctggcgaaccggcagtctgcggcgaggtccaaggagaggaagatcaagtacaccagtgagctggagaggaaggtgcagacgctgcagacagaggccaccacactttcggcacagctcacgcttcttcagagggacacctctggtttaaccactgagaacagggagctgaagctccggctgcaggccatggaagaacaagctaaactccgagatgctctaaatgacgccctgagagaagaagtccagcggcttaagatagccacagggcaggtccctaacataaacgggaatcccttcaacggaggactaccccagcagcagcagcagcaggtgccgagctatttctcacaaccacaggggatgcaatacttcagcagccaccagggccagcatcagcatccgaaccatcaccctcagagttcttcaaacggtggtggccagtccttgagtgactccatggatttcatgtgaggaccgaaggagagacagctcaggagttgcctgagatcacataccaactaaagtactgtaaaaaggttgctgatgtataccatattcagtattattatgatacgcgtcattgtaggttagctagctgttccttgtaccattaatcagaagttcattcatgcatgaattgacaacctgtcattgctttcgtttctggggttcaagtaaaatcgtttgactgcttg

SEQ ID NO: 2727 - DNA, 1508 bp, Zea mays
  Clone ID: 700222622_FLI
ctcgggtatcgtcgctggtcgctgccgcatccttcgtcctccctctcccactcccgatcgcatccaccctggaaccctagcggcccagcccgcgaccatggcgcggcggtcgacccctctcctacgccgccttctcgccccgtcaccttccctctccactcccctagccgacgccgtatcccgccgcaccgtcacctacatgccccgcccgggggacggcgctccgcgcggcgtcaccctcatccctggcgacggcatcgggcccctcgtcacgggcgccgtgcggcaggtgatggaggcgatgcacgcgccggtctatttcgagacgtacgaggtccacggcgacatgcccacggtccccgccgaggtcatcgagtccatccgccgcaacaaggtctgcctcaagggcggcctcgccacccccgtaggcggtggtgtgtcctccctcaacgtgcagctccggaaggagctcgacctctacgccgcgctcgtcaactgtttcaacctccctggcctgcctaccaggcacgacaacgtggacatcgtcgtcattcgggagaacagtgagggcgagtactcggggctcgagcatgaggtcgttcctggcgtcgtggagagtctcaaggtgataacaaaattctgctctgaaagaattgcaaagtatgcttttgagtatgcataccttaacaatcgaaagaaagtgacagcagtgcataaagccaatatcatgaagcttgctgatggtttgttcttggagtcttgccgtgaggttgcaaagaagtaccctggaattaaatataatgaaatcattgtggacaactgttgtatgcagcttgttgcaaagcctgaacaatttgatgttatggtcaccccaaatctttatggcaatctggtggctaatgtagctgcaggtattgctggaggcactggtgtcatgcctggaggcaatgtgggtcaggaccatgctatcttcgagcaaggtgcttctgcaggaaatgttggaaatgagaaaattgtggagaagaagagagctaaccctgttgcgctgctgctatcttctgccatgatgttgaggcacttgcaatttccatcatttgctgaccgtttggagacggcagttaagcgtgtcatagcagaaggcaagtacagaaccaaagatttgggcggcaccagcacaacccaggaagtgatagatgctgtcattgccaaactgggttaaacacaaaccgtgtgtttaatacaatttttttcctcatggactaggtaactagtcgactaggtaactagtccttactaaatgtttgttcttcgtataggtttagactttagaccaccattttgttcggcaaattcttgtacaatcttcaggtatcttgtttctggcctggtttgggtgtgtggtgtaactgagcaaactcgtattaatttttacgcaattttttgtgaccttaattcttaactggaaataagagaaaaatatggaacagttctcctttctgcttgctgtc

SEQ ID NO: 2728 - DNA, 1871 bp, Zea mays
  Clone ID: 700222667_FLI
acacaaaagcgaaagggaggagagagaggggcagggcagagcaggagagagaaattcgatagggttcccatgccccttccccaccggccaccacttgccaagcgaaagcgggagtgaaggaggggagagtcccatttccccaagccctacacgagagaaagagagagaggggggagcagaggagcacgctacgagagagggaggtcgagggagacagcagaggctgcagcagaggccagaagcattagaagcggcagttgtaaccaagtggcatcagaagatagagccagccatccgtctatccatctatctagctctacaggtataaatcctcgcgcatcggtagggggcgaggggaggaccgggaaccggaggggatttctcgggggtggagtggcggccaggacctctgattgggctccagtgcgcgatctttgaacgcagatttggtgcccgcaatctgccatggatttggtttaagatttggtgagatcggtcgggttcgcgctgcaagattagatttttgtgcctgttttattcacgagatcgcaacaacgatattgctaagcaagataagatttcaactttttttcccctggatcgatctcagattaggaggagcaaataaagcaagaatagaaagatttttgggggagaaggcatgatgctggaagggaagtcctaccttgtgtcacgctccgtgccgagctcctgcgagccggaggcggagtgggagtacctcgcccacgcggtcctcagcggcaagcgcccggcgccggaagatgacgtcgaggtcgaagacccggacgaaactggcagcggcggcaagcgcagcaagccggcgtctccgcagccgcacacgccggacatctgcgagggccacggctccaaccgccacgccactggttccggagagcagcggatcaccgggagcaaccccatgacttcgatcggtcgtgacctgaccctcaattgcctcctccggctatctcggtccgactacggctcggtggcctccctcagccgggacttccgctccatggtccgcagcggggagatctaccggctgcggcgccagaacggggtggccgagcattgggtctacttctcctgcaacgttctcgaatgggatgcctacgacccataccgggagcgctggatccaagtgcccaagatgccgcctgatgaatgcttcaagtgctccgacaaggaatcgcttgcggtgggcactgagctgcttgtgttcgggatggcgcgtattgtcttccgatacagcatcctgaccaactcatggagcagggctgatccgatgaactatccgcggtgcttgttcgggtcaacgagtgtcggtgggaaggccttcgtcgccggaggcactgattgtgtcggcaacatactgagctctgcagagatgtatgactctgagacacatacctggacgcccctcccgagcatgaacacggcgaggaagatgtgttctggggtgttcatggatggcaagttctacgtgataggtggtgtggccaacagcaacagagtgctgacctgcggggaggagtacgacttgaagaggggttcttggaggacaatcgagaacatgtctggaggcctcaatggagtgaccggtgctcctccccttattgcggttgtcagcaacgagctctacgccgccgattacggcgagaaggatctcaagaagtatgacaagaagaacaacaggtggatcaccctcggaaaactgcctgagcggtccgtgtcaatgaatgggtgggggcttgccttccgagcgtgcggtgaccgcttgattgtcatcggaggtccgaggacctataccggtggtaccattgagctcaactcgtggatcccagatg

SEQ ID NO: 2729 - DNA, 1472 bp, Zea mays
  Clone ID: 700222722_FLI
ggcagccttgcgagtggctaaggaggtgcttgggatgcaggaggggtggaggaaggaggcaattagggagatgaacagaactgggcgattctcgcgctcattggccaattcggctactgactggccgtgcctgttgctggatgttctgtcacgtgcggcagaggaggaattcttccagccaaagctgatcctgaacaatgtggatgtgttgaggaaggcaatttgtgaggatgagacgatggtgcctgcagcgatgtaccatgatagcttcatttggagggtgattgcacttggcgccaatgaaaagtgcttgccagttattatgtcgacttcagatgggtactattcttctcaagcattcgttgattttggttttccgaacatatttatttctcgtgagacatttggttggacgccacaagaagctaagctgcatatggtttctgaattcttcagtgaacaggagtggaaagttgtcgatgaggttcttgggccaaacccacggcagttatctgagatatatatgctgaagcaaaaggcgaatagcccagaagttcttcatgacagaaatattgaggaaattattgatacatacctggcacacttgcaagtctctgtcgttaatccagccatggagaaggcattaaaaatgctgcaggagtttgcctcagatgtccgtgagggtaaagtaccaaagatcagatcgtcctttggtgcaccctggagacatccacctcgtgatgacaatcctgacttgtcctataaatgggcgaagattcagctaatggattttatccaatcttttgtaaacactgagtttggggtgaactacctagcagatgacagcttggaaatattggatgatcctgctgctgttgccatgatggaggttggtttactgtatcaacaaagagaaccatcctttatgcgaccaatcactcgagggattcagcgttgtcttgccagatggcttgctgaacagagattacaattgaacattcaagaaacactagcattcttttggcaacgtttgatacggggtcgaagctaccgctacttgatgaaagaagttggctacaaataaagaggtgatttccatggactaacattttgacatgatatctgcataagaatgtttcaagggtacaataattttctggccactcattttctcatctgtttaatacagccagcgtggtctggaagtttggaatcaaatcaatctcagatagaggtggatgaccagttttacatgttctgttgctgacgaaaagaatcaatcattttcttaattaataagcgaggaatgcaaatgtttattgtttggactagagtgaagttgcatcagaagttgatgctgaagcctgaaggcactcgaaaaatgttgcagatgcatttctacctgtatggcaatatttagggagtcgaatatctgctgtatgtcaatgagaaaatgggttttcacgtattgc

SEQ ID NO: 2730 - DNA, 990 bp, Zea mays
  Clone ID: 700222782_FLI
ttaatgcgcccgtcctcgccagtcgccacgaccgcagcaatccgccgcccttggccgtgccccgtgctgccgtactcgtaatccgtgagggaaagcgtccgcgctccgggccccgccgccgatagttccttcaagggagcgacgagcgcgcggtcgatggagacggtggaggaggacgtggaggagtacagctggcgggaggtggtgctgccgcacctcgtccccgtggttcccggcgcgcaaccggagctcgagcgggagaccggggagcggcgccgcggcagggacctcctcgtcgccgtcgacttcggcccgaactccaagcacgcctttgactgggcgctcgggcacatcgcgcgcatggccgacacggtccacctcgtccatgccgtctccagtgtgcaaaatgagattgtgtatgataaaagtcgggagctcatggaggatttagcagtcgaggcattcaagacgttactggtccggaccaaggccagaattgttgaaggagacgctggaaaagttatttgccgagaagcagatcgactgaagcctgccgctgtcattcttggtacacgtggtagaggccttattcaaagtgtgttgcagggaagtgtcagtgagtattgcttccacaactgtaaagcagccccaattatcattgtgcctgggaaagaagctggtgaacagtctgtgctttgaaggaagatgagtaggagagttgttcctgttcgttgtactgtcagtttaggtgataaagtgttgtatattggtgctggtttgttgtgggaacatgtccttaagtgctttgctttgcttgtaatctgaagctctgaaccctctgtctggcttggttatgaaggaatgcttagaaaccgggagagtagcagacaaacatataacacaagaaatgtacttgtattgccattgctgacagaatacttcattagtacagttgatatgaataaagaatcttcagccacaagttttttt

SEQ ID NO: 2731 - DNA, 1067 bp, Zea mays
  Clone ID: 700222803_FLI
cagagggtcaaaagttgctggaagatttaccagtgcaggcgatgttggagactctcacaaagagatacgagaaggaattgatacacccaattcaaaacctgttcagtggagaattagcccgtgctatgcttattcagattcaaaagcttaaactggaccttgaatcgggactactggaaatggatcagattctaagggcaaatgctataaactttgctgttcttgcagcgcttcctgcttttggtctttcacttctgttgcttgtgttactgcgagcatgggttcagcgtgaccatggtgctgagggaagaggtaatattgcacgatgtcaacggaggctgcttcttgttgatgtagagagaaggcttatggagtttcaacattacagggataatggaatggaggaagaggcacggtgcaagtttggcttagtactttacacgcttgatagactctgcaaagctgttgagtcacacgcaaaagaaacaggcgaatggttaagcttgagacaagatatttttgatctgtcgaagctcgacatgggaatgccagataagatgattgtcgtttcacggttgaagtggatgtataactgcttgcttccattctcatcgagccgtttgccacgcctctagagcagtgagcaactggacgtcgtgtgttgcattttggataaagattttgacacggatacctggaactctatgtcggaaggatggttctttcatgcccacaagatgttctgtagattttagcagagctggatgaagcatatcggaagggggcagattgggtggatgcagtatccatcgagccctccgttgacaattcttgcattgctaggcatgttgatttggattggctgttgcaccgaatggtttgcgtcgatgggctacatctacatgtgtgcgagcattgtaccctttggccttgttccacttgcaattccaattccaatggttgttccatatcccatactagttcataagtcataacatgacaacagaatgctcttcttttatctattccgcagagatgggtacaatcttatttaactgtttcatttg

SEQ ID NO: 2732 - DNA, 1415 bp, Zea mays
  Clone ID: 700222806_FLI
gtgatgagagaaagaaggtgctggtgaagaactctcgtcatgattctgagtctgatacagatagtggctatggcaagaagaaaatggaacatgcaaaaaatgaacgtgatgagagaaggaaggtaccggtgaagagttctcgttatgattctgagtctgatactgatagtggctatggcaagaagaaaattgagcaaacaaagaatgtacgtgatgagagaaggaaggtaccgttgaagagttctcatcatgattctgagtctgatgcagatattgactataggaagaagaaaatagaacatacagagggtattcgtgatgagagaaagaagataccagcgagaagctctcgccatgattctgactctggtgcagataataatgggaaaaacaagagaccagtgcaaagctcttgtcatgatttggaggatgagaagcctagattgagaaattataattatggctctcgggcttccgagcatgagaaacatagtaagtacaaggaaagctttcgccatgactcagattcagatggttattcccgtggtaaggaaagacaattgaatgttgcagtgttgaaaaaggatgtgcaagagaaaagaaaagtagctacctcaagtgatagttcagattacagcagcagcctcagcagtagtgataatgacacgagtgcagatagctatgaggaacagaaaaggagtcaagctggagggagaagaaatgagctgaatacacaaaggcagaaagaggaggaaagaaaagagcttgaaaagcaacagaagagagaggtagagaagaaagagctggataagcaaaagcaaagggaggaagagaggatggagatggagaaggagaagaaaaggcaacgagagagggaggaagagagacagagggagagagagcaatacgaaaggaaaggtggaaatgatgtggagagagacaacaaaaggaaactgatagatgatcggtatgatccaaattcaagtagagatagagaagagggatacagagactctcagaacagagatgacaatagaaggcaggaagagcatggtcaacacaatagatatatggatagtcatgattccaagaggtcaaggcatgactcgcattaccattcaaggagggattatgaacaacgctattctagagacgaacatagagacagaaggcgtcactaaatgttggaagaatgccgttctaggtggacaacttattctcagctatcacccataagttccagtcccagatcttttctacggcagcaagaccaacccatcagtacctccgctgcagcattaatctctgcttttgtttgtatcatactttgggttttattacgcaaagagagaagtctgcaatatgtaatatgttgtggcacagacatgaatggcaggattttttttctttgttgg

SEQ ID NO: 2733 - DNA, 1470 bp, Zea mays
  Clone ID: 700222825_FLI
gtcgggaagatgatgagctatttcttcactcacatattcagactggttatgggggttcttttcttcctggcataaagcaacggttgttgtcatatattttttgcaagacgtggaatgaggttccagatcagactttgagggtccaacatctaaagaagaagttctattttcacttccaagattatgttgatcttatcatatggaaggtacagtttttggatcgccatcacctatttgtcaagtttggtagtgtggatggaggggtttctcggagtactgaccaaaacctagcattctttgccgtgtacaacatggagacaacagatatcgtttcacttcatcagaattcttcggaggatatctatgccttgtttgaacaattttatgatcattttcatgcaaatccacaagcttcatcacatggaaaatttatctcctctcattccaatgatattcatgctttggatcaacttcgggttataaaaaacaaagcaagtagctcctcacagtttgtgaaaaagatgatgacgtcattaccttacacttgccaatcacaaagtccttcaccgtacttcgacctgtctctttttaggtatgatgagaagctgatttcagcaattgatcggcatcggcattgcacagagcatccaataaaatttatgtcagtgaggcaaaatgttgtcaaatttaagatcaagccaggttcagattctggtgcttctgacagcagagcaaaaagaatctcgtccttcttgtttcacccatttttcccgcttgcactttcgattcagcagacttatatgcagccaactgttgtcaacatccatttcaggagatagaaaaggtataacggttgccttagttgtatttgtgtcattagtgaacttgcagcattgctggtggcaaagttttggccatatgtgctctagtagatatgctggaacaagatccattgtctggcggtgaggatggctagtttgatttctcttccaaaacaaagtacaaaatgcaaatgggctcatcattcatctattgatgtggcttcatgggctcatcagttatctatcattgtggcttcacagtgttgatctatgctttcatatgcctagctcggagtgtcagatgtgcttgttattatatttaagaactatctccagcagactccctatcacactctgtctcaccatttcaaactccactctataataagtgcaaaacagtactttgcacgatcgtttacacggtctgctagagatggccacgtcatagcatggagcgggtatattgcatgtttcatgcttgagatgagggtgatctaagttgcgaatttgttttcgaggatatataggaaatgtagcattacaaatagttttgggttgtctattatgatgaagtaactattatttagtgaaacttttatgcgaacataattataatttttcagtgctcaatatattactggagctcctt

SEQ ID NO: 2734 - DNA, 572 bp, Zea mays
  Clone ID: 700222827_FLI
cgcaagtccaccggaggcaaggccccgcgcaagcagctcgccaccaaggcggcgaggaagtctgcgccgacgaccggcggcgtgaagaagccccacaggtacaggcccgggacggtggctctgcgcgagatccgcaagtaccagaagagcacggagctgctgatccggaagttgcccttccagcgcctggtccgtgagatcgctcaggacttcaagacggatctgcggttccagagccacgccgtcctggccctccaggaagccgccgaggcctacctcgtcggcctgttcgaggacaccaacctctgcgccatccacgccaagcgcgtcaccatcatgcccaaagacatccagctcgcccgccgcatccgcggcgagcgcgcgtaggcgtatctcgcgcccggccccagtggcggcggagggatggaggagggcaatttgtaaccttatgctgtttgttcgcttttagacggcgtggtgaagaactagtgtaaaaacggctttaaagtctattttgtgcggtagttcgtgtaggccgcttcgtcccgaagcgatcttggtaaaagacttat

SEQ ID NO: 2735 - DNA, 854 bp, Zea mays
  Clone ID: 700222922_FLI
ctgttgtcctcccggttggttgctctgctcgtgcaccaccgctgccagcgatccttcggttggtgaaacagctggctcctaagattgtgatagccatagaccatggcgctgatcgtgctgaccttcccttctcgcagcacttcttgaattgcttccagtcctgcatgttcctccttgattcgcttgatgctgctggcattgatgctgattctacctgcaagattgagaagttcctgattcagccaagaattgaggatgcggtgcttgggcggggcaaggtggacaagccaattgcatggagaagtgcatttgcagctgctgggttcgcacctgttccacccagcaatttggcggaggcacaggccgactgcctcctgaagcgggtgcaggtccgcggtttccacgtggagaaatgcggggtcgggctcacactatactggcagtgtggcgagcttgtcactgtatcagcatggcggtgctgatcagcgatccacgcctgtgcgcaccatgttccaccaacatttgctggcatcttcaaccccagtaatgtgtattttgtcttgcaattaaatgctgctaaggaaactgatatattgctgttgaaccctccatgttcttcatctttgcaacttacgagctagaactagtggatttttagcaatgttggtgccaatatctctagtgtaatgatgttggactaagattttaccctgcttgctctcagctcactagacattcccatgtcatttggaacactgcttgtgaggagagggtataattaacctatcaaatgtctgtggtatagtactgatatgtgtttcatgtttctttatatcagtcattgttcttatggt

SEQ ID NO: 2736 - DNA, 1376 bp, Zea mays
  Clone ID: 700222934_FLI
ccctttaccattgtctcccccctcgtccgacctcctcgccgccgcagacgaccgccgccgccgctgccgctgccgctgcgaaccctttgtgaatcttcgttgtccgggctgtgtggggcaggcatggcgctccggaggctgctgcaggggagcgtcctgccgcggataatcggcagggatttggcaccggccgtggcgccgttttcaacggagtccggggagaccattcgtgccacgctctttcccggcgatggcatcgggccagagatcgctgagtctgtcaagcaggtattcaatgttgcaggggtaccaattgaatgggaagaacactatgtcggtacagaagttgatcccagaacagagagttttttgacttgggaaagcctggagtcagtgcgtagaaacaaagttggcttgaaaggacctatggctacacctattggaaagggccatcgatctttgaatcttacattaaggaaagaacttgggctctatgccaatgtcagaccttgcaacagcctcccaggttacaagaccagatacgatgatgttaaccttgtaacaattcgtgaaaatactgaaggagaatatagtggtcttgagcatcaggttgtgagaggtgttgtggaaagtttgaaaattattacacgccaagcaagtttgagagtggcagagtatgctttccattatgccaaggccaatggccgggaaagagtctctgcgatccacaaagccaatattatgaggaagacagatggtcttttcctcaagtgttgccgtgaagtgtctgaaaagtaccctgaaattcaatacgaggaggtcatcattgacaattgctgtatgacgcttgtgaagaatcctggtctttttgacgtattagtgatgccaaatctctatggtgacattattagtgatctatgtgctggtttgatcgggggcttgggcctaacacccagttgcaatattggtgaaggtggcatttgtctggcagaagctgttcatggttctgctcctgatattgctggcaagaacctcgcgaacccgactgctcttatgctgagtgctgtcatgttgttgcgccacatgcaattcaacgacaaagcagaccggatccacaacgccatcctccagaccatcgccgaggggaagtacaggactgctgatcttggtggaaaggcatcgacatcagagtttacaaacgcagtctctgatcacatctgagaaacggatgtgattcttccttctgattgttttgtcatcctaatatttttttgtcacatatgagaggagctttagctttaagaggttaactggcagcacctcgaacttctttggggtgtttaacacggtttgagaccgtcaaataattttgtcac

SEQ ID NO: 2737 - DNA, 498 bp, Zea mays
  Clone ID: 700222945_FLI
caagaggaggattgtgctgtttgatagccaagtaggaggtgataaatgtcatggtttgattcaattgatgcgacctgttgtatcggtctctgtgatggacaagctgaaaattttcgcaacgaccgctgctggtgtctctacaggcgttgaagttactcctagatggaacggtggacacgaattcgtactcactttaggtgacgctacgatttgtgtgaaggttacttggtcgatggtagatccacggctttaaatgggttcgcctgttcgttgttaagcatcatcggtggaagtgtagtagtgttgcattggaagggtttattctactcttgttatttgtctaaatgcatcattttttttgtgtggtggtggtggggttgtgttgctgggttctcaggtaatattttaaataaaacctgaaaatccaggcagagctcaccttttggtgcggccatggtggtcttcaccttttgctgggttctcatgcttgtttgaggc

SEQ ID NO: 2738 - DNA, 1719 bp, Zea mays
  Clone ID: 700222949_FLI
gaccagctccctggggtctcctactgcatcaccagccctcccccgtggcctgaagccgttcttcttgggttccaacattatctggtcatgcttggtaccactgtgatcataccaactgcacttgttccacaaatgggaggaaacaatgaggacaaagcagtggttatccagacattgctgttcgttgcaggtatcaacaccctcctgcagagtttctttggtaccatgttgcctgcagtgatcggcgggtcatacacctttgttctgcctaccatttcgatcatccttgctggacgttatgctaatgaacctaatccacatattaaatttctccgcatcatgcgtgggacacaaggtgcgttgattgtggcttcagccttacagattatagttggcttcagtggcctttggcgtaatgttgccaggtatctgagtccactttcagctgctcctttggtggcactagttggatttggactgtatgagctaggatttccatcggttgccaaatgtgttgagattggtctacctcaactcatccttcttgtgatctttacaatgtacctgccacatgctgttcacatgctgaagtctatcttcaatcgttttgctgtcctgttcactatacccatagtgtggctctatgcatatcttctcactgttggaggagcatacaggaatgcaccaccaaagactcaatttcattgccgcactgaccgttctggattaattggtggcgcaccctggataagaataccatatccctttcagtggggtgctccaacttttgatgcgggtgaagctttcgcgatgatggcagcatcatttgttgctctcgtggagtccactggggccttcattgctgtctctaggtatgctagtgctacaccaatcccaccctctgttcttagccgtggtattggctggcagggcatcggtattcttctggatgggctatttgggactggaaatggatcttctgtatcagttgaaaatgctggtttgctagctttgacacgcgttggtagccgaagggtagtgcagatatcagctggtttcatgatattcttttctattctcgggaaattcggagctgtgttcgcctcaattcctgcacccatctttgcagctatgtattgtatcttctttgcttatgccggttctgctgggatcggcttccttcagttctgtaacctcaacacctttaggaccaagttcatccttgggttctcagttttcatgggcctttctgttcctcaatacttcaatgagtacacatctattgctggttatggtcctgttcacacacattcaagatggttcaacgatatagtgaatgtgatattctcgtccaaggcgtttgttgctggcttcgtggcatatttgctggacaacactattgacaggcatgaagcttcagtcaggagagaccgaggctaccattggtgggacaaattccggtcgtacaggaccgatacaagaagcgaggagttctattccctgccattcaatctgaataagttcttcccatcggtctgagcttttgctgtggttaatgtgagatgctcttgttactctggattctggaactgcccaccccctgttctccggcggtggcaatgtgatctggattttctcggtacatgaaaaaattactgtatattaaaacccgctcagctcgggtttcacctccttcccgtgcttcacgggaatttggcg

SEQ ID NO: 2739 - DNA, 2073 bp, Zea mays
  Clone ID: 700222965_FLI
gcctccgcttcctcgaggccgcgtttcgccggctgcctgccggcggtccaccataacatgggcggcgggcggaagcggcggcggcgcgacggctcggagacgccgtcgatgcacccgcggaaccgctacgcagccgccgcgccagatttcgccgcgctggcggagctctacccgtcctttcgccccttcgtcttcatctccggcagcgggcgcgcgtccgttgacttcaccgacttctcctccaccagggagctcacgcgcgtgctcctcctccacgaccatggcgttaactggtggattccagatggacagctctgccctactgttccaaacaggtccaattacattcactggatcgaggatcttctctcctcagatctgattccaccaatatccagctcgagtgagagagtgaagggcttcgacattggaacaggcgccaattgcatctaccctctccttggagcatctttactgggatggacctttgttggatctgatgttactaatgttgctcttgaatgggctaagaagaatgtggagagcaatccacacctggcagagttaattgagatcagaaatgcaaatgcagcaccatttgaatctgaaactgttgtcagggaagctgccagcgagaagattttagagcctgcggaggatgtagctatgccaaagccacatatccttgtgggtgttgtaaaggagagtgagagctttgacttctgtatgtgcaatcctccattctttgagagcacagaggaagctggccttaacccaaaaacatcgtgtggtgggacagctgaagagatggtttgcgctggtggcgagctggcatttattacacaaatcattgaagatagtgtttcccttaagaactctttcaggtggtttacatcgatgattggcagaaaggcaaacttaaagttattgatctcaaaggttcgtgaggctggggcatcagtcgtgaaaactactgaatttgtacaaggtcatacagctagatggggccttgcttggtcattcattgctccgaaaccaagaaaaatagtcctcggctccagtgctccagcaaaaaaacaccattcctttatgcttcaggggcttcgtcgtgaacatggtgcgttccaaattctgaaatcaactgaggctttctttctagcttctaatctatcatgcaaaacggattcgtcggtcttttcagtcgatgtcacattgtcagatgagcagattgaggctgcaatattgcatggggatgattatgccggttctctagaagatagctctgcaaagttacaatgcgttgtcaagggaatatcatttcgtattacagtgtttgaacaaattcctgggaccctcctaatcaaaggttcattattgaataaagcattatcaggtaccttctcatcattgttttctcggttggaggatgcgttaagggcggaatgtctcagtaaggcgcgatagatctttaattatgagctttgatgcctctgcacggataagtcttctggatgccaaggaatgtgcaaaacgaaatcatgggacggcaacagcgtattagcttatagccaggagtcacaaacagagacgctaagcagtgatggaaactctacacttgcactgcagaaaccattgttgctcgcatgttttcttgatgtgcagtgacggcaagtttgtgggaataccagcatcatgtctggtgtgctggctgcttatctggatttggagaacgacttgacatgacaacaatgggggtcttgctttcaaggccccctgcagtggcacgcaccgtaaaccattccagtgacactgagtagatgacaaatgcagcatcagtggtctgtgcagaccggggtatctggtacactgaattgcctccagagttttttctttctttcttttttccattctttctttctttctttgctatggcacgggaactcagatgaaggctttgaacttcagtgaaccgcacagtgcatgaaactgctgctgcttcaaattaatgtgtttttggaacatgtttgtagcacaatgcctctggccggtagcagtggattatgtaactgtctc

SEQ ID NO: 2740 - DNA, 1726 bp, Zea mays
  Clone ID: 700223017_FLI
ctcccaaatttgttgccttgaggcggcggccggcgggagagagcagctctagagagaacagagagcgcataactagcggcggcggcgatgaggatagaggaggtgcaatcgacctcgaagaagcagcgcatcgccacccacactcacatcaagggcctcggcctcgacgccaatggaatgtcgatgccgttggcggcggggttcgtgggccaggcggcggcgcgcgaggcggccgggctggcggtcgacatgatccgccagaagaagatggccggtcgcgcgctgctccttgcgggcccgcccgccacgggcaaaacggcgctagcgctcggcatagcgcaggagctcggcagcaaggtcccattctgtcctatggtaggatcagaagtgtactcctcagaggtcaagaaaactgaggtgctgatggaaaatttccgtagagctataggtttgcgtataaaggaaaacaaagaggtttatgaaggagaggttattgaactttccccagaagaggctgagagcacaactggtggatatgcgaaaagcattagccacgtaatcattggcttaaagactgtcaaagggactaagcaattgaaattagacccttcaatttatgatgctttgatcaaggaaaaggtggcagtgggtgatgttatatacattgaagcaaatagtggagcagtgaaaagagttggtagatgtgattcttttgctacagaatatgatcttgaagctgaagagtatgttcctatccccaaaggtgaagtccataagaaaaaggaaatagtgcaggatgtcacactccatgaccttgatgcagcaaatgcccagccacaaggtggccaagatattttgtcccttatgggccagatgatgaagccacggaagactgaaatcaccgaaaagctacgccaagaaatcaataaggtggtaaacagatatatcgacgaaggaatcgcagagcttgtacctggtgttttgttcattgatgaggtccacatgttggatattgaatgcttttcttatcttaaccgtgcattggagagcccattatcaccaattgtgatactcgctacgaatagaggaatatgtaatgtgagaggaaccgatatgacgagtccacatggtataccagtggaccttctagataggttggtgattattcggacagaaacatatggccctactgagatgatacagatactggctatccgagcacaagtggaagagattgatatcgatgaagaaagtcttgcttatttaggcgagatcggacagcagacatctttgagacatgctattcagttgctatcacctgccagcgtggtcgcaaagaccaacgggagagaaaagatgtgcaaggctgacctcgaggaagtcagcgggctctatttggatgccaaatcctcggctcgcctgctccaggagcaacaagaaagatacatcacctagacttgcatctcctgctgtggaaggaaaagcctcgaagagaaatgcattctgcaaagtgcgtcgatctgcttcagtatgtcgtagtctacaagtcttggagagagcacgtttctgcggggaaggaaaactgtttgaattttgtagtacctgttttttgttagcctccagcgaagacttgattccggcatattgcttgttcacgcaccgttaacaccgattaagattggcccagccgtgcaggaattgccgggtgtgttttcaccccctcgct

SEQ ID NO: 2741 - DNA, 2272 bp, Zea mays
  Clone ID: 700223029_FLI
gctgtagtttgtattagggcggatcaaagaaagttttacctggccggtggagcttccttggtcatcctggcgcaccttgcgccagctgacggaatcagctccatctctggccgatccccatatccactaagatcccttccccagtcccaagccttgctgcgatcaccgctgcgcagtcctaggcgcccacgacatatcaccttttaacttatatacagtaagatcacgagtttgttgaatttgatatatgtttacaccttaccgaagtgagcatacaatccacctttttttgttagtggaatgaattgtaagcaattatccatacactcattagaaccatctggaaatgttttgcttgtttaatactttcattactttgcgacagatgttgcctgatataactcgtgatgattatatgataaaacagccttagtgagttgttaaggtccatttaaacatataaatgaccatcattttagtttagcctagctctttagggtgcctgaagccctgaaccatgtagctgcctttttacaagaccacaacagcctttatttaaaacatgctataatctattcaaagcatactcggatagtaaaacagtggcaggtgtttccccttcatctgttgatccatgtagcttgttcttgtgcttttgaagcttttagttgtttctaataataaaactatagatagtatgcggcaacatagaacatatttactttttccaaaacaagagtgaggctctcctattttggtatttcttcctttttgtgaaacttgacatttcttttacataataaaaaatcgggcagatatactctgttatctttttcattatcaggttgatgaactctactcacttgacctggatgctctcaatgatcttcagccaatatatgggctaatattgctatacaaatggcgacctccagaaaaggatgagcgtcctgtcatcaaggatgcaatcccaaaccttttctttgccaaccagataattaacaaagcctgcgcaacccaagctatcgtttcggttctcttgaactctcctggcattacccttagtgatgagcttaaaaagctcaaggaatttgcaaaggatttgccacctgagctcaaaggactggctatagtcaactgcgcaagcattcgtatgttaaacaattcgtttgcgaggtcagaggcctctgaggagcagaaaccacctagcggggatgatgatgtataccatttcataaactacgttccagtggatggtgtcctgtacgagctcgatgggctaaaggaaggaccaataagcctagggaaatgcccaggtggtgttggtgatgcagggtggtggcttaggctagcgcagcctgtgatcaaagagcacatcgacctgttctctcagaacgagataagattcagcgtgatggcgatcttgaagaaccggaaggagatgttcacggtggagatcaaagaactccagaggaagagggagggcctcttgcagcagatgggcgatcccaacgcaagcaggcatgttgagcagtcactcgcggaggtggcagctcagatcgagtctgtgacggagaagatcataatggaggaggagaaggtgaagaagtggaaagcggagaacctgaggaggaagcataactacgtgcccttcctgttcaatttcctcaagattctcgaggagaagcagcagctgaagcccctgatagagaaggcgaaggcgaagcagaagtcccacggccccagctaggtgaaaagccgcaatgcacctacgtactgtctcttttagttggggttccttgggcatgtttggtacctagcctaagccgccgtcaccagccacacttttcccgtcgcagttgtggcggccaattcggccgccacaacttaggcgtggcgtgtggcgccacacaccaaacacaccacttgtaagattggagttcgcgtatatgctttctgtttttagtttaggacaattgcaccaatagggtgcaactgcagatttatccctgtttttttagactttgcgtgcgtgcctttagattttttgaaacgaaactgctgtatgtctcttccgttaaaccgttgtatgtctctacttcggttagtcgtatttagtatttaacggtgtcaagtcttgataatacgtcaagggataattatgttagtgtccctgttttagggtagaactgtatatctacccttgttttttagactttgcgtgtttgcctgtacaattattatgcttaacatgatgaggatgttatgctct

SEQ ID NO: 2742 - DNA, 699 bp, Zea mays
  Clone ID: 700223038_FLI
accagttctacctgtggttcgacccggccgccgacttccacacctacaccatcatctggaacgacaagaacgtcatcttcaaggtggacgacctcttcgtgcggtgcttcaagcggtacccggacctggcgtacccgggcgggaagcccatgtcggtgcacgccacgctgtgggacggcagctactgggccacgcagcaggggaaggtgaaggtggactggtccgccgcgcccttcgccgtctcctaccgcggctactccgccgacgcctgcgtgcccgacggcgacggccgcccgctctcctgccccgccggcaccgaccgctggatgagccgccagctcgacgccgccgagtggggcaccgtcgcctgggccaggcagaactacatgcactacaactactgcgacgacggctggcgcttcccgcagggcttccccgccgagtgctcccgcaactgattcattggtttgtttgttatccccgatccgttcgcgcggtcgccgtccgtcccacacagtgccctgccctgcccccccgacgatttcttgcttcctgttcctcatctaattaatcatcaatggtgtttgttcgtcaccgctgttcttgatggatggatgcacaggacagggcaggacagatgttgttgccttccattccatgtacattttgccgcacatttatacactactagtgcccttg

SEQ ID NO: 2743 - DNA, 1317 bp, Zea mays
  Clone ID: 700223048_FLI
acaatctgacactactttgttactgcacgagatataaaaaagcaagcaggctttctcaaatctcaacgagttcgaaataagacaagtcaaccgacacacaagcaggcctcacacacaggccaaaacaatgctgggtactgggacctacgattggacctgataaaacacagccgaatcggtttagtaggcctcgtctccaagcgaacacgcaaatcacacataagttagatgcctagccgacgggaaaggaggagaaaccatggtttcaccacaggtgcatgatgctactatgctagatggacgcacaggcacacacttcagagccagcttcttccctgggttagtgttgttgcagattcaggttccgctgctgccctgcccctttgcgtgggatcgatcggcaaacgttctcgtccaccctggcaagcgccagcctcttcgcttctttcttcttctcggcgttcagcctatccttgatcttggctttaagcttccctaggctaagcgcaaacaaatccacgggtttcttggtcgcttttactcccttctcttttagctccgccatgggttcagcagtgttattctcactgctgttcttgcaccctgatgacttgttgctggacagggactctgcgacatctatgctggatgcattctccttccggacacaatcatcttgtggtatcgagattatgtcagcagtgattactttcttctgctcattgccatcaccaaaatgggtttccttgacacacccattcattgtatgtgcgatacttggggcagtcccgtgatctggtatggcctcagtaatcacagctgcttttctctcaacaccttcatcgccagtcactgtgacttcatctggcacttcagtaactatcacttccttctgtccatctgcatgatcaaagacaacatctccatccattgtaactgatgtcttctcctcaatttcaccggccgtccctgtgacttctggcacatcagtagcaacaacttccttcttttcatcagcatgagcaacatgggttttgaaatgatcatcctcaatgcctccattcattgtatatgtgctccgttgcttctcctcaacaacttcgtaatctgcctctgtgagttctggtacttcatcagtagttgacgcttccatctgttcatcggcatgaacatcatcagttttgaaaaaaggatcatcaacagcatctctatccactgtaattgtgctcttttgcttctcctcaacagttatccctgtgtcctctagcacttcgtcagcagttaccacttccatctgttcatcaggatgaacattat

SEQ ID NO: 2744 - DNA, 934 bp, Zea mays
  Clone ID: 700223049_FLI
cgtcgtccgccgcgctcgcgctccagctcaacgcgcactcctccaccaaggagcaggaaatggaagtaacagagcataatttaaagacacagcttgaaaatgctctgaaggagctagaggctgctcaacataaagcatcaacagcaacctctggaacagctgaaaatgctctactggaagctaagtcagtgactgaccttaaatctaaagatttggaggagaagaaaagggagcttgaactattggataacaaggtgcaaacattagagaaagagtggtctgtggttgaagaagaatctttaaagaaacccactcctgcacaaagggagaaggtcctggagaggcaactgcatagcctcatcgagcagttgacagctaagcaagctcaagctgaaattctggccactgatgtgcattccaaagaaaaggagctggaacggctgaaccatctgcatagaaacctctacggcggtgccaacgaaactggcgcaccccggagccgcctcagcagaggcctcttgagcggccctgaagattactattacgaccctaaagcgggccggaaaccgtaccaggctggcgttagaacagaaggccagaaccggctgatgatccttaggtccgcaattgtactgtatgttctgctgctccatgtcatcgttttcataaagatatcagtctgaaagcagttgagctagcgcttcataagttcatatagggaaacagatacttgcttttgtgttccaaaccatgcaaacgtttcttgttgtaaataactttgtatgtgagtatgtatctcgtttgatagatttataggagagttatatgaaatacctgttgtcatattttggtactctttctcctgtgcttttgtaaaaacttcatttgaatgagataagaatccatgagtactgtagcccccttcaaaattgtg

SEQ ID NO: 2745 - DNA, 1630 bp, Zea mays
  Clone ID: 700223053_FLI
acaagttcctgctgaaggtgatcgtgaactcgggcatcggcgaggagacgtacggcccgcgcaacatgatcgagggcggggaggcccggccggaccgcctccgcgagggcatggaggagatggacgagaccttccacgccgtcctcgacgagctcttcgcccggtcggcggcgcccggcggcgtcggcatccgccccgccgacgtcgacgtgctcgtcgtcaacgtgtccatgttctcgccggcgccgtccctgtcggcgcgcgtcgtgcggcgctacggcctccgcgaggacgccaaggtgtacaacctcacgggcatgggctgcagcgccacgctcatcgcgctcgacctcgtcaacggctacttcaggacgcacgcggggcaggtggctctagtgatgacatcggagtcgatcgcgcccaactggtacgcgggcaacaagcgcaccttcatgctgggcaactgcctgttccgctccggcggctgcgcctacttcctgaccaacgacccgcggctccggccgcacgccaagctccgtctccgccacgtggtgcgcacccacacgggcgcctccgacgaggcctacaactgcgcgctccagatggaggacgaggccggccgcccggggttccacctgggcaaggagctgccgcgcgccgcggtgcacgccttcgtgcacaacctccgcgtgctggcgccccgcgtgctgccgctcccggagctgctccgcctcgcctgcgccaccctctcggcgcgcctggcgcgcaagaagcggcagcgcggcgcgggccatggccatggccacctcaccatccgcatgaaggccggcgtcgaccacttctgcgtgcacacgggcggcgccgccgtcatcgacggcgtcggcaagggactcacgctcacggagcacgacctggagccctcccgcatgacgctgcaccgcttcggcaacacctccgccagcagcgtctggtacgtgctcgcctacatggaggccaagggccgcctgcgccagggcgaccgcgtcctcatgctcaccttcggcgccggattcaagtgcaacagctgcgtctggaccgtcgagaggcccgccaccgacgccggcgtctggaaggaccgcatccaccactacccgctcaaggacgtctccaacccattcatggacaagtacggattcgtcaaggacctcatagacttgtgatcgcccctagctgctgctgctcaactcaaccccaccaacgcacatactttttatttacaccattattattgtattcattgtcatgttagtactactctgttctagtattcagcaactactagttaattaaggtgagcacaacaatgctagctgaggattcatagtagcttatgattcttttggtggtggcgggaagatccacttttacgtagcaacggatatggcttcgctctttgttctttcttcagttctgtcatttcgtgtctgtcaatttagatgccccatgtcgtccgtcagtcagtcagtcagtgtcgtcctgttcctatttactatatcaaatgattatggtgcaatcattttttaaactaagttatttattatttattgtgtaatggtaaatggtgctgtaataaagagcatactctcactcc

SEQ ID NO: 2746 - DNA, 885 bp, Zea mays
  Clone ID: 700223062_FLI
tgaaatctaagaaagagcgggtggttctttacagcaaccgagctcagtgctaccttctcctgcagcagccatcggctgccataagcgatgctactcgagcgctgtgccttcatagccccgtgaatcgtcacgccaagagcctgtggagaagagctcaggcgtacgatatgctcggctttgcgaaggagagcttgctggatacgatccttttcataaacgagtgttcgcagtcgaacgatcctgacctatccctgaagcagaacaaagtccctgattatgccgagcggctggtgaagaagcagatgcgcgccgcttggctgttcagggaagcagccctgaagcacgggggcgtccgtcgcgcgggggatgctagcgacgctgcgtttggccaggaggccgacgactccgagtgggagacagctagcgaaagcgacggcgagaacggtgccgccacggggggagaagcagacggtgagactggatggaagaatggtggccgccaggaagatttctgtgagaaaagctgagcaacagccaaatgtgtattcagagtctcaaactgagctgctacagaagcagatgctgggccttctgcggtcggcacactatgaagcatcaaatctttctaacgaaacgatctggtgacgtttttattgtcctcatcaaagcaaggggggcagaggcccaattaaattagttatccacgtcttctcgctgggtcagttgagctgtgcctgtgaccattcaatatttcctctttgatgctggtcctcctctggtgtttgtaacatatttttggtcagtttgtcaagtccctgaaagaacagaactgtgtgcattgcttgttttgttttattgttttctgaagtttggtgaagaggccgt

SEQ ID NO: 2747 - DNA, 1211 bp, Zea mays
  Clone ID: 700223067_FLI
ccaaaggtgagacgcttccccttctcctcgccgatggagtcgcttgcctcgcaagcgaggccggcggcggtgctctggctcgccggcttcttccaggccgcgcgcctccaccgcgttgtctccttctgcgccagctcgagggcactatccatcaggattgcacagtgcttcctgctgaatgggcttatcttccttgggagcttgcttacacttacatcggtggtcattccaactctactgtggatactacctgagcgatgcaatcaaacagcaggacatctttgtgaacacagggcagccatatctatctattcattcttgcgctccggccttgttgagattttttatgtattttggttttatccactttacgtcttcagcttcatattaagtacgatttggtataatgacattgccaagcatgcattggatgttgtgaaaagtaagagcctagttttgactcaatcactggatgctcacaacgtaactgaaacaaaagagcagcctgaaggatttgacagggttgcacttggtattggggaacaagtctattcaattcttcttttaaccattttctttgttgaggtttcagtgattggttacataccttactttggcaaggcaatgaacttcctgctcctgtcattgatgtacaagtggaacttctttgcagtgagtctgcatgagaggcttgatttctttgaatcaaactgggcgttctttgctggatttggtgctccatgcgtccttccaattttcttcttctctcctcttataagctatgggtttctggctatactttatccgttgtttgtcttgactgccgcaggcactcaagctgagcaagtaattgatgcactgaaacctgcacaccgagggaaactacaaagaatacctgtgttctttgtcgcaaagcgactgacgacaaaagtactgcaactgtttccggtggcacagaaagaacaatgaaggatccacagaaacaaaccaaggagggaaggccgctgtgtgtgttcggtgtgctgctaatcacaatgccctgttcgaacgaacgttgcatccgtaaggtgcgcacgccctctccgctctccgtaacgtggaagggaggggcttgccgccttgacgctgtaaatatcctgtaacatcgcccttgttacaagcatttctgtcgaaatgggaactttgaaaatatagagaattgcactttgtac

SEQ ID NO: 2748 - DNA, 621 bp, Zea mays
  Clone ID: 700223074_FLI
ccgctggcccggcaggggacattggcacggcggcgttggcatccgtcgctgcccgcatcaagggcgccgtcgagcggatggatgacgagctggtgcggtccgcgattgactactacgagatggccgagacgaacaagagacggactgggacaggcatcttaccacggacggacctgaatattaccagctggttgggtaggccacagcacgacgcagattttggctggggaaagccgcaatccatgtcgcgggcggagtctgtccgcggcggctctatgcacttgatgaacgacgacggtggtaccggcgacgtccgcgtgctcgtgtgcttggaggctgaaaatataaaggagctaggacggctgctttatgcaaagctctagcaagctgctagtgctatgctctaaaaataataatattaataataaggtttgttactatgcttaaggggaaccatactttttccctcgcgatttattattattatggcagtttcaataatgaaaaccatttgtaattcctgtgacaattaatttatgcgtccacgctagaaataaaaacttgtttgtaatactacagtttttttttgttatggcagtttcaataatgaaatccgtatgt

SEQ ID NO: 2749 - DNA, 1795 bp, Zea mays
  Clone ID: 700223117_FLI
ccaacgtggagaagctggaggatgcgccacaggatctggcgctagagaggtacaaaatgttcctgaagcagtacaaggaatgggtggaggcaaaccgagataggttggagcaggagtcctaccagtttgatcaggattacttccctggcagacgaaaaagaggtaaggactacagtgaggatatgcgtgaacttccattctactatcccggacagatatgttacgggcaagtaacgactgttcacctctaccagggagcctttgtgaacattggttgtgtccatgaggggtgggtaccgataaaaggaaatgactggtactggatccgacatcacatcaagcctggcatgaaagtctacgtggagattctggccaaacgagacccttaccgcttccgcttcccacttgagatgcgatttgtatatcctaacattgatcacctaatatttaatagattcgacttcccaccaatatttcaccgtaaggaggatactaacctagagcagttgtggcgtgaagccggacggccacccattcctaggaaaaaacctttaaaagatatggaaaaggaacctttggtatcagaccatccttttgttgacacgctttgggaatggcataatgcagagcagatgattttagactacgaggaacaaaatccagataaattcaagaatacaacatatgagtccacagttgatgcaccctcaatcgatgaagaaaaaagagttgaatacaccgaaggatatttcaaagaaacactgctaaaaaagaaagttgtgaatattagcatcaaagaacttgatctggatgctgcccgtgctgaacgccagctgataaaaaggctgaaaaaggaagccgaggagagaggggaggaatacaaggttaggaagctccgacgaaacaaagaaatggatgagtatgatctgatgcaatggcgtcgttcatttgaagagagggaagcgcttatcagagacatctgctgccggaaagcgcttgatcttcctatcgaagagcccgggcgatacgacgtggacgagacagaggtgtacgggaaggattactatgacccagagaagccaatgtaccggtacgactactggggcgagcccaagaacacggagaagacgaagctggagcgggacgtggagcgccacaaccagcaggtggtcggcgacgcgaagaagtggtgcgagatgtcgtacgacgactacgtccgcaagaagctgcggttggaagcggctgaggcgagggaaaggcggaggaaggcggccgaggcgcaagaggacgagcaggagtacgatgacggcatggacctggacctgaagaagatgaccgatccacgcgccccgcacaaccggttttacatcacgaaatgaaaggttagagatagttgttagttgtgcaaaaggttcgattgccttggttgttgttgttgggccaccgcttccgcctatggtgcaagagttgggggcgcttgatcaggtcgtctgacattctccttgttgacccaaccccattccgattggggcgacctggtcaaacgcgggggcgtgctagctacgctcagtacaagtattcagcatggaatctccagtattttattctagagaacatatcttgtgtatattgaagtttagtgcacatgttacatatattaaatcagtatcactcattttagatttagcatctctagttgtttgatatattttgttaaagacacgctccgacattgtgggtagtggtggacgatgttatttataaattgcaatgatcaaccatataagttagattt

SEQ ID NO: 2750 - DNA, 861 bp, Zea mays
  Clone ID: 700223126_FLI
agaagcttgatgataggttcttttcttgatggtggtactgatgagaacggtgacagtgaaaggttcataagacggcgccagaaagctgatggtgagctgttaccgagggaggaaaatggtggtgactttctggcaagcgttggaaaaggcttggctctgaggccaaagtctagcaatcgaccagacatgaacaagagccagcagaatctttttgcaatggcggagcctttgtttggcaatggtttgcaaactgtaaggaaatcatccagcactccggagttccaggagccagagaccaacaccagttcatccatatggtcagcgagcaagtggagcataaatacagatgcttttgctcttcctctcccgatccctcgttttgacaacattccaaagcccattgctgcttggagaaacaagccggctcgcgactaataaactgctacgcgcatgatttttcctgaactccaggaggcccagaaagcgggaagtgttcatgaaggagctttacattaggttggcaccagcctctacagctttggaagcagagcagagcaggactgtagtattggcccctgctagctagaacattccgaagatcagacgcatggcatctatgtttccagacggcatctggactaggtttacatgattctcgtgttatattgggcatgttgcgccaagagtagcaacgttaatattcggtcatataaattatagatgctagatgacatagaggagatatatttgaggaggatatattttttttctgtacacaatgagaaaatgtagagcatcaaagggcggttatatatgtgttgtatgtgtgattccataccctaatatagaggtggttggctt

SEQ ID NO: 2751 - DNA, 167 bp, Zea mays
  Clone ID: 700223165_FLI
catgtaataagtgatataatgttcacattgctttggttgacacaagtgtgtaacatgtgctaccacaagtgattctgggcgtcctttgtagttgaaccatatttgttttatgatcctgcttttctgtatcatctgcctgcttttgttagcagatgtacggaatcttc

SEQ ID NO: 2752 - DNA, 1405 bp, Zea mays
  Clone ID: 700223182_FLI
gcggaggaagatctcgggctctcagagctgcatcctgaacccatcgcgtaggaaggggcaaaggagtcggagctgatccggcagtcgctctctctcgtaaaatctacgcattgcgtggccacgttggctaggaatttggaagcaagtactctccgctttcagtaatcccaacggattgagtacgatttgacgcatttgcggccgagctttcttgcacccaagatgagtgggcatggtgacactgcgacctcagctaagatggcgaaactgaaggagttgttgcaaaagagtgaaaaccacatttgtgctgactgtggtgcatctgatcccaaatgggcatcagctaatattggggtattcatttgcgtaaaatgttctggcgtccatagaagtctcggtacacatatttcaaaggttctgtcagtgacactggacaagtggtctgacagtgaagttgactccatgatagaagttggtgggaattctcaggcaaacgcaatatatgaggcttttataccagagggctaccagaagccacattcagattctacccaggaagagcgagaaaaattcatcaggtctaaatatgagctgcaggaatttctgaagccaagcttgcgcattgtttctcatcagcctagtgactctggaaaacatgccggaaatgcttctcattctgatggttccaagagtcaagtcggcatgatcgagttcattggaatattgaatgtcaaggtgattggaggcaccaacctagccatcagggatatgtcaagcagtgacccttatgtcgtcctgacacttgggcaacagaaagcacaaacttcagtaatcaatggcaacctgaatcctgtctggaatgaagaactgaagctctctgttccccagcaatatggacctctgaagctgcaagtgttcgatcatgacatggtgtccaaggacgacctcatgggtgaggccgagatcgacctgcagacaatgatcaacgctgccgcagcatttggcgacccggagctgctgggcgacattcagatcggccggtggctcaagtccgaggataacgctctcgtcagggacagcgccgtggtggtctctggtggcaaggtgaagcaagggatggcactgaagctgcagcacaccgagtccggcgagctggagttggagatggagtggatgccgcttaacgtgtagaaatctgctcaagttgccacctttataatgggtgtgggatacaaagaatttgttttgcttttgttgccaagagaaattgttatattttggtaattggcaagggctctcttcaaaataaagatctgaatcgctaaaaggtgtgttgtggatactaaaatttgagagatgattcacaagaaactcctttttttctaatctaaattcaaggttcacc

SEQ ID NO: 2753 - DNA, 1779 bp, Zea mays
  Clone ID: 700223238_FLI
cggcgagtccgagccccaggaacgaagggcgatggcggcgatgatgatggccacgtccgagtcaaagtcccctgcccgcgtgctgaggcggctggctggcgccgcggtcgccgccgtgctgctccgccgcaccttcagcgcctccaagtgcaagacggaggcgcggatggcgacggcgctgatgaagctgctgcggaaccggagggaagcgcaggtgcgccagatgcgccgcgacattgccgcgctcctccgcgacaaacaggaggataccgcacgcatcagggttgaacatgtaattagggaacagaactttatggcagccaacgagatcattgagctcttctgcgagctgattgttacacgccttcctatcatcgcaaaacagaaggaatgtccagcagacttgaaagaaggtatctgcagtttgatatttgcagctccaaggtgctctgaactccctgaacttggtcgcatacgtgacatttttgaaaagaagtatggcaaagattttgtttctgctgcagttgacttgcgcccagatgctgctgttaacaaccttctgattgagaagctgtcgattaagaagccttccgggcaaattaaactgaaagttctgaaggatatagcaaaagagcatcagattgattgggataccactgagagtgagcaggagcttctgaaacctcctgaagagttgattaaagggccaagtacatttgttgaagcttccaacatgcctgttaagactattctgacaccatataccgtgcagccagatccagttaacttcagctataggtgttcggatggcaaatatgatgacaggggcactatgcaattcaaagatgcagcttcagctgctcgagcagctgcagagtctgctgagagagcagcatctgctgcaaaggccgcagctgattttgccaataataacaaccatccatttgatgaagatgaagattgcaaagcttcaactcatgaattcactcatccccgcaagagacagtcgatgagcaactcgagtagatcctccatgaaagaagatgcaaatgcctttgatgaacaaaaacctcatgaagggaaaacatacagtacaagaaggttcagtggaaagaaccatgtagaatatgacaaagacggctaccctgcagatttggattctacgaagacacggagaaggaactgccgtgctgctcggaaggtgcactcagagataaagtttgatgattctgagggactgtgttcagattccgaaggtgaaaatgatgtggaaattcagtctgtggaaaggccattgcctcctaagagtgagctgttttcagaaaatcgtcactcagaagacgaagagcctgatcaagatttccctgaattgccgaagacaaaccttcattctcgtgttcatccaaatatgcctcttgactatgaaactctcactgcacgctttgaggctctcaaatctggcaagcttccgtagtgcaacaaaaagaacatcatcactggatgttacaattccttcctgctgtttctgtataatatgacatgttatagtagggtatagtatctaatgattttgattttggctgagcctacggatttgtcgtttcaaactattgctgcatttgaactgttcgggtatataaaggttggttgaaatgataatttgaactgtttctgcgatctgttcaagtctagcagtcttgttgagtctgaagcaacacctcatggactgaaagaacgaggcaaactcatcaccaattcatcataaaactttactatggc

SEQ ID NO: 2754 - DNA, 867 bp, Zea mays
  Clone ID: 700223264_FLI
cacacagaagcggcggcggcggagcaaacgcaggcgaaggcgagggtgtgagggaaggagcaccagccatggtgcacgtcaacttctaccgcaactatggtaagacgttcaagaaaccaaggcgtccttatgagaaggagcgtcttgatgctgaactgaagctggtcggtgagtatgggctgaggtgcaagcgtgagctttggagggtccagtatgcactgagcaggatccgtaatgctgcaaggcacttgctcacccttgacgagaagaacccccgtcgtatctttgagggtgaggcgcttcttcgccgcatgaaccgctatgggctgcttgctgagggtcagaacaagcttgattatgttcttgccctcaccgctgagaacttcctcgcaaggcggcttcaaacacttgtcttcaaggctggcatggccaagtccattcaccatgctcgtgtcttgatcaagcagcgtcacatcagggttggcaggcaaattgtcaacgtcccatcattcatggtgagggtggagtctgagaagcacattgacttttcactgtcaagcccattcggtggaggccccgcaggaagggtgaagagaaagaatcagaagaaggcaagcggtggcggcgatgctggcgatgaggatgaggagtgaggatggacaagtagcgttacccaatataataatattatctagttttcttgaacttgttcgaatgatgagtgcttagctgtgtgatctgacgcagagttccctgtgctgactctgtgtcatggatggtccattttatcttgtggtattatcagcctttacataactgctatgtttggatatgttcaattctgttgcaattttatgtggttgtttt

SEQ ID NO: 2755 - DNA, 357 bp, Zea mays
  Clone ID: 700223276_FLI
ggcgccatgtgtgaagaaatacaagaatgtttatgtggtgagcaccatctcagagttctcatcctcgctggagacagcgggtgggcactggcgggtggactgtcttctccgtgctaaaggaatgccatcctatttcgccgtgctggaccagggtgctcgaagtgtttcttcagatatggacctcggtggttttctccacattaggaaagctggaagagcctttttgaactcagatttttttgctaacagtggtgttatggtgaaacaaagttttgtttgtatgtaccaacagctaaaatgtaaacacgacattatcatagttgagtacaggaataattatctcttatatcttattgc

SEQ ID NO: 2756 - DNA, 1408 bp, Zea mays
  Clone ID: 700223285_FLI
gggtggcccgaacaacctttatccgattatccccccgcattatctctctcggtagttcccccgtccccctcgcgtgcgctctgtggcgacgactgctcggccgccgccgccctacgcgcaggcgcccaggtttccaccttcgccggcgacgagcgcccacaaggaaaacaatggagtggtgggctgctgatggtttgtactacttccggacctgaaaggagctttttacaatggcaccgggaagcagcattgtgactgtagtccccgagtcggactgtggagatgacgatgggctttctgaatcacttgggggtatcatgcttgacgtagactctgcaagtaaaccgtggtctacatcggcatcgctagccaatgttgcattgtcgtcgctgtgtggcttgaatgatttgctcgaatgcccagtgtgtaccaactcgatgcgcccacctatactccagtgcccaaatggccacacgatctgctctagttgcaagcacagggtagagaaccattgcccaacctgtcgccaggaactgggaaacatcaggtgcctagctctcgagaaggtggcagagcaactccagcttccgtgcaagtaccagagcacgggatgcaccgagatccacccatacaagagcaaactgaagcacgaggagctctgcaggttcaggccgtacagctgcccgtacgcaggttccgagtgcctgatcgcaggcgacgtcccgttcctggtgtcccatctcatcaacgaccataaggtggacttgcacgagggctgcacgttcaaccaccggtacgtgaagcccaacccgtacgaggtggagaatgccacgtggatgctcactgttttcaagtgtttcgggcagcacttctgcctgcacttcgaggcgttcgtgctggggatggcgccggtgtacatggcgttcctgcggttcatgggcgaggagagcgaggcgcaggggttcgggtacagcctggaggtgggcgggggcgggcggaagctgacgtggcagggcacgccgcggagcgtcagggacagccaccggaaggtgcgggacagcttcgacgggctcatcatccacaggaacatggcgctcttcttctcgggcggcggcaggcaggagctcaagctgcgggtcaccggccgcatctggagggagcaagggcaatgaaaagcacccccgcacacattccgttgactggtggttatggtggtacaccgctgtgttccattccatcccatcatccgggggcagccttctgctcagctcctcgccatgattcaagaccccattccgtgttcgtcctgtgcatttgctgtatgtacagatattttgcatacctagcctggaactagaccgtctgcagacatgattaacacgtggggaaagccccggcaaaacctgcc

SEQ ID NO: 2757 - DNA, 1101 bp, Zea mays
  Clone ID: 700223348_FLI
ggacggactgtgcctgcggaaaggagtaagggggaaaacatcataggtcctctttgcgcgacggccgccgcctcctctttgtagtttcattccgccgccgccgctccccgctctctcctctgcttgcggactgcgtggagcaccagcggcggccagcgggcaggaggagctccctccccaaacagagaggggtggggtatcagtgcgtgcgctcctggaggagggcgtggaagagcagagcaggcggcaagcaggggtttgggaggatggtttcgctctcgacttggttccgctatgccgcacacaagtttgattactgcatctccctctcgttgaagaaatataatgtgggccagatcagcagcacgcagctaactgatgtgatattcaaaaatttcttccatggcaagctcacctacgtgtgtcagaccaaaggggaagaagccatggctcccatcgtatctccaactggaggagccgtccttgtcagaaagctcgcaaatttgagccccacggaagtgtttgtcggggacgttgtcttgttaaaagacccagagaaatctggcaattttgttattcgacgactggctgccctggaaggctatgagatggtctctaatgatgagaaggatgagccgtttgtgctcgagaaagaccaatgctgggtcctggcagacaacctagtccttaagccaaaggaagctagagatagccgcttgtttggacctgtcccaatgactgacatccttggcagagtgatatactctttaagaaccgctgttgatcacggtctagtcgagaacagcggcatggccacgaaactggatggtccagtactggcagtggagcttgatgtggaagagttggcgaagaacaataaggcgtagacacttgatgttttcgacatgctgcgctataactcaccttaacaatggatgttttttttttgtttatgatctgctgctgcttcaagtagaagtgcattggaatgttttttcacggtttgcctgtggagcagtcaataatggtcttgacagataacccagaggccgctggaccgtgttcactcagaattctcagcaggatacatcgtgtgactgt

SEQ ID NO: 2758 - DNA, 2955 bp, Zea mays
  Clone ID: 700223363_FLI
gcgctagcgaaaaagcatccgcccacctcccctcgtctctctcgcgctccgccgccgcgcaaaactgtctggtgatgacgaacgccgccggtacggcccctcacccgactccgccgacgccgctccaacaacaacagcatcagccacccaaggaccagcagcagaaggcgctggccttgaacgcattccgcctgaaggggatcggcgaccgcatcaggttccacctgaagggcatgagcgtgcccccagtcgccgagttggcccacctcatctacgcgttcgccagagggattgacttcgcggtctcagctggtgatattcctctgacagccggtgacatacccgagattctgagaaaggtatatgagctgaggaaagaaacaattatacaatcttcgcttatgatactagcgatctcttgcaagaatgcttgctccaataaatggtttcaacctgcagattccagagacattcttagaatggtcaatgagctctctggcaacttctgcacgtccacaggccaggcagctagtgacagcactgtgcttgaaattatatcacaaataatgccaaggtattaccctcggttgaagtttgagcgcctaatcacttctattgaagcaaaggttggctatgatatattaatggctgacttctttattgagaggagcctatctcgagatgaaaagattagactaattgtcgtacaaaaggaaaatttagatgcctcatcatgtgtctcaagtccaccacatgtgagctttttggtcaatgggaagggtgtggacaagaggactaatgtttcaatggaacaaggaccccagttacctactgatatcaccaaaatgctcaaatatggggctaacattatccaaggtgttggatattttaatgctaattatatcatagctgtagcagttgtgaacgatttgacatccttcagtgctccaaaactggatgactatgcacaacctatcactgtttatcctgcagattctgatgtacttgagggaccatcaagagtttccctaaattgtcctataagttttaggcgcataaaaactcctatcaaaggccgtctttgcaaacactatcagtgttttgattatgataattacatggagatgaactcaagaaaaccaaactggcgctgtccatattgtaacacctcctcaagcttcactgacctacgtattgaccaaaagatgatgaagatactagaagagactggagatgatgtcactgatgtccttgtatttgctgatggatcttggaaagttgttccagctcaggatgaaaaatctgatagacatagaggtgacacaattcagcaggctggagatgctgtagaaactggttcaccttctcgagatgtcatagatctgataaatggcaatgatgatggtgatatgcaaatggattgggcatcggctccagaagattcaaagcctgtgttgaatagtcaagatttgtctgtatcagactatcttacagatttccctatgacagctcagacagaagatctgaatcgaggggatggaaataatgggggaagcaacatggcttccacttcacgtcaaaatttgttactacctcctactagtgggctgggctcaagttcattagggaccttggaatctattctacctcaaaatgttctgcaccctgttatcacagatgcagtctctccttctcttgaaacctcttcagcatctggcatgcaacatgtttcacaggaaacacattgtggaactgtacagctgcagccacaaataggtccagtacatgggtccgaagtgagaaggcttcctatacctagaaatcccaggagagagccaataggagtacaggggttgacggttccaccacagaatcctgggtcatcaacaaggttgcagccaaatattctcaattgtccacctcctatcccgctatctagtccatcctcttcaacttaccaagcacatcaagtgaagaatccagacagtgtcattgcttcaaggaacagtggtagtgggccattaccaaggactcctagcgtcgctgctgcatcattgcacctacagtcgacagcacgggatattcgcaacacatcgagccatctacccagtcgagttgttggtctgcctgcgccacacctcatgggtgcacgaccaccaccaggaatttcagtgcaggctggaggagcgaacgcctacagaactatgcaacagactccaactatggatccactgaggcacacacggatgagcatgaaccaaacagcactggctgctgccggccaaaccaccgctgccgcgtatgtccgaccaacccaagcagacatccaaaaccatctctttcctgtgcagcaaagccaggcaccacgatcgcaacaagtgccacgaacaacaaccccgcctctacagcgggcgccaccgcacctgcaacctcccagtgtaccaccgactgttccaagcacacctcaggctggaccttcgcatggtcttccaccggagctccctgtggatgatagctggcgccccacgggacagatgagagggagtctgacaggcaatgcttacagttctgcaattaggcactatcggggccattctgagcagcagcagggcgagcctcggcctcccaacacttcaggtgcgcgaaggcctcagtaactgccagacattgcggcgttgccctgattatcaagcagggcttgggcagctaatttaccaagagattttaatttattatcatagctaatttggcgctatgatgatctatgttagtgtaggtaggggagcctagtgagtagtgatagtgctctgcttgtctacaacgcactctgatgttaaattagtagtatcaggtgaaccatttgtgtacccaatatggaacgtggattttttatgctaatgttttgcctgtgtaattggaccgattttcatgtgaaattcctgaacgattcccatg

SEQ ID NO: 2759 - DNA, 1223 bp, Zea mays
  Clone ID: 700223407_FLI
cgtcattctctctctccttatcctgtcgtactcagatttttttttgtggccgtcggccttatcttcctgcgcgcgctccttccctgcaagctccatggccatcggcccttcctgctgagctcggttccatggacggcgttcctcttccttcctttgacgcgcgcatctccctcggcgccctcccagtcgcgcctgctccctctgcttcatcttccttgtggtgccttcttcagctcgcggcgctcggtccctgatccagctccccggcgtgcgcccatcttccctgctcgtcgttcctatttccactgccatggatcgtcagtccgagctttcccatccgagctctatacatgaccgagtttttttcccagtgcagcagctccgctccaagccgaacggagctcctccatgggcttcctcgagctccgacctgggcggcccttggatgctgcttccatcaacgccggccatcgttcctcaactccggcagtcgctgtggtctcagaagttagccccttttcagtatctatctctctccctgctcggacctccgcgttcccaactgtgcgcgctgtcgggtggccgtcagccatgccttccctgcttgctcgccagcacttgttcagtcgtctcggctcgctcagcctcaatctccagcgtcttgccctgctccttggttccggccgagctcgcgcccagctccatttcctcctctccggctgctccccatgaccaccaggccgaacttcttcctgctgtccgtgacgcgcgagcgatggacgcgatgaagaccctatgtgtgcttgtgtcgagctccacggcaccagtcatgcctctggtctttggtcgtcgtgctgtgcgccagaactgttcgtagctcgcctgtgtgcccagctgtctcgaaccatgtcgtcgactatcgtcaccacgagctcaccttctctggcgcacatctccgcagacccggtcttatcacgtgtatacgttatcgatctcgtccttgttccgtgcgttttcaggaaattccaaaagttgggtgaagacaaagctagcagcgtgatgttcaccaagtgctctacgcaaaggtcgaactagaatccttgccgtgttcgcggatagcgcgtcaaatttagtcgtcaaatttagtcgtgggtaagccaattcatatttctgttagcttaattattggattgatgaatgaatgcgtctagtattattgaatt

SEQ ID NO: 2760 - DNA, 975 bp, Zea mays
  Clone ID: 700223409_FLI
caaccatggccgcggggggcaccgccgacttcttctaccgcgagtcgcagcgtctgggctacgtcgcccgctctgcgtttaagctgatccagatgcagaagcagcacaagctcatcgcgccgggcgccgctgtgctcgacctcggctgcgcccccggcgcgtggcttcaggtggcttgtcagaacctgggtcccctcgagaagggtggcattgtcgtcggcgtcgatgttaagaaggtgaaagtgccctctgcgcactgtgactcacgggtcaggacggtctgtgcagatgtcatgacgctgatgaagcggcaggctcgggcaatgtcgccacaggaacgaggattctctgtgatactgtcagacatgtgccccccagtttcagggatcacgactaaagatggagctatatcttgtgagttgggcatgcgcgctctctcgttggcagtagggaagataaagttaaaagattctaattacagtgataccctagagaagtatctgagctccactgagcctgagtctgacgaggatggcgttcttcgacgtggaggcaacctggtagtgaagtttcttgagaatgaggacatatcagggtttggcaaattctgcaaggtgaagttcaagaaagtatcgttgttgagacccaaggcgactcgacctagctcgagggagatctacatgatctgcgaaggtttgcggtagaaaggagggctcttcagaaggcaagcgaagactccaagaagctaggtcagttgagttgccctgaactgggggctgttagttctagctgctggtgcaggtgctggctgattggcaatgtgatacagctgtttgatgctgatagcctcccagagcaagttaccacaaagctttgtgtgattgaaccatgttagtagttcgtctagatgttacctgtaataattttgttgaactgtgatactagttcgtctaggagaaacaagcatttgacttg

SEQ ID NO: 2761 - DNA, 590 bp, Zea mays
  Clone ID: 700223452_FLI
ggtcattggaagcctcaagggactgcaagagaggaagcgtgctactgctttctcaatcaggcctataaccgatttcaatgaggttacgctgcatttcattcagtgtgttcggatgcatatagagaacactgaattaaaggctggcagtcctgcacgaatcaattcttctatgggagtgtcattctcaaatggattcagtgaatcaagcacaccgacatctttgaaatccagtcccgcaccggtgaccagcgggtcatccgatactgatctgcacacgcaggtcctgaatttttttaatgaaccagcgaacctcgagagtgagcatggggtgcacgttgatgaagtactcaagcggttcaaacttttgccgaagaagcagatcacggatgctattgattacaatatggactcggggcgtctttactcaacaattgatgaattccactacaaggcaacttaaccgatttgaaggtcagcctgctggaaatggcagaggactaagtatcacttgtactaaaccaaagtctggaaatgtcatgttgtgtcatgaaatgcatggttggtttatggaaacatttatatcttgtatc

SEQ ID NO: 2762 - DNA, 1474 bp, Zea mays
  Clone ID: 700223475_FLI
cttggcttgtacgaaagagctaaataggtggttctcaaagcaatttgagaaggggccatttcgacttgttgctgaggaggggaaatccaaatgttcctgggttagtcttgatgacatcactaattgcttgataagaggagattctgaaaaatcgcatcatcaccaacgtgtcgctgagttgcaacgacttcggtccatatttgcaacaagtgaaagacaatggattgaagcgcaggttgagaatgctaaacagcaggctatactctctatattgaaagcacaagtgtcatccgacgaggctcatatacatagggatatccattctcttaggagaaaaggttctgagcttgctggagagctctcgacactttctcaaaaggtgcaagctttggtatctgagacaataccatgcctgtgttcagaacttgctcaacttcaaggcacatatatcttgcaaggggattatgatttaaaggtcatgcgccaggagtactacattaacaggcaaaaaaacgttcatcaatcacttggttaatcagcttgccagacaccagtttctgaagattgcttgccaacttgaaaggaagaatatagctagtgcgtactcattgcttagagtaatagaatctgagttacaaagctacctctcagcagtcaatacccgcttgggtcattataattcattgattcaagctgcatctgaagtacgagaacaaggagctattgatgatcgtgacactttcctccatgcagtgcgagatctcctatgtattcactcaaatgtccaagcaacagtgccaacatacatgtcagcacatgcattggttcagcagatatcagcacttcaatctgacttgctttctcttcagtctgagctggagaacacccttccagctgaccggaaaagatgtatcaatgaattatgtactctgattcaaacagtggaacagcttctatttgcgtcgtcaactactgcagaaccaatattgacgccttggccattgatgcgggcacttgatgatatggaaaatgccaacgctcaagtcgaagtttctgtggaagaagtaaccaaggctcgcacccagaagataaagatctttgaaaatcgtgcccatgaggtggggagggagaggcaaatattcgttgatttcttctgcaaccctgaacgcctcaagaatcaagtcagagagctgacctcccgtgtgaaagctctccaggactaacctgtttctgtaggctggtctcacaggtcgtgatgctttttttttctatgtaaagtttgacttcactccagcgtcaggttggggctgctgtgcagggacggtatggaacaatatacccatcatgtagctcgggggggttcaggctgtaggtccttgtgccacccggaataggatggcattgttgtgatattatttgtagcgatatgtatgttgtaaagtatctcagaaatcacgagccctttctttcgtgt

SEQ ID NO: 2763 - DNA, 1321 bp, Zea mays
  Clone ID: 700223476_FLI
gcagctatttggtgttctcctcagtaatgccacctgggaccggccaccatgtgttcctgccttggttcgcttgctgcgagcattccttaggaaaattccaaatgagctaaaccaagagggcaggcttccaaatatcttggcaatatcccgtagtctcctctcacgcagcagcactgaagattctgctttctacatgctgaacacaatagtggaaaacgttggttttgacatactgaacccatatataagtgagatatggagtgctttgtttactcggttacagactagacaggcagtgaaatatgtgaactctcttgtggttttcatgtcgctagtgctggtcaaatatggatcaagtgttcttgtcagttccgttgattcaattcagccaaatcttttcacccaaatccttcagcgattttggattcccaacctcaaattgatcaaaggtgctcttgaagttaagttgacagcagttgcttcgacaaagctgctttgtgagtctgcggtgctgttggatgctgctgcagctcagttatggggtaaattacttgatagtattgtcacactgttgtccagaacgaatcaagatggaacacaagagcaaaatgatggtactgatgcagtggatattcagaagacatcaagttattctgtctcatttgtacggcttcaatatgctggaaagagtgaagatgaccttttgaaagaagtaaatgatccaaaacagtttgtggtcacatccttggccacactttctgcccagtttcctgggaggtttggacttgtcattgagcagcatgtggacccagcgaacaaaagtgtgcttcttcaactttgtgcagcctacagtgccaacattgtctaggagccaattgcattgggaaggcatttgcttgttgtcaaatgggtctggtcgaaagatgagtctcttggagttgtctgtctgtcaagattttctggtgtcatccttatttatttagtggcaggatgttggttgtgccgtgggaccgttggatgccgaaacatgtagggttggtttggtggccagagatcacgagggatcaatgagagagtaatccattgctattcaaattgaatagcaaggggattcttccccatggatccctttgtgatcttggtcatcaaatcagcccataaggaaaacaacattagctttgtggaggattcgtctgtttggtttggctgaggattttgtttcaaggctgaagttccttttttggggcagtctaatggtgtactgtcctgattatgtatctgaaggtcctgaatcaatggttcggaaaacaacattagcttc

SEQ ID NO: 2764 - DNA, 1599 bp, Zea mays
  Clone ID: 700223490_FLI
gcgagaccacataccaggccaccaccatctctagaaccttcctcctcgcctccgtctttccctcccccagctcaggcaggaccgcaggagccagacccaaacccacgaaaccctcctgcctcgccgccgcttcctcatcctcccgccgcttagtcccggacccggaccaaccttcgtgaggacgggaattggactaagggggtaggatgccgccaaagaaagcggcgccatcgaaggcggagctggccaagaagcagaaggtcgtggaggacaagaccttcgggctgaagaacaagaataagagcaagaacgtccaaaagtacgtccagtccctgcaccaggccgtccagcccaagcctgactcgaccaagaccgccgccaagaagaagaagtaggaggagaaggcgcgcgagaaggagcttaatgatctgttcaaggttgccgtcagccagcccaaggtccctgttggtgttgatcccaagtcaatattgtgtgagttcttcaaggctggccagtgccagaagggttttaagtgcaaattctctcatgacctgaatgtccagaggaagggtgaaaagattgatatctatacagacaagcgtgatgcagaaaccatggaggactgggatcaggaaactcttgagaaggttgttgaatccaaaaagatggagtatcagcaaaacaaacctaccgatattgtctgcaagtactttcttgatgctgtggagaagaaacagtatggatggttctgggtttgcccaaatggcggcaaagagtgccattacaggcatgcccttccgcctggatacgtactgaaatcacaaatgaaggccttactagaggaagagagtgagaagatagctattgaagatgagattgaagatcagcgtaaaaagacaaagactacaacccctatgacaacggaattgttcatggaatggaagaggaggaaggcagaagaaagagaagctggtcaggctgccttgaaagcagagagggctaagaatgatcgcatgagtggccgtgagttgttcatggctgacgcaagtgtgtttgttgatgatgctgaagcatatgaagtatatgagagagaggagtctgaggccaatgaagaatcgaccaataaaagtcagaatccaggtccaagttcatcaacatctaatggcaaggaggttgaggagcctgacgacgatgatatcgatgttgacgatgacttagacattgatgaattgaatgaacttgaagcaagcctgtcgagaacttccatccaaattcgagagcctggcgagggaacatcatcttgagcagtactacaatggaagattgttgcgaagttgctctccatttttgcgcttccatccgatctagtcgcttttgcaaacaaagaaccgtggagcacagatgcaagtggaatagatctcttagccttgttcactagctatcttgagggagcaacgatcaacaaatgacgaccagtattatgatcacacatgacaattgatgtttgctgtgtgccttattttttttatcttgtgccctttgtgggaaatatgttgctacttgtgaataacaggactaaacagtttgttagctttccgc

SEQ ID NO: 2765 - DNA, 3569 bp, Zea mays
  Clone ID: 700223564_FLI
tcccaaaacctgatcccagctccgccgccgagcaaaaccctaggggcttcctaacgccgccgccgcgatggacgacagcctctacgacgagttcggaaactacataggcccagagctcgccgactccgacgctgatgatgactccgacgccgccggcgcctcaccgtcctccaccgcgtcccgctcgccgtcccccgcggcgcgctcgccgtcgggctccccctcccgccctgcggcgctcatggacgtcgacgaagacgagggcgacccgtcccagcaggccgtggtgctcgccgaggacaagaagtactatcccaccgccgaggaggtgtacgggcctggcgtggaggcgctcgtcatggacgaggacgagcagccgctcgagatgcccatcatcgcgccaccacgcgtcgtgaagttcgaggtcgggacccgcgccgcggccacgtctacctacgcgtccaccgacttcctcctcggtctcgcgggcaaccccgcgctcgtccgcaacgtcactctcgtcggccacctccagcacgggaagacggtgttcatggacatgctcgtagagcagacacacgaagtggacaccttcgactccgagggggagcgtcatgtgcggtttactgacacaagggtggacgagcaggagaggcaggtctccatcaaggctgtgccaatgtcgcttgttctcgaggggggaaacggtaagtcatacctgtgcaatatcatggacacgcccgggcatgtcaacttctctgatgagatgactgcggcacttcgacttgcggatggggctgtgctcattgttgatgctgccgagggagtaatggttaatactgagagggcaattcgtcatgcaatccaagaaaggcttcccatagttgttgtgattaacaaggttgacagattgataacagaactaaagctgcccccaaatgatgcatatttcaagctgcggcatactctagaggcaattaacgatcttatctcatcgtgttctactacagtaggtggcactcagctggtggatcctattgctggaaacgtatgttttgcaagtggtgctgctggctggtcttttaccttacagtcttttgcgcatctttacttaaagattcatggggttcaatttgaccatgagaaatttgcatctcgcctatggggagacctgtattttcaccctgattctagaacctttaaaaagaagccgccaaaggaaggagctaacagatcatttgttgagtttatccttgagcctctgtacaaaatttatagtctggttgttggtgagcaaaaggggaatgtggaatcaaagcttgctgaattgggtgtcacactgagcaatgcagcttataagctaaatgttagacctttgctgcggttagcttgccgctcaatttttggcactggtactggttttactgatatgttagtgaaacatatcccctcggtgaaggatgctgctgcaaggaagatagaccacatatacactggaccacaagattcctctattgtagatgccatgaaaaaatgtgatcccaatggaccccttatggttaacgtaacaaaactatatccaaagtctgattgcagtgtctttgatgtcttcggacgagtttatagtggcacaatacagactggacagaccgtgagggtccttggagaaggctattctccagatgatgaagaggatatgactgtcaaagaggtgaccaaattgtgggtttatcaggcacgataccgtgttgcaattagtaaagcccctgctggctcttgggttcttattgaaggtgtagatgcatcaataatgaaaactgctactatatgtcctatgaatattgatgaagacgtgtatatatttagacctctacgtttcaacaccttgtccgttgtgaaaatagcagctgagcctctcaacccaagtgagcttcctaaaatggttgaaggtcttcgtaaaattagcaagagctatcctcttgctattactaaggttgaggagtctggagagcacactattctggggactggtgaactatatctggattccataatgaaggacctgagagagctttattcagaggtcgaagtgaaggtagcagatcctgttgttacattttgtgaaacagttgttgatacttcttctatgaaatgttttgctgaaacacctaacaagaggaacaaaattactatgcttgctgaaccattagagaagggcttagcagaagatattgagaatggtcttgttagccttgattcaagacagaaagaaattactgacttctttcgccaacgctaccagtgggatgtgcttgcagcaaggtcaatatgggcttttggacctgacaagcagggtcctaacattcttttggatgacacactttcaattgaggttgacaagaacttgctcaatgcagtgaaagattcaattgttcaagggttccagtggggtgctagagaaggtcctttgtgtgatgaaccaattaggaatgtaaaattcaagatcttaaatgcaaacatagctccagaaccattgcaccgtggtggtggtcagataattcccacagcacgtcgtgttgtctactctgcattccttatggctactcctcgccttatggaacctgtgtattatgttgagatccaaacaccaattgattgtgtctctgcaatttatacggtgctatcccggcggcgtggtcatgtaacagctgatgtacccaagccaggcactccaatatacattgttaaggcatttttacctgttatagagtcttttggatttgagacagatctcagataccatacacagggacaagccttttgtctgtcagtattcgatcactgggctatagttcctggtgatcccttagataagagtattgtccttcgccctctggagccagcacctatgcagcaccttgcccgtgagttcatggtaaagaccaggcgaaggaaggtaagggatatagttgatttatggcaaccatatattcgtaacttttatcgtagttgatttataagcaaccatataatttgctcccgtaacttttatcatacagtaaaaatccttgtcagtgttatactagccataatgctaactgtatgcaccatcacacttgcagggcatgagtgaagatgtgagcatcaataaattcttcgacgaggccatgatgaatgagctggcccaacaggctgctgatatccacttgcaaatgatgtagtcaaaaagcgagatgaagtgcacacgtggaagatgcaaatgccctcagcttcttcataccatacatgctgcagatgggactgccggagttccagtcgcacctctatgctggcatttgcccctacctgtttcgttttgattaacacattatgattgctgggtatcatgtagcgaatgtttaaagtgggtaccgtatgcaaatcatgtatgtactgtactagtttttacaccatctgaccaatcagcacccttgaggacagagactatttttaaatgtctttattgaactctgagcggcaatggcatcttcgccggtgtagatttgtagtaagattttacttatttgatc

SEQ ID NO: 2766 - DNA, 1434 bp, Zea mays
  Clone ID: 700223602_FLI
gcgagggcccagctcacggacctgtcctgtgtcctccgcagcacagcacgaccccatcggcgtcaccccggcgacttctgcgtcctctgccctccacgctcccccgctctgccaggcttcccagaagatttggttgatttccccccaatccagtgattccatccctgttctccacttccaccggaacctcccagagacttccagaaggctctagcgacccccgccgctttagagctacccgcggcgagattcaggagctgcctgccatggtgaaggacagcgcctactacgatgtcctggggctcagcgtcgacgcgtcccccgccgagatcaagaaggcgtattacattaaggcgaagctggtgcatccggacaagaatcccgggaaccctgacgcggcactcaagttccaggaacttggagaggcttatcaagtcctaagtgatcctgggaaaaaggaggcgtatgataattatggaaaggagggtattccccaggataacatggtggatcctgctgctgtctttgggatgctttttggaagtgactattttgaagattacgttggccagcttgctctagcatctatagcttcagtggaggttgaggaaaactcaaatagtcaagaggcaagagcaaaagttcaagaaaagataaaagaattacaaagagaaagagaacaaaagcttactcagagtctgaaggaccgacttcaatcatatgtagatgggagaaatgatgaatttgtgagctatgcaagcgcagaagctaggcgtttatccgaagcagcatttggcgaggctatgcttcacaccattggttatatttatgtccggcaagcagcaagagaactcgggaaaagtagaatttacatgggtgtaccttttatagctgaatgggttagagacaaaggacaccacattaaatcacaggttaatgctgcttcaggtgctatttctctaatacaacttcaagaagggatgaaaaagatggaggggagtgaggacagcgaggagcaacttatgaagagttttgaggagaaaaaagatgccatgctcagctcgctttggaaaatcaatgtggttgatatcgagtccacgctctcacgtgtctgccaagcagttctgagagatagcatggtctccaaagatgtcctgaagctgcgagccaaagcgttgaaaaagctcggaacgatattccaaggcgcagagtctatgtaccgtcgtgaaaacagcctgcgcgttgaaacgagcacagaccaacaagccgcttcgtcacactgaagccacctgtggaccaccgtgtaggaatggatttggtgttttgtgtgtgtgtgtggctttcttctttgtttgtaattgtgtatgctatattaattttcttgtagaagatgtgaaacatttaacacaaagattttaactgctattgatgcag

SEQ ID NO: 2767 - DNA, 695 bp, Zea mays
  Clone ID: 700223677_FLI
ccaaccctaaaaccgcttccgcaaccacgtataaaaacaccgcacgcgccgccgccgccgtcctattcctcggagaggagaagccgccgtcgcagcaatcacagcagcccggagaacggccaggtccgacaagatgcagatcttcgtgaagacgctgacagggaagaccatcaccctcgaggtcgagagcagcgacaccatcgacaatgtcaaggccaagatccaggacaaggaagggatcccgccggaccagcagcggctgatctttgccgggaagcagctggaggatggccgcacccttgcggactataacatccaaaaggagtctacgctccacctcgtgctcaggctccgcggtggcatcattgagccctcgctgcaggcgctcgctcgcaagtacaaccaggacaagatgatctgccgcaaatgctatgcacggctgcaccctagggctgtcaactgccgcaagaagaagtgtggtcacagcaaccagctgagggccaagaagaagatcaagaactgaggtgttgctgctagtcagtttcatggacaatgttgtgctgtatttttgtttggttgttgaaccgtgtttgtttaccgaacatattggccttatgttatgttttaccatgttgtcgatgacacaatactatatgacgatagcaactatgctattgtagttttggtcattgttc

SEQ ID NO: 2768 - DNA, 1870 bp, Zea mays
  Clone ID: 700223691_FLI
atgaaggaaaattctctcaaggaggaagatgaagaggagtaccaagagaaaatagaacagcagttagcaatgcaggaggaagacgaccctgaaaaaatcaaagaggaagcaaggaggaggaaagaagctatcatggcaaagtacaggcagcagcaatcgcagaaagaggatatggaatctaaaccaagtggcaatgatgaagaagtaagagcaatggatggaaacgaagctatacatcagaaagatgatatcgatagcagctttatgggcaatgtcgaagctgaaaataagcatgattcttcagaggtatttgatggcaagacaggctttaatgtgggaaggtctcctgctcacaattatgcttcaactagcacgggagcattcactgatgagaggacaataggtgtttcaggtcttggagagggttctcccaagagtgagagatcagcagacatgttttgtgatgacattttcggagaatcacccaccggaattagaaaattgggaaaggatgatggtttgcatattgagagaaatgctcttcatgacaactgggatgatgcagatgggtactacacttatcggttcggagaattgctggatggccgttatgaaatcatagcagcacatgggaagggtgtgttctcaacagttgtgcgggcaaaagatcttaaagcgagtaaggatgatcctgaagaagttgccatcaaaattattcgcaacaatgagacaatgtacaaggctggtaagcaagaggtttcaatattggaaaaacttgcaagtgcggaccgtgaggacaaacgccactgcgtgcggtttatttctagtttcatgtaccggaaccatctttgcttagtttttgaatctctcaatatgaatcttcgtgaggttttaaagaaatttggtcgtaatattgggcttaaactgactgcggtgagggcatattcaaagcagcttttcatcgccctgaagcacctgaagaactgcaaagttttgcactgtgatataaaaccagataatatgctggtgaatgaggctaagaatgtgctcaaggtatgtgattttggcaacgctatgcttgctggtatgaatgaagttacgccttatcttgtcagccgtttctatcgggcacctgagatcgttcttgggttagcctatgatcaccctttagacatgtggtcagttggttgctgtctatatgagctttataccgggaaagtcttatttcctggtccatcaaacaatgccatgcttcggcttcatatggaattgaagggtccattccctaagaagatgcttcgaaagggtgcctttactatgcaacacttcgatcaagatctcaattttcatgctaccgaggaggatcctgtgacaaaaacggctgtgagaaggttaattttgaacattaaaccaaaggatgttggttctttgtttccgaactttcctggcgaggatccaaaaatgctatccagttttaaggatcttcttgataaaatatttacattagatccagaaaagaggataactgtatcgcaagcacttagccatccatttatcactggcaagtgacacaagatgacgattcctcttgaccttgaacttagcatcttcactgtaaaatacattttgggttcctcttgtctaatcatcaacgtttctgtcttgtgtcctgggagctctgagaaaaagtacatggatgaagcacggaacttcggaagagatggctatctgcagaccttgttgcatgcacttatcatttggatatattctgttgcttgtaagacaactagccagttggcattccattccctgtgtacaatctttcctatggatttacaagatatacatgaaagtctgcttcatttcactt

SEQ ID NO: 2769 - DNA, 718 bp, Zea mays
  Clone ID: 700224410_FLI
aaaatcaactcctccccaaatccacgctgccaccaactcgccgtcctccgcgccaagcaccaaagctccgatggcccgcactaaacagacggcgcgcaagtcgacgggcggcaaggcgccccgcaagcagctggcgaccaaggcggcgcgcaagtctgcgccggccaccggcggcgtgaagaagccccaccgcttccgccccggcaccgtcgcgctccgggagatccgcaagtaccagaagagcacggagctgctcatccgcaagttgcccttccagcgcctcgtccgtgagatcgcgcaggacttcaagaccgatctccgcttccagtcctccgccgtcgccgcgctgcaggaggccgccgaggcctaccttgtggggctctttgaggacactaacctctgtgccatccacgccaagcgcgtcaccatcatgcccaaggacatccagctcgcgcgccgtatcaggggcgagagggcctgagcgaggctggctcctctcaccgcaggcggcgtcgttgttgcttcgggcctgcttgtaggacttgtgcttctcttggtttcctttctggtggcagtggcatcttggtaccattgtgcttgttcttagaatcttagggatagagagttgttcagttgctgggtaacctgattgtttatcttgcattcctgcctctgtaatggttgtctgctgtcttaatggaaatgatatttgcttttt

SEQ ID NO: 2770 - DNA, 987 bp, Zea mays
  Clone ID: 700224522_FLI
cctccatcgagcagaaggaggaaggccgcgggaacgaggcgcacgccgcatccatccgcgcctaccgctccaagatcgaggccgagctcgcccgcatctgcgacggcatcctcgcgctcctcgactcccacctcgtcccatccgccggcggcgccgagtccaaggtcttctacctcaagatgaagggtgactaccacaggtaccttgctgagttcaagtcaggtgcagagaggaaggatgctgcggagagcaccatgaatgcctacaaagctgctcaggatattgctcttgctgatctggctccaacccaccccatcaggctcgggcttgctctcaacttctcagtgttctactacgagatcctcaactcccctgaccgtgcttgcaaccttgcaaagcaggcctttgatgaggcaatctccgagctagacagcctgggagaggagtcctacaaggacagcactctgatcatgcagctcctgcgtgacaacttgaccttatggacttccgacaccaacgaggacggcggggatgagatcaaggaagcagctgctgcccccaaagaatccgcccccgagggccagtaagacggatccgatctcccgacctgatgcgtgtctgctgatgtcggggagtttaccaggactgtgccgttcttgatttctgatagcttatcttctagtacacctcgtgttgttctcttcgtcacggcgccggtgcgcgtgcgctgaagctgcctgccattgccattgcctttgccgctgtttttaattaagcacacactctagatgttatgcccgcatgctatgtttcgattctcaagttgataaatgatggctggatgctggttttcgtgctccaagcctgctgcttcttccagggaaaaaaagacctgcccttgttgcagcgttgttgtttagaatgacctatatttgactggtattctgttacggtggctttgcaaagctgtttgtttggtttaatgtc

SEQ ID NO: 2771 - DNA, 512 bp, Zea mays
  Clone ID: 700224537_FLI
agggtctgggaaagggcggcgcgaagcgccaccggaaggtgctccgcgacaacatccagggcatcaccaagccggcgatccggaggctggctaggaggggtggcgtgaagcgcatctcggggctcatctacgaggagacccgcggcgtgctcaagatctttctcgagaacgtcatccgcgacgccgtcacctacaccgagcacgcgcgccgcaagaccgtgaccgccatggacgtcgtctacgcgctcaagcgccagggccgcaccctctacggcttcggaggctaggctagacgcctcttcatagtcggggactggttaggggacatgtctctgtgtgatgctttctgtggtagtattgctgcaatagctgtgtaatccatcgcttctgcaatgaagcgctttgagacatgctacgtatgttgtgtctgtgggtgattgtatttctggtagtaaccgtgattcttcctgaattttggataatacaagctcattcgcagtagtttctgatgt

SEQ ID NO: 2772 - DNA, 679 bp, Zea mays
  Clone ID: 700224560_FLI
gcaaaccaactctttcccaaatccaccgccggctcggctcgcccatcttcgcgccaagcaccgaatctccgatggcccgcacgaagcagacggcgcgcaagtcgacgggcggcaaggcgccccgcaagcagctggccaccaaggcggcgcgcaagtcggcgccggcaaccggtggcgtgaagaagcctcaccgcttccgccccggcaccgtcgcgctccgggagattcgcaagtaccagaagagcacggagctgctcatccgcaagctgcccttccagcgcctcgtccgtgagatcgcgcaggatttcaagaccgacctccgcttccagtcctccgctgtcccgcgctgcaggaggccgccgaggcctacctcgtggggctcttcgaggacaccaacctctgcgccatccacgccaagcgcgtcaccatcatgcccaaggacatccagctcgcgcgccgcatcaggggcgagagggcttgatctcccgttgtcgtcgtccacgttgttgggcctttcctctgtgtctctgcttgtagaatccttgcttctgttcggttccttctgttcgcatgatggtgttcgtagtgttaggagttgcattttctaatctgcttgttcttgcaccggtgcctctgaagtggcgtttccctctatcttaatggaaatggaatgtgcttt

SEQ ID NO: 2773 - DNA, 1125 bp, Zea mays
  Clone ID: 700224572_FLI
ttaaaagaatatattatgaagagaaaaggagaaaataagagtgaagttggtgcttctgaacgtctcattgctggtggtttagcaggtgcagtggctcaaacagcaatttatcctatagagttagtaaagactcgtctacagacttattcaggtgaggttggttatgttcctagaattggtcagctctcaagggatattttggtgcatgaaggtcctcgagctttttatagaggtcttgttccatctttgcttggtatcgtaccttatgctggaattgatcttgctgtatatgagactttgaaagatgtgtcgaagacatatatactgaaggacagtgatcctggtcctctagtacagcttggttgtgggacggtctctggagccctaggggcaacatgtgtttaccctttacaggttatcagaacaagactgcaagctcaacaagccaattcagaatctgcctatagaggaatgtctgatgtcttctggagaaccctacatcatgagggtgtttctggattctacaagggaattctaccaaatctccttaaagtggtgcctgctgcaagtattacctatctagtttacgaggcgatgaagaaaaatttgtctcttgattaaattgtggagttgttggggggaaaaacagccatcattattggcatggctgactgtagagataatgacgacacatgaattttactggttgaatagttcctttttgaagataaagatggtgccttcaatatagaactagaagcaacggtggcatttttctcctaattttgattcagcagaaatgaagtgataattatgagatcatcgagacatccatgcctggcatactgcttacgacaccatcgacaccgagttaactgttcatgaatttccgaaggcttgttttatcccccgtctggggcgagttttgttagtctgtaacactctgggaaactctcctaacttaattgcaatcccttgtgctcctcaacttgactggagctgtgacatttgctgacagccaaaaaaaaacggcaaaaagggtgctggtgatacctgtacgtattttccacggcgacttggcataaatcaatgcctagtgaatgtaataatccgcccgttcccgtt

SEQ ID NO: 2774 - DNA, 1570 bp, Zea mays
  Clone ID: 700236938_FLI
gtgggcgtcctccagtcctcctcctcctcctcctccattccggccctctcgcccgtccgtctcctgcccccgtccctggtcggaccacgagagccccggactgcgttcacctctgccttttgttcacccctgcacgcgttctctggcgctcttgtctcgtgcgtgcgacaacaactgggcgaccgccgccgccgccgccgccgccctacgccaggtgcgcaggtcttcgtcggatccttcgccagcgaggcgacgagcacctaccaggtgatgcccccggcttaattgaatgggctctcttctcaccaggactggcgtcctgccatggctccaggccaagatcgttgatcccgtgctgcaggtcatcagaaggggagcagaacccaagcaactggccttctctgctgccctcggtgtcacgattgggatctttccgatatgtgggaccactgttattctcggtgctgttgctgtagcaatgttgggaagtcgttgcaatgctgttactcttatggttctaaatttggccgccactccaattgaactaagcttgatcgtccctttcttgcgtttgggtgaagctgtcaccggcagcgggcacttcctcttgacggccgacgcactgaagaatgttctcactggtcatgcctcaaaggatgtgctgatgagcatcgtccatgcgatgctgggttggcttattgctgcaccaatcgtactggtcgtgctgtacgccgtttcgttcccatgtttcaagatcctggtcaacaggtttggtggtattccttcgagccccaggaccccaatcaaggcggtgtagccagtgcctggccagatcctctgcaggtacgtccatggacatagctgcagatgggtcgctgacatccggggccggccatggcgtggccccaaacgtcagcgaccggacgtaattgcagaggaaacggtttcagccagtgaggcatgctgaatgcccctggaattgtgtgcaccaagttctttgtgatgccgtcggattgagatgggttccggcatcatgttgctcggccatcccaggcactggcgaataaatatgatgacttgagaggcatgtgtcctctgtgattgtgtatgctggtttcacaaccatatatagcgagatgcgtatttatgaatttatgaagtcttgataaataaagctaggaagcacaggggtcacggaccattgtgccattcttcccgatgtaggcgtgggttgtgttcagctaaattttctgtgggcgttgtacatgcttgcaggaattcagtgccagctgtttgaaatttgaatcataggttcagtggcaaggcaacttggtgcttaagaatcctactaaaatgcactcactacgtttcaattataagatttttctagatgtatgccaatatatcggtgatattagatgttttcatcttattcccatcgaggaatgttgtctttacaaccatccgatgtaactctaagttgtaatgagcagtaagcgtcatattattctagaggaattttttgttgaaacaggtgaggaagtttttattataaccaattccttctctg

SEQ ID NO: 2775 - DNA, 784 bp, Zea mays
  Clone ID: 700236980_FLI
gcagacggcaggactcgcttcaagctcctcatctcgcgcagggggggtcgcctgaggtatcggtcaatcagtaatcaccccaaatcctagggttctagtcgcttctcgtcgtttcgttcgtagatcacagcgacaatggtgaaggcagttgctgtcctcgccggcactgatgtcaagggcaccatcttcttttcacaggagggggatggtccgaccaccgtgactggaagtatctctggcctcaagccagggctccatgggttccatgtgcacgcgcttggcgacaccaccaacggctgcatgtcgactgggccacacttcaatcctgttggcaaggagcatggcgcaccggaagatgaggaccgccatgccggtgatcttgggaatgtgacagcgggagaagatggtgttgttaatgtcaatattactgacagccagatacctcttgctggaccccactcgatcattggccgagctgttgttgtccatgctgatccggatgaccttggcaaaggtggacatgagcttagcaagagcaccggaaatgctggcggacgtgttgcctgtggtatcattgggctccaaggctaaagcggttaacctccgaggcaaacaccatagaaggtcgaagcgagcacctcaggaagttgctgttccatttcccctgtattggcaacacaatttgagtactccaaataagcgcctgatccatgatcagagagcactattcatgtcattttgtatatgaacaatgttgcgcacctgcttaagtgtctgttccaac

SEQ ID NO: 2776 - DNA, 1330 bp, Zea mays
  Clone ID: 700236990_FLI
cggacggtggtgctgacgcgtgggcaccacccatcactgcagtactgcaaatgaagtgcaaaatggccagcagtagtagagtagtagcagccgccgccgtccttgtagccttttgcgccgccgccctctcgtcggccacggtgaccgtgaacgagcccatcgtcaacggcctctcctggagcttctacgacgcgtcctgcccgtccgtcgagggcatcgtgcgctggcacgtcgccgacgccctccgccgcgacatcggcatcgccgccggcctcatccgcatcttcttccacgactgcttcccgcagggctgcgacgcgtccgtcctcctgtctggttccaacagcgagcagaagcagggacccaaccagacgctccgtcccgaggcgctcaagctcatcgacgacatccgcgccgccgtccacgccgcctgcggccccaaggtgtcctgcgccgacatcaccacgctcgccacccgggacgccgtcgtcgcgtccgggggtcccttcttcgaggtgcctctcggccgccgcgacgggctatcgccggcgtccagcgaccaggtcttcacgctgccgggccccgacttcgacgtgcccacgctgctcgccgcgttcaagaaccggagcctggacacggcggacctcgtggcgctctccggggcgcacaccgtgggtcgtggccactgctcctccttcaccagccgcctcccgcccaacgccgacgacggcaccatggacccggcgttccgccggacgctcgcggccaagtgcgccaaggacgccagcgcggcgcaggtgctggacgtgcgcacccccaacgccttcgacaacaagtactacttcgacctcatcgccaagcaggggctcttcaagtcggaccagggcctcatcaacgaccagaccaccaaacgcgccgccacgcgcttcgcgctcaaccaggccgccttcttcgaccagttcgccaggtccatggtcaagatgagccagatggacgtgctcacgggcaacgccggagaggtccgcctcaactgcgcagtgcgcaacgccgcccgcgtcgtctcagcagaccagctcgagaccgccgccggcgacgaggggctcgcggccgacgcgtgattagaattttgttttacaataaatgggtggcgagcgcgagttgcgagtagaacgagagccaagagctgactgttgtggtgtgtggctcatggaagcctgtcttttgctgttgcttctccagttctccttgtcctatctgtacggcgcgtgcactactctctccttatattttttttcttcatttctcgtgaaaaaggcacttcatttaccac

SEQ ID NO: 2777 - DNA, 1159 bp, Zea mays
  Clone ID: 700237247_FLI
ccgacgcgcaagccagtgccgcacccagaccagatctccgcgacatatcagtcgttcgtccagctaactgcactgcactgcactgcacgcaatggccaccacggcgaccgaggcggccaaggctgcaccggcgcaggagcagcaggccaacggcaacggcaacggcgagcagaagacgcgccactccgaggtcggccacaagagcctgctcaagagcgacgacctgtaccagtacatcctggacacgagcgtgtacccgcgggagccggagagcatgaaggagctgcgcgagatcaccgccaagcacccatggaacctgatgaccacctccgccgacgagggccagttcctcaacatgctcatcaagctcatcggcgccaagaagaccatggagatcggcgtctacaccggctactcgctcctcgccaccgcgctcgcactcccggaggacggcacgatcttggccatggacatcaaccgcgagaactacgagctaggccttccctgcatcaacaaggccggcgtgggccacaagatcgacttccgcgagggccccgcgctccccgtcctggacgacctcgtggcggacaaggagcagcacgggtcgttcgacttcgccttcgtggacgccgacaaggacaactacctcagctaccacgagcggctcctgaagctggtgaggcccggcggcctcatcggctacgacaacacgctgtggaacggctccgtcgtgctccccgacgacgcgcccatgcgcaagtacatccgcttctaccgcgacttcgtcctcgccctcaacagcgcgctcgccgccgacgaccgcgtcgagatctgccagctccccgtcggcgacggcgtcacgctctgccgccgcgtcaagtgaaaaaaagaagaagaagaaaaaaaaacataataccctgcgttcctgctgccccggctgtctggcccccactactgccaccgacggcggcgccgaacccccgttccaatcatcatatcgtagacgacgcgcagcattaaactatcaatcaccggatctggctctttcttggccctgtactgtactattaatgttccgttcttgtttttttattcggaattgtcgccgtttcagtatacgtaaatctcgaggtcgataatacagtaatactaccaattt

SEQ ID NO: 2778 - DNA, 867 bp, Zea mays
  Clone ID: 700237248_FLI
cgcaacttgactgctctgtccggctgcgcctacaaatccagcacaggcgcgcatcccgctcctccacctcgtcgcagcccccaaggccccaactacccccagtctcggaagagaactatccagaagcgcaagactccaaagccgtcgccttcctatccatcccttcctcgccgcgggggtcgcctgagatcacataaacaatggtgaaggctgttgctgtgcttggtagcagcgatggtgtcaagggcaccatcttcttcacccaagagggagatggccctaccactgtcaccggaagtgtctctggcctcaagcctggcctccatgggttccatgtgcatgcacttggtgacaccaccaatggctgcatgtcaactggaccacactacaatcctgcgagcaaggaacatggagcaccagaagatgagaaccgccatgccggtgatcttggaaatgtgacagctggagcagatggtgttgcaaacattaatgttaccgacagccagatcccactgactgggccaaactcaatcattggcagagctgttgttgttcacgctgaccccgatgatcttggaaagggtggacacgagctcagcaagagcaccggaaacgctggcggccgtgttgcttgtgggatcatcggactccagggctgaactgaaacaaatggtcgctggacttcgggggcgcctgagagtgccgtcaccagcaggctagaataacatcccgaagacatcgtgaaataataataagagcgcctgatatgtgatcagtggtgtacttgccattaagcacctgtggcaaccgatgagctgaactgtgttggactgttggctaaaatgctggttcgcctgagcatctgtt

SEQ ID NO: 2779 - DNA, 692 bp, Zea mays
  Clone ID: 700238385_FLI
gatgatgcaaaagtcgcagacatggaggaaataactgagatgatgaatatgttgttgtaatcattgtcccagatgggtggtgtgctgatgtcgtgctgtttatgtgttgcttatttctatccagctgtggtggatatgtatctgaatctgaagaagctgcaagtttttcaagttggatggagtccaaagaatgaaactatacttgcatcctgttgtctgggcagaaggctcatggtctgggatctaagcaggatcggccaagaacaaacaccagaggatgctgaagatggtcctccagagctcatgttcatccacggaggccataccagcaagatctctgatttctcctggaacccctgcgaggactgggtggttgctagcgtcgctgaagacgacatcctccagatatggcagatggctgagaacatctaccatgacgaagatgatctgccaattagcgatgagccggcaaaaacttcttgaagcaacacagcacaaaaggaatcttaacttctatcgactgttggtgttcctagatcggaaccctgctcgccggagaatcttcatcgagtgagagttggctgtaggttgcttccgtggtcgtaactttatgcttgacgggttcgtcgtttcttcgaccgtctgtatgtgtattcggcgaacctttagcaatatacatatcccgattgact

SEQ ID NO: 2780 - DNA, 1102 bp, Zea mays
  Clone ID: 700238479_FLI
gccaccacacactagagagagagaaggagaacgcgcgtcgtatatgggtcaagaagaggccgtggcagcgaacggcaccggcaccggcgtcggccgcggcaggccgcacgccgtggtgatgccgtacccgctgcagggccacgtgatcccggcggtgcacctggcgctgcggctggccgagcgcgggttcgcggtcaccttcatcaacacggagtccgtgcaccaccagatcggcgccggcggcgacatcttcgccggcgtgcgcgcgcgggggggagggacgacgacggaggagctggacgtgcggtacgagctggtgagcgacggcttcccgctgggcttcgaccggtcgctgaaccacgaccagttcatggagggcgtcctgcacgtgctcccggcccacgtcgaggacctcctccgccgccgcgtcgtcgtggacccggccaccacgtgcctcgtcgtcgacaccttcttcgtgtggccggccacgctggcccggaagctgggcgtcccgtacgtgtccttctggacggagcccgcgctcatcttcaacctctactaccacatggacctgctcaccaagcacggccacttcaaatgcaaagatcctcgcaaggacacgatcacctacatcccgggcgtggcgtccatcgagccgagcgagctcatgtcgtaccttcaggatacggacaccacctccgtcgtccaccgcatcatcttcagggcgttcgacgaggcccgccgcgccgactacgtcctgtgcaacaccgtggaggagctggagccgtcgaccatcgccgcgctgcgcgccgacaggcccttctacgccgtgggccccatcttcccggcgggcttcgcgcgcagcgccgtggccacgtccatgtggcccgagtccgacgactgctcgcggtggctgggcgcgcagccgcccggctccgtgctctacatctccttcggaagctacgcgcacgtgaccaagcaggagctgcgcgagatcgcgggcggcgtgctggccagcggcgcccggttcctgtgggtcatgcgcccggacatcgtcagctccgacgacccgcgcccgctgcccgagggcttcgccgaggcc

SEQ ID NO: 2781 - DNA, 1333 bp, Zea mays
  Clone ID: 700238962_FLI
cgatacttcagacagctcttcttgcgttgcctactaagctctctctctctctccttctctcttgtgttcttgccttctgcctactacgagtgatggccagcctcactgacctcgtcaacctcgacctgagtgactgcacagacaggatcatcgccgagtacatctgggttggaggatccggcatagacctcaggagcaaagcaaggacggtgaaaggccccatcaccgatccgagccagctgccaaaatggaactacgacggctccagcaccgggcaggctcccggagaggacagcgaagtcatcctctaccctcaagccattttcaaggacccgttcaggaagggtaacaacatccttgtgatgtgactgctacacgccacaaggcgagccaatccccagtaacaagaggtacaaagctgccacggttttcagccaccccgatgttgcagctgaggtgccatggtacggtattgagcaggagtacactctccttcagaaggatgtgagctggccccttggctggcctgttggtggataccctggtcctcagggaccatactactgtgctgccggtgccgataaggcctttgggcgcgacgtggttgacgcccactacaaagcctgcctctacgccggcatcaacatcagcggcatcaacggcgaagtcatgcctggacagtgggagttccaagtcgggccgtccgttgggatctctgccggcgacgagatatgggtcgcccgctacattctcgagaggatcactgagatggccgggatcgttctctccctcgacccgaagccgatcaagggtgactggaacggcgccggcgctcacaccaactacagcaccaagtcgatgagggaggccggtggctacgaggtgatcaaggaggcgatcgagaagctggggaggaggcacagggagcacatcgccgcgtacggcgagggcaacgagcgccgcctcacgggccgccacgagaccgccgacatcaacaccttcaaatggggcgtggcgaaccgcggcgcgtccatccgcgtcggccgcgacaccgagaaggagggcaagggatacttcgaggaccgcaggccggcttccaacatggacccctacgtcgtcaccggcatgatcgccgacaccaccatcctgtggaagggaaactgataaaaccactgttcttctcctgcacgcatgcatccgccccgtgctgtcactttttgtttttcaaatttcgattcccgtcctaaagtttgttaccacttattattacggtctccagtgtactgctcggaaagtccgaataaaaacggctctaatgattttgttttttttt

SEQ ID NO: 2782 - DNA, 1716 bp, Zea mays
  Clone ID: 700223753_FLI
ctttcgcaagtggacatctgattccaatttttttaaagggatctggttccaaattcgtgcttggacctgccaggattctattgtttttggtgtatcctcttgctttggtacatgtagatcagcaagcaaatgtttttttatttcattgaatttcaatgagtgcaggttacgttctgtttgtactttattgaagttcattatactattttcttttggtaaagttgttcgcatcaagtgcatgttgcattctttttagtttttaacggttctgctttcagcttgctcttgggtgcgtttattttttagctgtgtttccattcctccaactgtgttttcattcttcctttgttgaccatttcgattttgtggacaactaatttcctttgggtgaaatgatcttgacgaagttgagatttcgctttattttgtttatggacgcatcaagattctaacacgccgttatttttcttcgctggtttagtaatgaggaaatcccttttatggccctaattttagggtttagagttttaactgattttttttaaaaaagttgttcctctccggtcccaactccatactgtgtgtaaatttgtcgcatcgcttttttgttctggaaagctctaaaaacaaggaaattatttgcaccgttttttaaaaaaagatagcatcttgcacggttgctttttagagaaagaaaagtaaccaaattcggttttgtccaaattagtttcaatttgatactttctcaagttttacttcatgtttttattgtttgggtttactaaattgctggaattcctgaggcgcatacctactacaacaggttgcaaaacaatgacctccaactaatacaacccacaacagctgaagaagaaatccagctttctcaaccaccaaatttggaagacaagaccgttgaagagctgctcaacatagatccggatatgtttcccgaagaaggatgtactgttactatatcaagcatcgtgcaaaatagcagatggtggtacccatcttgctccaggtgccacaaatcttcatctcaaacctcaactggatatcactgcacatcatgtggctgcacaaatattaaatttagatacaagctcagcttcattgctactgatggaacatgcgaagcagagttcttttgttttgatagcatagccagaaaaatagtaggagaaccttggggcaaccttgttacagcagttacaacttctgagagtcccagcagccctagccgctattgtgtgtctgaaatttactcttgcagttgccatcaatatgtcagcctactatgtcacgaacagagtattctctattctatctattttaacaaatcatggaagacagaccttcataccatctaacatgcctagccatcctcaacaagagttgcatacacaagatgaagtacctagccttccgaccacacaagactctccagcaacatcaatggcaaaactatctacctgtagcaacgaaagaaacgaggtgtttgctttttgcgcacctatcaggagcaccatcacttttggaccatgaatgcttccctatagatatgaacctactgttagactatttgtggatatgtacatattgacttaacacctgcaagcacactgttgctaagtgttgatgtatgatagttgaatgctacttagtatgtattgtagtctaaatccactctacaactggtatcaactattacat

SEQ ID NO: 2783 - DNA, 2368 bp, Zea mays
  Clone ID: 700223759_FLI
gtgacctgaagatatgcgaagagtttttgaaggaaaggagagaatatatggttttacttgaactctataaaagcaatgaaatgcaccgtgatgctctccaactactcaatcaattagttgaagaatcaaaatctgaaatggagaatacatattttaataaaaaatttaactctcaaatgatacttgaatatctcagggtattatttctatgtccttttgctcgcatttagctcaaatgatcctcaaatatcttacatgccttgctaaatggtgttctatctgctgcataaccactgtttctacaagctagatgggttcatgaataattatgctttattttgataacttaacaggttaagttttaaggcactattaaaatattaaattcaaggtgtgactcatgtttactagtttctctgtgcatattttgtaattatatccaactgcatgatgtctcttcgatcagtaggccaaacagtttgtatacttgaaagcttatttgatatgtggtaggattacatataattgctcaatatactatcatgttctgtttcacgcttttgttgtcctccaacaattgatcgttagtactagcaaaactggctgcatagtgatattttactgtgtatctcttgatatcttttaaagcttatcatttggatctttgctttgatgtcttgaaatcattttgctttctgccacaaattaatacttttatatgtctgattcgagatttcattttcatttccagcccctttgtagatctgacccaatgctggttttagagtcttccttgtacgtccttgagcgcaacccatcagaaactattgagctctttttgtctgaaaatgttccagcagatttggtaaattcatatctgaagcagcatgccccaaatttgcagtcaacttacttagagctaatgctctcaatgaatgatactgggatcaaccctaatctgcaaaacgagctggtacaactgtacctttctgaagttctagactggtacaagattctgaaggaagagggaaactggacagagaagacatattccccaacacggaagaagttaatatctacgttggagagcaattcaggttacaatacagacgcacttcttaagcgccttccccaggacgctctttttgaggagcgagctatattgtatgggaaaataaatcaacacctcagagctctctctctctatgttcacaagcttcagatgccagagcgagcagttgcatattgtgaccgtgtttatgaagaaagagaacaacaaccgtccaaatcaaatatctattttaatcttctacagattcatctgaacccaagaaaagctgaaaaggaatttgagcagaaaattattccagttgcatcacaatactctggaatccaaaaggctagtgctactaagcccaaagggggtcgcgtaggtaaaaaggttgtagagattgagggggctgatgacatacgctttagccccagcggaacagatagtggccgaagtgatggtgatggagatgatgtaaatgaccgaggccctataatgttaaatgaagcactggaactgttgagccaacggtgggacaggataaatggtgctcaggctcttaggctgttaccaagagatactaaactccaggatcttgtatcatttcttgagccactattgcgtaactctagtgaacatcggcgcaattatttggttatcaaaaacttgattttgcgggcaaacttgcaggtcaaggaggatctgtataatcggtgtcaagctgttgtgaagattgatggagatagtacgtgttctctttgccataagcgtgttgcaaatagtgcttttgcaatatatccaaatggacaggctttggtgcattttgtctgctttaaagaatcacagcaaattaaggccgtcagaggagcaaactctgtgaaacgtagataatatggccgtgatccaggtacacccttgaacgggacactgacaaatcaatatcgaggtttggttgatgccagcttatggaattccctctctttggcttcacactggattttagtggactgcttcagaagtttttactggagtaatcttcactctcttcagagatcgagtttatagccgtgcgtgtgtgctcgctctctgttttctggccatcgtactggaaaactggaacccctttcttttggttttcatgtacagaatgtaaatgatactgtaaagtttcggttaacagattgatgatggtcttgattatagtgccgcaatgtgtgctccaaataggtttggacattattattattggatccatgtcattataattctctaagttttgaatggcgctattataattcgtatattcggaggtctacc

SEQ ID NO: 2784 - DNA, 1161 bp, Zea mays
  Clone ID: 700223761_FLI
tgatgatggggccggattgttacaaggtccattttgatgatcctgaccttggtgttgatactgtgaaggacactgattgtatgccagttaattggctgcataatcgtcctgacaacatgagaaggaactacctttcaaatgatgtgtacaacatactggagatggatcacattcctgaccttacaccaagtgagaacgggaatcatgctataaatggaactactgtattcgaggagctcaaaagtctgcgcttaacatcagatagacagcctaaggcagaatctattatacatagtgaacggccaccatataggagtacatctgatggccctacaagttctagtggtttctcttgcccagacaataatgctggtcacaacggtgaactagagtcatatgtagctgcattttttgaaaactcactatcacaagccaggcagatggttgacgaagccatccaggcaaactctggtggtagtgatgatgaaaaggtatgcatgttaaatcaagtgacaggatgtctaggctcagattctcgtggcgtgcaacttccatctgacatgatatcaaactgcatcgcaacggttatttcaatcaagcgccttagcgactcgcgacatccatttggtaacgtagcaggcgtcttggagcatgctttatcaatgctgcgtccaagctgtccacagaacctcggagtttacacagaaataaagagagacctttgcaccatagcgaaccagatttttgcacttgtgccaacagcatcgggcaattgcagccctcctgtctcgcccatgtaactgggacctgccccggatagacccgttgccttcttgcaggccctgcagtagaacacgctgcttcctctgctgtgagttcaaaacagaggttttgctgctgttgcctgttggagcttgatgttatgaagtccggttgaatggtagcatacggaggacgcaagtctgatgtgctgacttgagcttgtatatgcagcttgcgatcattaattggctagcctccttgtaacctgtgtatatacctgaatgaataatttataggtccatatacagattcaggatagttaatatctgatatagtagtgaataaagatgtatttctgcagttatgattctcgatgtaatgtcacaggatggtttcttg

SEQ ID NO: 2785 - DNA, 2281 bp, Zea mays
  Clone ID: 700223779_FLI
gcgagaacagagcccaagaggcctcaaaagaaccactgcacttcctccgcatagctcgtcgccctctctctcctatcagtcctcccagctccagctaccacagcagccctctcgcttaaaggaggagggagaagagggcggggcgagcaatgtcggagcagcagcagccattgccgcagcctcggagcagcatgcgggaggctctggagaaggaggacaaggagaaggcggcggctgctgcggcggccaaggagaaggcggccgtccccaagaacggcaacggcaacggcggcaagaatggcggcggcgccggcagcggcaacggcggagcgcccccgcagtccggggaggagacggcccgcgagatccaggtggtcagggaggcgtaccgccgcgagacggccgcgccggcctacgtcatacccgaggagccgccggccgtggtcgagctcgtcggctggtacatctacggcttctgctcctacttcatcacccacctgctgctgccggtcctcttcccggccatcatcacgcaggtcgccttccccaactccgacttcacgcccgaccccaagtacaccctcaagggcgtcacctgctccgtccacgagatgtccatgtaccagaggcttaccaagcactccattgtgatcgatggatcccggatgtcaccattgggctggagtggactgtcgtgggcaatcggcatcctcatcgtggcgccgctcctcacccagaccgctcaccatctcgaccgtggccagtaccagtcgctgatcctcattgccgccacgtccttcgggtccttcttctgcctgctaacaggcttcttcaagacggtctgggtgttcctgttctacatcctcttcatcgctggctcgatcatcgtcgctgaggcggtgcacacccgcaaccttgggctgatgatccgtggcctggctgcgcatgactcgggcaagcaccttgtccttcgccgccgcgctgctgccagccagctcagcctgtactgcactgccataggaggcattggagctgccctcatggcagctttcatgtaccacatgctgcggcgcactgaccagctcactggcctctgggtcgtgtccatcttctgtggccttatctggttcatcggcatctgccatggcctcttcacaaacaggcccagcagctcgtcacccaccaccgcattcgagcccaacttcttcaccaagctcagctacagcatgaccctcctccgttacccgcaggccattggcagcctggttgcggtgttcctgtcctctttcgccacaatgtgcatcttcaccagcggcacgctctatgctatcggtggtgtctgcatcaagccggtgctcgtgcttgcgctatggatcctctactttctgttccccttgatctcgctcccgctcctccacccgatccagatcataatccgcgcggacgccgtgcgcatgcagctgctcgggttcataatctgcctgttcgtgtccggtgccgggttctacttcaagagccacaggtggagggctgcccacatcatcgtcatcgccctggtccagagcaccgccaatggcatactgtacgcgttcggccgcatcctgctcctcgatgcctcgccgccggggaaggagggtgcgttctcggtctggtacgcgtttgttcgtgtcaccggtgccatgatcggcttcgctgcctcctccgctggccctgggcgcgcgggagggtcctttgctgctgcgttcctcgggagcttcctgggcatcatcgtgctgatcttcggcaacgtcagcaacatcggggcgctgaaggcggccgggcacctcaaggggatggacgacgagaagaggatgggcggtctcgggatggagaagggcgagggcatgggtagcgccgtcgctgattctggcgagagcagggggagggtatgatgatgactattcgtgacagtgaattcctgggaggtgggggagaaaaggattgcgtcctgtggaggttgtgcttgtgagaaggatttgttctctcttttttttcttgtttctttggccgtgtttcagtgacactgttgatggatcccagtgcttcgcccgtttgatgcatcatggtggtggtggtgatgatggatgacatagtggtaggggagtgtgtgctagttgttaatgtgttatttattcttttgcttgcaagacaattgtaactgatgatcgttagatcatatggttcttccttcgttcttcacccgcccccaaagtctcttgcagtaaagcttcattcatgattc

SEQ ID NO: 2786 - DNA, 840 bp, Zea mays
  Clone ID: 700223814_FLI
agggatcccaccatcgcagcatgtactccagttgccacactgccatttctcgctccacactctgctgtggtacctttctgtgaaggggtctacaaatacgccacagcttgggacgctttgagaaaagatgctgcagtattaactcaagatgtaacacttttggcagaagatgctgcacagaaaagcgggatcaccatcgaacaagtcagggataggttacggtcagtgttgtctttgactgatgtcactcgatttccagtcccaaagaacccacaggcggtcatctttgttggtgcaacggacgatggttatattcccagacattcagtgatggagctccagaaggcatggccaggctcagaggtccggtgggtaacaggtggccatgtctcctctttcttcctccacaacgatgcattccgcaaggccatcgtcgacgcccttgatagattgtaacaccagaaggtgagagagaggccatccttgtgatggcactttatgttgtgtgacatttctgaacttggggttgcggcatgagctgaaccctctgtaactgccaacctaactgctcttagtgacgctgagattggaggtagggtggctgtacatgacaattgtagaatgtagcaccccattatttggcaattgttctgcaaaatatttgtttgtcaccatgtatcaatttgaatgctacatcttctgattgtctgacatgcatgtcaatcagctaggcaatttggcagtttcagttattattccttcctagtactattttatattcatattgatactgctggatcagccactatttagtttatatactccacagttacatgggtc

SEQ ID NO: 2787 - DNA, 1497 bp, Zea mays
  Clone ID: 700223828_FLI
agcttgggtctcctatcctccccacccctctctcggtctcttccccaccgcgtcttcgtcgtctcgtcttcctgcctccttcgcccgagaaaggagagaatggggagcagcgagaagaccgttaccgcttacggcgagtacacctacgctgagctggagagggagccctactggccgagtgagaagctgaggatttcgattactggggctggtggtttcattggatcccacattgctcgccgtctgaagaacgagggccattacatcattgcctctgactggaagaagaacgagcacatgaccgaggacatgttctgccatgagttccacctcgttgatctcagggtcatggacaactgtctcaaggtcacccagggtgtcgaccatgtcttcaatctcgctgctgatatgggtggcatggggttcatccagtcaaatcactctgtgatcatgtacaacaacaccatgatcagttttaacatgctggaggctgcacgtatcaatggtgtgaagaggttcttctatgcctcgagtgcatgcatttaccctgagttcaagcagcttgacacaaatgtgagcttgaaggaatctgatgcctggcctgctgagcctcaagatgcctatggcttggagaagcttgcaaccgaggagctgtgcaagcactacaccaaggactttggcatcgagtgccgcgtcggccgcttccacaacatctacggccctttcggaacatggaaaggtggccgcgagaaggcaccggctgccttctgcagaaaggctcagacatccacggagaggtttgagatgtggggcgatggtctccagaccaggtccttcaccttcatcgacgagtgcgtggagggtgttctgagattgaccaagtcagacttccgcgagccagtgaacatcggaagcgatgagatggtgagcatgaacgagatggctgagatcgtgctgggctttgaggataggaagctgcccatccaccacatccctggcccggaaggggtccgcgggcgcaactctgacaacacccttatcaaggagaagcttggctgggccccgacgatgaagctcaaggatgggctgcggttcacctacttctggatcaaagagcagatcgagaaggagaagacgcagggggtcgacatcgcggcgtacgggtcgtccaaggtggtgtccacccaggcgcccgtgcagctgggctccctccgcgccgccgacggcaaggagggcctctaagcgacgacccagggctggggctgtcttcgtccatcacagctggcgtaccatggcaggatatactgtttgcggtagaatatcacagtagcagcaaaactagtacttctggaggttcagacatgacggtcgtcttctattctattttcccattcatcgctccatttatttatgatgccatgcaactcgttgaatttttgctgtactccctttatttggtcttggccggccggcaataaaattctccctgtttctact

SEQ ID NO: 2788 - DNA, 1699 bp, Zea mays
  Clone ID: 700223860_FLI
acataatcttacatttatttcaaaagtaagcttgagttatattattacagaccagactataagtgggtgccaaaaagtaataattatacaaaccagggagacaccaacatctcccgaaagacaataaacaaaagatcctagatggaggaccgagtcctcccgcacttcagtcttggttttccttgttgggaaccaccttagcacagaagcagcaaaagtctgctacttcctcacctttagtttaacacttagatagtgtttgctgggggaggtactcgcttggcgagcatccactggttatgtccatcctttcttgggtcgtccatcgactgcatcttgtggttggcaccacatcacttgcacgatcgtcctctctcggtccatatcaaacctcggtcgtggttgctacacatgtggcgtgaagacgaacgcgtcgtcgatcacgggagaccgaagcgaagtcgaaggagcacgacgggcaccgagggcgtgtcaaggtggagcacacgccacggaggggctgctgcgactgtcgattggcgcgacaaaacagcaagaacgatgacatcacgggcacggcgcgaaggggctgcgcgtcgacgaacaacgggcagcgacaacaagtgtgtagctacgcgagggggcatttttgtggagcgtggcgagtgcggggtggaggggagtgtcgcgactgctatgttggcgtgctagggggtgtacacgaaggcgaagtcgatggcgaatgcgacactactgctgtcctactgcgacaccacgcgggcgagcgcagcgagtcgagcgcgtgacgcggaggggctgctgttttccatgggagatgtgcagtagcgaagctcgacacaacgcaaggcaagggacggagctgctgcagtgcgtggcttgctgcgcattttgccgaacagccgacgggcaccacgacgagcagcgaggaagggggctcgctgtttggggagggagagtcgcgcagaggcgttgcgcggggcgccggccatggaggaaatggagctcttgctggatttccatgggagagtagggcgcagggaagaatcggccatgacaagagcagtttgggggagggagatgttgctgcaatttctaggcgccaaggaggaagagcagggggcaccatgggagggagctgctgcgtcgccatggacagggaggcagcgccatgaggaaactcgagctcgagccatggagcagggaatagggcgctcgaccatggcactcatggcaacagcggctaccaaggccggccatccgaaatggaggaggcgagcacctagagcaggggcacgggcgccatggggaggaggacagggagcgccggtcatgggagagaaggaaggggcgctactctttcctgctaccgaacgccgcggagaaggggagagcgccatgggcgactgcgagcccggaccagagaaggcccacgccatggctggagcagagggcaagggcgctggccttagtgctccttgcacgcatgggaaacaacaggggagagagaagctcggctagggagggagcatggagggggagccggctgaagtagggtggcgctggggaagaaagggaggacgccatggctgttggccgatcctccctgctggctgccgtggaaaacagggaagaaggagacggcgtgaggaggaagaaggctgtggcggctggaattttt

SEQ ID NO: 2789 - DNA, 981 bp, Zea mays
  Clone ID: 700223870_FLI
aacttctgtagcagctgaaatagtacggacgtgtttgaacatgtacaggatctcgaggctacatctgtaaaacgaccacccctcacgcggaagcggagactggaaatcgggagggagaccggagacgagaccgccggagatggagccgagatctgcaatctacagatccggcgccctccttctcctcgccgccatccttgcggaggtcgtcatccccgcatccgccatcggagacaagtgcgccgcctgcaaggccgttgctgcggagctagagattggaatttcgagtgagaagccgagaaatcacttggacttgcgcaaccgcttaaattctaaaggccagagggaggggaaggtcattgattatagggtcagtgagcttcgggttgtggaacttctggatggcctatgcgataagatgcaagattataccttaaagaagttggaatcaggcgaaaagggatgggttaaagtaacagactggaatagctttcaaactgaaaataaggcagcagcaagagctcactccaaaaaattgtccaccttctgtggaaggctactggaggaaacggaggatgagctctctgagtggatcaaaacaacctccacagaatcagaatatgtaagcaaggccctttgtgaagatattagcaaacactgccgatctacaagtgctaccatccagattgatgatgagctatgacatgccgggggcaggtcgttgtttcgcaaaaagcaaaacaggcgacaggttggaaaatgttaaagaacacagctctagtagtccctgacaccatttagagagacatgcagctgccaattctgattgtttgtgttgcactcatatttcctgtaaacaaaagcttagactgatctgtagagaaagcaactggacatcaatttttgcataccgatgaactacagtttaaaacggccggttgaattatcatgtcaggggctataggaaatttgaatgcttct

SEQ ID NO: 2790 - DNA, 2370 bp, Zea mays
  Clone ID: 700223877_FLI
ggcaatctgacagcaacagtgttaaatgcctacacgatgagctgaaggaaaatgcttcttgttggtactggatgatctctgggtcactcgtgagaatcaggaggagcgcgctattctacttaatgtgctcgatgctgggcagagtggaagtcgggttctggtgacagctcagaagaaagatgtagctgcagcgataggcgctgaggagcagatcccgattccggatatggaagagaagcagtacttttcgatgttcatgcactacgccctagaaggcaagcgtgttggtgacggaaggtttatagcaatagggagaaaaatcgcgaaaaagctcggcagatcacccattgcagcagtcacagtggcagcacggcttcggagcaacagcagcatcgatttctgggagacaacagcgaaccttgacatgttggacgaaacaatgggagctctgtggtggagctatcagcagataggtgtagacgtccggcgatgctttgcatactgcagcacttttcccagaggatacaggttagtacgaggcgagttggttcacatctggatagtgcaagggttcataaacaccagggttaatgcaactgagcaaccagaagatataggcctgcactacattaacgaactgcggaccttctcatttctgcagatagaaagaacagtttttggcactgaaacggaggcgttcacgattcatgacctgctacacgagttggcagagagggtcagcggaagcgaatgcttcagagttgtttcaaatagctcaccaaaacatattccgcaggaggttcgccatctctttgttggcactgggactgacagtagagcagctatcgcaaagaaaattctaggtctggtaaatctacgcactctcatcatcgtcgaagagtacagcgaaaacaagaggaaaacatttgcagctgaagatgatgaggaacggtcaggccgcaccttagttaacgaggaagtcttgggcagaatgttcaggagcctgaggaaactgcgggcgctggtcgttacaacgaaacagtaccatgaaccagcgttgttagtcccagcatctatcgattagatgaagcatctgcgttatctaagctttaatctggactgttctcatcgcagtgtggagcttattttcccaagcacatttagcaaactttaccatatgcagagcatatatagtgagaaaatttcctgcgccaaagacgtgacacaaaatctcacttccttgcggcacagctcttcgtcgtggatgggatttgcaaacgttggcaggctgacgtcgctccaatcgctacggtacttccaagtgaagagagaacaggggcacgaactgaagcagctgaagcacctgaacaaccttcgaggcactctggcgattgacggtctgggggtcgtcagaagcaaagaggaagctcttgaagcacacctagccagcaaggaacaactaaggaaactggagctgacattctctgtccgttaggcgggggatccgaacgccgtggcagagatacttaaccgccttttaccgccggaggatccaaccaaccataggtaccatggctggatgatgggaggccaggctccagacgttgctgcagaggtccttgagggcctttgccccccgaaggatcttgcaacactcacaatcaaccgctacaagggttcgaggtaccctagctggatgctgagtagccagagtccaggagcgctgaagtacctgcaagagcttgagctccataactgcaaccgattggcatcttttcctgaagaagagaccgagctgttcagttgtctgcgtgagctactgagcttcgagttagcttgtgcgactgggacagcatgccagaaaatatggagccccttgtttcgctccagagtgtattgattatgaggtgcgataggatggagcgccttccaaccctgccccggtcgcttgcgaaggttgaaatccatgggtgccgcgtcctcagtagaacctgccaatcagagggacacgagaactggcagaagatcctgcacattccagagaaaaatatatccccaagaaggagcatggcgcagtgagggagggaggacgatgagaccactgtttccatgtttaccagcgacaactgacctgggattgtaatatgcatccattaactgaggattgttcttatacgtttgtgatgaatccacctgacaatcttttttttttttgaaaataggtacactagctattattatcagtattattggaagtgtacttaatggatgatcagatcttttttattctctctatttggggaactttcttgtaagactttttcgtctctctaaatatataaagatgtgcagctttcctgctcgttcgat

SEQ ID NO: 2791 - DNA, 1426 bp, Zea mays
  Clone ID: 700223885_FLI
gaacctcgcgatttccctcaaaccagttctcggatcagagcgtcgtgggtgtcgccgggggcatggcgcagacgccgaacccgagtaggaggtcgtgggtcggcccggcgccgatgccattcctcacgccgcggccggagcggcggcaccttgagatgcggtgggcggacggagtgtcccaaagcgctgctcgccgtagcggcgtcggcgccattgccagggatggatgcgagagggatcaggaggtgaacgttcaggtcatgctccggtgcaggccactcagtgaggaggagcagagagtgaatgcgcagagcgctatctcttgtaatgaatcaaagagggaggtcacagttctgcacagcctcttcaagcaagcagacaggacatttaccttcgacaaggtatttggaccacaatctcagcaaaggtcgatatataaccatgccgttgcaccattagtgactgaagtccttgaaggctataactgcactgtcttcgtgtttgggcagactggaaccggaaagacatataccatggagggagagatgagacagaaggttagtgaactaccggatactgccggtgtcattcctagagcagtgtgccatatctttgaaatacttacagcacggagggctgattatagcatgaaggtaaccttcttagagctgtataatgaagatataacagacctattgtctttagaggaccaaagcagattccctgaaggtagacaaaaaaggcctataactcttatggaagatggcaaaggcggtgcggtaataagaggtcttgaagagattgttgtctacagtcctagcgacatatacagccttttggaacatgggtcagctaggagacgcactgctgacactgcactaaataagcaaagcagccgatcacatgctgttttttctataaacatccaagtcaaagaaacaacagtaggaaatgaggaactcattaagtatgggaggttaaaccttgtagacttggcaggatcagaaaatattgctcgatcaggggcaagagagggtagagcaagagaaactggagaaatgaataagagcctactaactctgggacgtgtcatcaatgcacttgtggagcattcagttcatgtgccatacagggatagtaagctccccagactgctaagagaatcattaggaggcaaagccaaaacatgcatcatagcaacggtgtctccatctgcccattccctggaagaaacgctggtcacacttgattatgctgctcgtgctaaaagcataagaaacaagccagaggcaaataaaaaaacatgcaaaactgttgtgctcaaggagctctaccaagaaatggaaagaatgaaacaagatgtcaaagccgcaagggaaaagaatggaatctacatctctcacgaaaggtttgcccaagacgaaac

SEQ ID NO: 2792 - DNA, 594 bp, Zea mays
  Clone ID: 700223931_FLI
caactggtcaactgctctacaacttcacgtcttcttcaccttcggaagacgggcaggcgagcagcgaaggtgcgacggaaatcagtggggatgaggcgcaatagcccgccgacggcgagcggcaaccgcctcgcggtcatcgcttcccacttatccctccctccgctcggcagtccggcagccatatccggggagaaggaagccgccctcgccaccgacctcaacagcacccccaccatttttgacaaaattattcggaaggagatcccatctgaggtggtttatgaggatgagaaggttcttgcatgtagagacatatcaccacaagctcctacacatattataatcattgcgaaggttaagtatgggctgtctaggttgtcgaagcatgctaatggtcgacccgttcagactagccatgatttgtgccacgagagcttttgaggtcgcagggagtagaacgcatggcagccgtatgtgaagccgtgaaggcacggggaggcagggagcggagcatgaaaaactgagctgcgtgcggttccctgtaatgagaacttttaataatatcatgacttgctaataatcatattttgg

SEQ ID NO: 2793 - DNA, 793 bp, Zea mays
  Clone ID: 700223942_FLI
catcggcctcctctctctcggtctcgccagatctccccacggaaccctacccgagcatcagccatggcaatcgcggcgcgcgccctgcgccgcctcccgcttcacctctccccctcgatctcccgctccttctgcgcggtttccccggccgccgcctcggctacctcggcccccgccgccgcgtccgccaaggtcgctgaccgcatcgtgcgcgtcctcgccatcgatcccgacggggcgcgccgcgatgtggtcggcctctcggggcagacactccttcgcgctctggccaacgcggggctcatcgagccggcctcccaccgcctcgaggatatcgacgcgtgctccgccgagtgcgaggtccacatcgcgcaggagtggcttgacaagctgccaccaccgtcctacgaggagcgatacgtgctcacgcgcgcgtccaggaaccgcgagctcaacaagcacgcgcgcctgggctgccaggtcgtcctcgcgccggagctgcaggggatggtcgtcgccatccccgagcctaagccgtgggacatcccataatggcctgccgacgaaaggtaaggtgcggcttttgacgctgtgagccttccttaattcccttggctcggtcaagctgtgcgcctgtgccatccccttttatatgttacggatttagtgaagaataataatttgatgagcaaaacttggcattggttaacttttgttcctagtatatggatgctctaatgtggaatccttttgcaactaccgcagtttaatgtttcatggtttgaagttttgt

SEQ ID NO: 2794 - DNA, 1076 bp, Zea mays
  Clone ID: 700223944_FLI
ggcaacgagagaagtgacaactcaggttctctttacgggttgcttcttggcaagaacatattggtggttgatgacaacaaggtaaatcttagagtggctgctggcacgttaaagaaatttggagcaaaggtggagtgcgtggagagtggaaaagatgccctcgccctcctacaggtcccatataagtttcatctttgtctcatggacattcagatgcccgaaatggatgggtttgaggctaccaagcaaataagggcaatggaagcgaaggcaaatgagcaggcagtcgcctgtgacgattcagaaatagatggcgcgacaagggcagcaagatggcgcctgcctgttcttgcaatgaccgccgatgtcatccaggccacccatgaagagtgcacgaagtgcgggatggatgggtacgtcacaaagcccttcgaggagaagcagctcttccaggcgttgcagaagttcttggaccccggcatgtcctgctaacgccgaagtgatgcgttggagaccgtgcagcgcgggctgctcgtcgatcatgccagcggggaacagcaggcagacaaggcagcacgcaccacgggccttcgctggtctgcctgcctgtgcaggcgtcgtgtaaatgtattgtatttgcagggatactgtttacagcgctagtatgccccgtgccacaatgtccgagctacctgtggctgatgcacgttgcgcataggtggttttttttgtacagcttccaccatttttgtgctccagatcagaccaccgaaggaggcaagcatgctcgctggtgcagtgcagcactggaaggaaaacctgacttcctgagagtagatttttgctgtttaattgcattgggatttatgatgtattataatcagataaatgtgtgatgtaagctggcgtaattggcccaatgcatttccattgttatggatgagttgaaatggcattggttagactacactattgggtgtatgcccttccacagttccattttccctgcaaaatatcaaaatgtgcaaagggatagtggaatcatggcttgaattatatgaattttctttggtgtt

SEQ ID NO: 2795 - DNA, 1366 bp, Zea mays
  Clone ID: 700223971_FLI
aagaaaaagaactatccatcccgctgtgagccaagccagcccagctccggcgactggcagatgtttcagggtccccgtccgtttgccgcaggttccctgatatcggtggccagcagccgactttgtggttagtccattctcttccggcgggatacgttgcggaccacttcgctcagctgctcgcgacggcggcttgtaccctgatttgggtggggaggatgcctgatatccagctgggatgccacactataaggtcccatggtaccaaagtggcaacattacacatgtatgactggattatacttttatgtcttgctgtacttgatggactgttaaacataatcgagccctttcaccgctttgttggacgcgacatgatgaccgacttgagttatcccctcaagggcaacacaatcccattttgggctgttccagtatgttctgctctgctgattgcgatcgtgctacccttggttatctttgctgtcatttacttcaaaaagaaaaatgtctatttacaccacggcatactaggtatcttgtattcagtgcttataactgctgtgatcactgatgcaattaaggatggtgttggtcgccctcggccagatttcttttggcgttgttttcctgatggcaaacctaattttaataatataaccaccgatgtgatatgccatggagaaaagagtgtcatcaaggaaggtcataagagtttcccaagtgggcattcttcatggtctttcgctggtctaggttttcttgcatggtacttggctggaaaacttaaagcttttgatcgcaagggtcacattgcaaaactgtgcttagtttttctgcctctacttgtcgcgtcacttgtggctgtttctcgagttgatgattactggcatcactggcaagatgtctttgccggcggcatcataggtcttacagttgcttcattctgttacctgcagttcttcccatatccctttgacaatgatgccctatggccacacgcatacttccaacagctagctgagacacacagtaatggtaatgcaaactcaatcaacataagacctacagagtttgaagatgaaccagatgaccatggtgacattgtcctgagggacaccagccctatcttggagtcaatggagtctggcaggagaccatgaagaagcatgccactgggtttgtccaaggtgccctgaagcgtgatgagttttgtggtttcatcatgtagccgtccaacgtaaaaacagtatggaggtatatctaccaccacctgatgatttgatgaaccacagactgtcgtggttagctgtaaatgacagcgaatgtttatgtttctagtgacaatgtgaatatttggttttgc

SEQ ID NO: 2796 - DNA, 1329 bp, Zea mays
  Clone ID: 700223978_FLI
tcgcgtggagcggctcgtcagcctccgcgctctcccgcaccgccgtcctcaccgcctccgcctcctctctcaccgcacacaggttcggcagccggtgggagcggatcgggagccgcatgctcggcgccttcatgcctgagggctttcctgggagcgtgactccggattatgtcccgttccagatgtgggatacgttgcagggtctctccacatacatccgtgcaatgttgtctacacaagctcttctaggggcaatcggagtgggggaacagtccgcaactgtcataggtgctacttttcagtggtttctgagggacttgacaggaatgcttggagggatattgttcaccttttaccagggatctaatcttgatagcaatgctaaaatgtggcgtctagttgcagactttatgaatgaccttggaatgttgatggatcttttgagccctctgtttccttcatcgttgatagttataatgtgcttaggcagcctgtctaggtcattcactggtgttgctagtggagcaactagagcagcactaacgcagcattttgcacttgcaaataatgcagctgatatttctgcaaaggagggcagtcaggaaacacttgctacaatgttagggatggggttggggatgctgttagctcaaattaccagagggcatgctttgagtgtatgggcatcttttctttctcttacgatgttccatatgtatgcaaattacaaggcagtgcagtcactttcactcactacgctaaactatgagagagcttccatcttgctacaatacttcaaggaatgtggtgaagttcttgtgccacggaaggtttcccagcaggaacatattcttccttcttggtcaaactggaggaaactgaacagaattaaactgccacatgagcgtgtgcacttgggtgctaaagcctcgatgcttacacacagtgacatgttggtgattgcaaaaacaagataccactatgaaaacgcgaactactttttgctggataaacaaggcatcgtttacgttttcatccacaaggaggcaacaccagccgatgttttaaggtccttcgtacacgggctcgtgctagctagctcgacacagaacagcaaacctcagcacttagaggcccgtcgatggatggacgagatgtataccagttttatctcgaagctgcagactgaaggttactcgacggaacgccttctgtcgcattcgattctttggagggcacactggcttcacggacagctggatgagaagctcaagtaggaggaacactgcaagaccgcgtctgcttatccaagggcaggtatatcgccca

SEQ ID NO: 2797 - DNA, 1132 bp, Zea mays
  Clone ID: 700224002_FLI
gatcaaaaacagggaagactgtggaatggacgtctaaagacctacttaatggattggaagaatttgtaccaatatatgagacgcgccccattaagaataacgtatatggaatgggctttgaccacagttttgggctttggtttatggctcgctggattaaaccggatttgatgattgagagtggtgctttcaaggggcactctacttgggttttgcggaaggccatgccaaatactaggattatatcactctctcctaggcaccctgagaaatatcttaagaaaggacctgcatatgttgatggaaactgcacttacctcgctgggaaggattttattgattttggaagcattgattggggaaagctattgagaaatcatggcatttctgatcctgataaggtgcttgttttctttgatgaccaccaaagcgagttgaaaaggttaaagcaagccctaaaggctggattcaggcatctcatatttgaggacaactatgatactggtacaggtgaccattattccttgaggcagatctgtgatcaatcatacatcagaggtggtggacatagctgcttttgggagagtgatgaggcaagactaagattcgaacggaagaagttctgggagaaggctgtggagatagctgatctatgcggaaaggatgatgcatggtggggtgttaaaggttacatgagggacaatttcaaccatagcaatatggccatctcgtacaaagagcattttcagaacagcaggctcgtggaatctgtgttggatatgtattgggagcttcctcctgttgccggcccatccttaacacaccaaacaaggtatgacccagcacgtacagttgacccaatcatcgaagatggtcgctacggcttgttccgaaagaccggtctagcgaggttggacgcctcggtgttcaatggttacactcagatggcatatgtgcagatatcaggttcaatgttgagcacggacgatgtttaaagatttttcgtgggtgagcttgtttcgtttttggccaactgttgataggctttttgtacaacactgatgcgcttctatgcttacttagtttcttttaaccttccagaaattaatatttaccagaccaccttccaaat

SEQ ID NO: 2798 - DNA, 596 bp, Zea mays
  Clone ID: 700224008_FLI
ggccgggctgcagttccccgtcggccggatcgggcgctacctcaagaagggccggtacgcgcagcgcgtgggcaccggcgcccccgtctatctcgccgccgtgcttgagtacctcgccgccgaggtgctggagctggccggcaacgcggcgaaggacaacaagaagacgcgcatcgtcccgcgccacgtgctcctggcgatccgcaacgacgttgagctcggcaagctgctggctggcgtcaccatcgcgcacggcggtgtcctccccaacatcaacccggttctcctgcccaagaaggtggcggagaaggcgtctagcggcggcagcaaggagagcaagtcccctaagaaggccgccaagtccccaaagaaggcagccaagtccccgaagaaggcttagaaattagtcactccactagcgctctgctgtagcatgttcgtgtttagatctgtggatgttatgtgttccggcctaatttcctctttgccttgtggcttctgatatgttcatcggcatgtttgccgtgttgtgtttccttgttctgattttgcaattcatcatcttgttgaatgaacttactatcgggaaatgaagc

SEQ ID NO: 2799 - DNA, 1064 bp, Zea mays
  Clone ID: 700224009_FLI
gcgcgactccatacaacaatacaaacaaagctgtaacgtactgtaaaagtaagatatggaggccgccggcggcggcggcgaggttcacaaggctagcaacgacaaggaggagcatttcgtgctcgtgcacggcgccggccacggcgcctggtgctggttcaagctggcgtgcctgctccggggctccggccgccaccgcgtctcctgcgtcgacctcgccggggccgccggcagcctcgtcgacccggacgacgtccgctcgttcgacgagtacgacgcgccgctcctcgacttgatggccgccttgccggacgacggccgcaaggtagctgtgccagctagctctgttgccttgccatacatgcatggtgcaagttcatgctgtgttttggcaggtggttctggtagggcatagcgcaggaggactgagcgtcacccacgcgatgcatctgttcagagacaagatcaagcaggccatcttcgtagcagcgaccatgctcccgttcgggtaccagtcggagcaagatatcaaagatggagcacctgatctatccgagttcggcgacgacgtttacgacctcaagttcagtctgggagacgaccgccctccgacgagcgtggcgctgagagaggagcaccagcgcgcgatcctgtaccagcaatgcacccacgaggactccacgctcgcatccattctgctgcgcccgtggccggcagctctgggcgccgccaggttcggccgcgccgacgacggcgccgtgaacactgtgcgtcgggtgtacgtgaagacggccaacgaccgcatgctgaagccggagcagcaggaggcgatggtccgccggtggccgccgagcgaggtggcggcgatggacaccgaccacagccctttcttctccgcgccagagcgcctcttcgagctgatcatcaagtcattgtgaatctctcatctgtattaatcgcttgtgttcttccagactccagtgcctggtgctgtcctgtatgccatgccaaccaataagttatcatttatttatcaataaattatctcaaccaagttatcattt

SEQ ID NO: 2800 - DNA, 1953 bp, Zea mays
  Clone ID: 700224026_FLI
gggcccgtccaggcggcctctgcgccacgggctgcaccgcgcgtcgccctacggtggtgccccccgccggtggctctccaagctccccgtgacttcgaggatattccccaccatgccacgcgaccgcgcggcctcaggcaataatcaagaggttcattgtgaaccactagaagttattcgtgaaagacactccacagaaccaaacatcaatgctgcagctattctaccatcaagacctgtgagcaatacatttaacctgcttctggaaggtgacatgaatccaagtcatggcaatgggcttgctgaaatagagaacataatcaaccagagatatttttctagggatgagacactacgtcttatagagatcatgcagtcaaggacttctgattttactgttgaagaccagagacctccagtatctactgcaaaaggttttgaaacaacattttttacacctgctaaactgatcgaggctcagccatcttggaggactgatatcgttccatcatccaatgtgcatgatattggttcttcgccagttgaaattgccaaagcttttatggaagcgcagacctcagcttctgtacacgagtccaaaaagcggaaattcagagctctgagtcatggagttgcggttgacaattcgacatcagaagttttccctacaataactactgattcttctgtaagatggcctggttcagttcaaggtggtcccaattatcttacaccacaaagtaataaaggaaggactctgtctcagcctctttctcgcacaccatacaatagctcagttattcgaagatatattaagaacagcaggcatggtgatatacacaataatggacagacacaatttcccactccattttctattggaagtaagagaatactagaggataaacaggtagcaagtggtggtatagcgcagccatcatcttccaggggacagatagatgtttttggttctattccaagagaaggttcgactgcaataaacaatgttgcattcaacctgcaagagtcagatggtaaaagcatgacagaaagcagaacaacttttggacgtgcttcaggtgtagacaatatctcaagggttgcttcagtatctgttcatcccaagtcaagcgaaacagcattcaaaatacttaagcaacttgacagaactattccttcccctacatcaaagccactagggctgagacagacattagccaagaaaaatactttttctgttgctaccaacagacagattaaagagcctgatatcattatcggtaatgataataaacagagcagcattaatgagagtggtagtgctagctcggagactacatatggaaaaaaggttcagcaacctcaaagcagtcctatttcaggagagtcaagtgaaagagtccagagaagcggagctaactcagatgtttatgaagcaggcacttctcagcgtcctctgaaatcaaatctaacacccacttcagtcgccgaggtcttggataataaaaacaccagcaaaggtttcagcttcacatttcctattcctaaagctccaagctctctacttgaaccgcctcctacaccaaccatggcctcgccaccaaggaccttgccaatcactaacgaggatgttcccaagttcacctttggctcatccagcacggccaacaaactcgttttctccttcaactccacaagcagttctcctgttgctggtggaacagacccaaccttcaaatttggatctgataataagcgagagcttgtgttttgatacagttggcaaagatgcagtttttttttttgatagacaccatgcccgcggatctgaaccgtaccactctatctattcttggtgtgttgatgaaagacgtcttaagagagttggagtgtgctacttgagctacacaacatgacattcttttcattcattagcatattcaaacattacat

SEQ ID NO: 2801 - DNA, 882 bp, Zea mays
  Clone ID: 700224028_FLI
ctgatcctagggtcgtcttcggtggcgcggaagcacatcctcgaggagatggggctggagttccaagtcatgactgctgacatcgacgagaagagcatcaggagggagaatcccgatgacctggtaatggtcctcgcggaggccaaggctgatgctatcatgtccagattgaacattgatgattatcagaaagaaggcagtcaaccaacactcctgatcacatctgacatagtggtcgtccatgaagggattattagagaaaaaccaaccaccaaggaagaagcacggcaattcctgaaaggctattccggaggtcacgtgtcaactgttgggtctgttgttgtaactaatcttacaactgggaagagacttggaagtttggacaaagctgaggtttatttccacgatataccagatgaggtcatcaagagcttgatcgatgagggagtagtatttagggtcgcaggtggtttgctgcttgaacatccattgacgctgccgtttgtcgaagcagtggttggttctagtgacagtgtcatggggctgtcaaaggaggttgcaaacaagttaattcacgacgcactgtctacttagcgtagcaatttcagcactactgtttctgatcaaattcttactgcactcacctggagatgtgatcaagcagagagcatatctggggatacccatagtgattcatgtatttttaaacgttaaaccaagacaggcgcacctggcattgcaaattgtgatcaggttgtacttgccttctgtttcacttgaaggatacgttgatgcttcttttagtgggtcagttggtatgatttgtaatatactgatatacataatctcgtctctgatatgtgactgttcgttgcaattgct

SEQ ID NO: 2802 - DNA, 1107 bp, Zea mays
  Clone ID: 700224031_FLI
gatacgggcccttgctctcctcggcccaccgatccacgccccgcacgcacacgacccgcagaccgcaccctgtcggcgagctcgctcccgttcccgtccgctgctctccgctcgacgccgccgtcttccgcgcagctagtgtctacactcccggcgacgatggcggaggacttggttttggacacggcgatccgagactgggtcctgatcccgctctccgtggttatggtcctcatcggcgtgctccgctactttgtctccaagctcatgcgctccccggcgacctctccgtctcccgaccccaagctcgttaaggaagggcaggtggtcatcagggcgaggaacctgaggaccaacgcacagttcatcccggccaaggctttcaaggcacgcaaggtttattacaccaacgaggaaaatggattacttcatgttccaaaggaagacgcgcagaaggctcaggcagccatgttttctgatccaaacatggccatggacatgatgaagaagaacctatccatgatagttcctcagacacttacatttgcatgggtgaactttttcttttcaggtttcgttgcagcaaaaatcccctttccattgactcagagattcaggggaatgctgcaaaatgggattgacctgagcactgttgatgtcagctatgttagtagccggtcatggtatttcctcaatttattcggcttgaggggtcttttcagtctgatccttggtgaagaaaacgcaactgatgatgcacagaagatgatgcaaatgggtggtggatttggatttaacccaacaatgagtttgggagcagagaaagacagcctggatatcatgcagcatgactgggctctacctaagatggagcggcacgcagaagatgtgttgaaacagttgctgaagaaatgactcgaacggttgggcttctgggaagcaacactcgcgtcgcgtcttccagtttttgttgaagccagtttggaccaggaattttaccatttctaaatgtattatttataactagctactataacacccttagaaggtggagacccggtgttgtgatacttaatataagtagaaaaaacgtaattctgttacttt

SEQ ID NO: 2803 - DNA, 2468 bp, Zea mays
  Clone ID: 700224048_FLI
cattctacacgcgccgccgcactcctgtacacgccccgccgccaccgcctccaccaccacagcgcgcaggaatccctcgttctctgagggtttcaggcgtcgtatgtaagagaagatggcgctctcagtatccatggagggcatcgaggcgcgggcgcgggatctcggggtggacctctccgctgtcgatctggactccatcaccctcccggccggcgaggacttcggcatcgtcagtgatgacgaggaggtacttcgtggtgaggatcttccagaacttgaaatgggtttgtccaacattattgtcgtggacaatctgccagttgttcctccagaaaagtttgagaagcttgagaatgtcatacgcaagatctacagccaaattggagcgataaaagaaaatggtctatggatgcctgtaaacccagagacaaagaagacatacggttactgtttcattgagtatagtacccctcaggaagctgagctggctagggaaaaaaccaatgggtacaaactcgacaagtctcacatctttgcagtcaatttgctcgatgatttcgagaagtacatgaaagttcctgacacatggacccctgctgaaattaagccatacactgctggagaaaatcttctgaagtggctaactgatgaaaaggcccgagatcaatttgtcattcgtgctggcacactaactgaagtttattggaatgatgcaagaaagctagcacctgagcttgtttttcaaaagcagtactggacagatagtttcattcagtggtcccctctgggaacctacatggcaacggttcataggcagggatcacaggtgtggggcggtgaaaatggcttcgagcgtttgatgcgttttgctcattccatggtgaaactgattgacttctctcctggtgagaggtatttggtcacatacagcagccatgagcccagcaaccctagagacacacatagagttgtcctgaatatatttgatgtaaggactgggaaagtgatgcgagactttaagggaagcgctgatgattttactactggcgggaatattggggtttctggtgtttcatggcctattttcaggtggggtggtggaaaggatgacaaatattttgcgaggcttgggaagaatataatatctgtatacgaaacagatacattctcccttcttgataagaagtctctgaaggtagaaaatgtagtggacttcagctggtctcccactgatcctatcatatctctgttcgtgcctgaaatgggtggtggaaatcagcctgcgagggtgagtctagtgcaaatccctggcaaagaggagctgcgacagaaaaaccttttcagtgtcagtgattgtaagatgtattggcaaaacagtggagaatatcttgctgttcaagttgatagatacacaaaaacaaaaaagagcacctacactgggtttgagctgtttagaattaaggagagggatatcccaattgaggtccttgaactcgagaacaagaacgacaagatcattgcatttgcatgggaacctaaaggacatcgctttgctatcatccatggtgatggccctaagcctgatgttagcttctacaccatgcgaacttccaataacactagccgtgtatccaagctcacaaccctcaaggccaagcaagctaatactctgtactggtctcctgctgggcgcttcatagttcttgctggactgaagggtttcaacgggcagctggaattctacaatgttgatgaactagagacaatggcaacaggagagcattttatggcaacagatatcatgtgggatccaactgggagatatctcgcgactgcagttacctcagttcatgaaatggagaatggctttcaaatatggtccttcagtggcaagcatctttacaaggtgtcaaaggatcatttctatcagtttatatggcgcccgagaccgccctcactactgacggccgagaaggaagaagagatctcaaggaacctgaagaagtatagcaagaagtacgaacaagaagaccaggatgcattcaatcagttgagcgagcaggaccgcaagaggcggacacagcttcaggaagaatgggactcatgggttgccaagtggaagcagatgcatgaggaggagcgtgcttacaggagggagctcagggatggggaggccagcgacgacgaggaagagtatgaggccaaggaagttgaggtggaggaagtcgttgatgtccgtcaagaagttcttgcattcgacctagatcaggagtgaaaacacttattatagaatctgttgatttctttcctgttggtgttaaagttcattggggtcgcattgcataataggccctagtgatcaagtgcgcaatttactgatcgttgtactgcttatttgtacacttgctgcttgaattgttggatcatgtgtttagatatcaaattttgctgctggattactaatc

SEQ ID NO: 2804 - DNA, 1459 bp, Zea mays
  Clone ID: 700224086_FLI
gctcgttcgatctgtgcagcagatctgaggtcccgggcgaccgtgaagcagcttcaatcgtcggcatggcgctcgtattgcatagtggggctggaaacaagaatgccttcaaagcacttattgctgcagaatacagtgggatcaaggttgagttgaccaaggattttgagatgggtgtctccaacaagacccctgagtttcttaagatgaacccccttgggaaggttcctgttctggagactcctgatggccctgtttttgagagtaatgctatcgcacgctatgttgctcgcttgaaggatgacaaccctctttttgggtcttcccgtattgaacaagcccacgttgagcaatggatggattttgccgcaacagaagttgatcctggtgttgcatggtacttgtatccaaggcttgggtacctcccttatgttagcacaactgaggaaacagctatttcttcattgaagaggtcgcttggtgctctgaacacacaccttgcttcaaacacataccttgttgggcatgctgttactctagctgacattgtaatgacatgcaacctctaccatggaattgcacggatcttgaccaagaccttcacgtctgatttccctcatgtcgagaggtatttctggaccatggttaaccagcctaacttcaagaaggtcattggtgaggtcaagcaggcagagtctgcacctcctattccgaaaaaggctgctccttctaaggagccaaaggcaaaggatgtcaagaaggaggctccaaaggaggcccccaagccaaaggtggttgaggcaccagcagaagaggaagcaccaaagccaaagccaaagaatcctcttgacttgctgccaccaagcaagatggtccttgatgactggaagaggctatactcaaacacaaagactaacttccgggaggttgccatcaaaggtttctgggacatgtacgacccagagggctactctttgtggttctgtgactacaagtacaatgatgagaacaccgtctcctttgtgaccctgaacaaggttggtggattcctgcagcggatggacctgtgccgcaagtacgcctttgggaagatgctcgtgataggctctgagccacccttcaagctgaagggcctttggctcttccgtggccaggatgttcccaagtttgtaatggacgaggtctatgacatggagctctacgagtggaccaaggtggacatctctgatgaggcccagaaggagcgtgtcaatgcgatgattgaggaccaggagccctttgagggcgaggccttgcttgacgcgaaatgcttcaagtgagtgtgcttgcctggagacagaactgtttagcccttgaatttgcctatggaagagtttgcccttttactagtgtcgatgttgatctggtataccttgctatgaactggttaaagtttgtgctggtttgggattttttgtgc

SEQ ID NO: 2805 - DNA, 964 bp, Zea mays
  Clone ID: 700224123_FLI
atctgtgcaggcaaactcttccaagacgccgggcggcgagaggctgggtagggagaggtcggaatcttgcgggaggaactggctggaccgctgggtggaggagaggtacacggacgacgagaagaacgccaagattctcgaagtggacaacggcaagccagggcggcacggttccaagcggcgcggcggcaaccatcaccagtcgccgtgctcgacgatgacctccgagcagaacagccggagctacgcgaccatgccggagtcgccgtccaaggactcgacgaccgcgcagcaagccgtgccgagcccgtcgtccgtgggcatggctgccgaggccctgagcccgctgcgcgtgccagcggacatcgccgagctctgcgacagcccccagttcttctcggcgacgtcgcggcccgggagctccaggagggggggcgcgttcacgccggcggccaagagcgagtgctcgcgcagcctcttcggcggctactccgactgccccaactacatggcgaacacggagtcgttccgcgccaaggcgcgttcccagagcgcgcccaagcagaggccgcagcagcagtacgagaagtcgggctccctccgcagggcgtcggcgcacgccctcgcggcggggccggcagcggcacagaggtcggtggcctcgttgcacgccatgaaggcgtatccgggctccggcagattggaccgacttggcatgccggtcaggtactgatccggatcctacctagctcgcttcaggataatgtggtgctgcgcctgaactgattgatacccagtgtctcaactcaagcgatgaggatgaagtgaattctactagtggtcgttattagatcttgttccttcggtggtgcctattaccgtcaacagttttctgtttgttgctttgtgtagcgaagtgtaagttgctggtacgtagctggtaatactatgcgtgcttaaccgc

SEQ ID NO: 2806 - DNA, 1328 bp, Zea mays
  Clone ID: 700224128_FLI
cttcaagaaagctccaagatcaaccagtcattgtttgcgttgtccaatgtcatttcagctctaaataagaatgagcatcggataccatatagacagagtaaactgactcggttacttagagattctctaggaggcggtagccgcactgtgatgatagcttgcctgaatcctgcagaataccaggagtcggccaacacagtaagtctggcggctcgttcatgccatattgagaatttcaccagttcaagcaaacaagaaactcccaaacttaagatcgacatggaagccaaattacgagcatggttggaatcaaaggggaaaacaaagagcatccaaagaatggatggtcttttctccccaattgccagcaagactccattgtctgtgagccatatgaagcaaccaacatcttcaagaattccttgtagagttaaggcaatggatcaggatggtggtaaaatcaagaagatactttttgatccagtagtccatgttcccactgaaaatataccacgagagcacaggcagacagaagtaaatacaccaaagaaagtggtgcttccttcagttactccatgcaatgaaaaacatgaagcttctctcaggaaagctctttctccaatttcttcaaacatggtgcctgtagagcagcaaatacctgataatggcaattgccccgttttattggagccccaaactccaatagaaaaacgtaatatagtcgaggagactcctggtgcaacaccactagagagatttaatgcactagggtctaacctaaaggaagctctagttcagcagtaccttgaccttttaaatgttgcaaacaaggaagagctacagcagctgaaaggaattggcgcgaggagagcagaatatattctggaattacgggaggactcaccaaaaccattcaaaactcttgaagatttgggaaacatcggcctctcgtcaaagcagatccgagacatccttaagaagacggccactgggatcttcaaatgacgacctcaatggatgatgatgtattggcgctagacattcataggtgtaacagctaaatgactggcttgtgttgctgacggagaagttagttcaatgtttgtgttggtgacttcaggcagtgccctgctgctactttcaactagattcccttgattgtgtgtagaattgcagttgaagtgttgaacaagtaaactatcggagttgtgatgctacttttacgtccaggggagtttttatggaacgagctattcgaacattttatatgatgaagtggagcatcagttttgctcatttgaataatgataacaagcagagtttttatc

SEQ ID NO: 2807 - DNA, 1095 bp, Zea mays
  Clone ID: 700224150_FLI
aagctcaattaaaggaaaagtatcagttgcgcttaaaagttttagaagatggcttgaggggcactccaagtggatcttgtcgtcctcccatggaaggaaaatgtataagtaatggacctccccgtcgactttcactaggtggtgctgatagtatatccaaaatctctccaaacggtgtgttaatgaggaggtctccatctttcaattcaagatcctccctctctaccagcagttgtttggtcctgaagcatgcaggaagaacttcaaagtcatttgatggcggtaccaggtcattagaccagggaaaagttctggggagtggacctcattcactcaatagatctacggatgcagttagagattgtgagacagctgatagttggaaggctaatgcagaagaaaaaagtaatgaaaccgcaaacaatgattcagctgacatggtctctggtgtactctatgacgtgttgcaaaaggaggtggtttccttgagaaaggcatgccatgagaaagaccaaactctaaaggacaaagaagatgcaatggagatgctagcaaagaaagtagatacattacataaagcaaaggaagtggaggctaaaaagaagaggcaagagatagctgctttggagaaaaaatttgccgcggtgtgccttgaacaagaacggcttggtaatttgagaggacctggaacttctcagacggtttcgggaagaactgcatcacgaggtggattgacgcgcaacctccaatagcatacatctaacttcaggcaggcatggaattcgtccataggcttcatttccattgtatttgttcccgtgttcttattcgttttgtgatcaaatagcacagatgaccctgcgatacctagatgaggggaaagagtaggttttcatctgacatgacttgcttgtagtgaaggtaaatccttcggtcggtgaggtttaaccttgcgccccgccctcattttgtggaggcagtgctgtagtggctgtataggttggacgagcctgtgcctttctatatgtagggtgaggtactgtgtttgtgttgcatcttgcatgttcgggttgtgaatatatcattgtattctgc

SEQ ID NO: 2808 - DNA, 2124 bp, Zea mays
  Clone ID: 700224151_FLI
agagagtggctcttgcgctctgcagtccagttcttgaatccagagctgcgattcgtgctcgcctgacgccgatgggccggagcctgagcccgctgctacggcaggagctggacaacctggacaaggacgctgacagccgccgcgccgccatgaaggcgctcaagtcgtacgccagacacctggactccaagtccatcccgcacttcctcgccgaggtctccgacaccaccgcggccggcgccggcgccggcagcggcatgcccaccggcggcgagttcaccatctcgctctacgaggtgctggcgcgggtgcacggccgcaacatcgtgccgcagatcggcaacatcatggccaccatcatgtgcacgctctcctccagcgggggctccttcccgctccaccaggcctgctccaaggtggtgcccgccatcgcgcggcacggcatcgacccctccgcgcccgacggggagaaggccggcatcatcgcctccctctgcaggccgctctgcagcgcgctcatgggggggagctaggacggcggcgccgcctccggcgcggcgctgtgcctgaaggcgctcgtcgagtccagcaactggaggttcgcgtccggggagctggtgaacgaggtctgcctcaaggtggccggggcgatgcacgacagcgcgacgcggtcgaacgcgcacatgggcctcgccatggccctggtgaagcacaacggcctgatcgcggaggcgtacgcgaggtccatcgtgcgctccgggctgcagatccttgatggggacacggcggatagcagctcccagaagcgcctctcggcgatccagatgatcaatttcttcatgaagttcgttgaccccaggtgcctgtcttcagagcttggcagggtgattgatgtgatggagcggtgccagaatgaccgcatgcctttcgtccgaggtgctgcgtttgaggcatcacagagtgcgaggaacatcgccgcgcagaagggatcaagacatgaggttggcacgagcccgatggttggctccaatttccacaagagaagggagaagagcccatgccggagcctctggggtgccaagcgcagccctgcagcctccaccatggctgctgcttctccagtccagttcagatccccggaatcgcaggttgtggattcatccatcatgaacggcagcacgctccacgactcaccggtctcagtcgggcagtcctcttgcaactttgatcagagtcggcgcacgaaccggaggttgtggagcaatgatgccgttgatgtttctctgaaggatggcttgttcattcagctttgctcaaacagcaattcctatgaagatgacttgggcgaggtctgtgacagtgaagtgactgatgctaactttgagtgtaccaacacatttgcagggtttgtgtcaccaagccacaatggttccatatcaagggacaagactcccagtcccagggcttcagacaggccgataaatattgatgacgtgaagatatactcaacaccaaggaagcttctccgattgcttcaaagctcatacgactctgactctgctagcaacatcggacagtccactgcaaagctcagaggcttgtcgtcaccagatcaggaacacaagggactagtgatctcatctgaacagatgcaatctctgcattcagacaacaagggtgatgagatgaaagatgagaacgaaaccatttatatgcagaacagcaaaggtcggactcagactctatccaatgctgatgcatcagtactttccactaccgaggctgagaacacatccatcaagacttcccctgaaattgagctcaatggggatgatgtctgtattacaagcagcatagggaagaccaggaagtatagagcaaaattcactttgtttctgagcgtgatcgtgatctttttagcaatcatcaccatgctcatcaggatagagaatgatgatgattcagcgtaccttgtccccacttaatattttgtatgcttcattgctgtctgtttaaattcctatttttattttatcactatagagtggtttgtgttttgaacaattttgcagtcatctatccatgaatgacagcaaataattaaattagaattttcatgctcac

SEQ ID NO: 2809 - DNA, 1020 bp, Zea mays
  Clone ID: 700224156_FLI
ctccactactccacacctagacttcccaatcctccattgggcaacctgtcacacagtacgccgtcgcctgtggtttggtttgtggagtgagagagaaagagagagagagacatagactcggactcggagagaaggagatgatgtcgagggagcgcaagaaggcggctgctcttcaggagaagctgaagatcctccgctccatcactcactcccacgctctgagcaacacgtcgataatcatggacgcgtcggcgtacatcaaggagctgaagcagaaggtggtgaggctgaaccaggagatcgcctgcgcgcaggacgcgctgagacacaagtcatcatcatcctatcccacggtgaccgtggaagccctaggagtgcaggggtcgtcgttcctggtgaacgtgttctccgacaagagctgcccggggctgctcgtcgccgtgctggaggccttcgacgagctggggctcagcgtgctccaggccaccgcgtcctgcgccgactccttccgcctcgaggccgtgggcggagagaacgtggcggacaacgtggacgagcacgtcgtgaagcaggcagtcctgcaggccgtcaggagctgctccgagggcggcagcgagcacgacgacgaggagtagtagctatagcaagaggctgagcgcgcgtaagcacacacgccttctgctacttgcatcggtcgatgtcgtccctgctgctggtgcatagctctggctggacaaccgcgcatgtactcgatcgatcgtcgaccggccggcgccctctctgtgtatggtagtagcagtagctccgtttctcagctagctccccctctcgatctttaattcgattttttttactcttctctgtttcctctatctatctatctatctatcggtggcaaagatgaaacagagccgctgctcctagctgctgatggtccggtgaattcgttcgtagcagcgccaccgtttcctgtgtaatagtattggccggagggcacgccgtgatttacatatttagtat

SEQ ID NO: 2810 - DNA, 902 bp, Zea mays
  Clone ID: 700224187_FLI
gcgtggacgtcaccgtccctgagatcgaagagatgcggctggcgcactacgtgaccatgggctcggagtgcactgcctccctcgctgccaagtacctggacagcatggacaggtccgaggtcgggtgggacgtgcggatcgcgctcagcgcctacgggtccttcagcagccgagactacctcagcgcgcagcgtctccggtaggccagtcgccagccgccacatctacatacatgcggacacatcgaatgcatggacaacgtaacgccattgtttgttctgcgaaaacgacgcctgtagatgccggcagatgtacttccacgagaagatcttcgagactgccgacgccatcgtcacgccgatgacaggggtgacggcgtacgcgctgcaggacgacgcgctgagaacgggggagctggactacatcaacggagctgcgctggtgaggtactcgatcgcgggcaacttcctggggctgccagcgatcaccgtgcccgtcgggtatgacaggggagggctccccgtggggctccagttcatcggccgcccgtggtcggaggccacgctgctgcacctcgcctacgccatgcaggaggcgtgcgggaagaaggtgctccggaagcccaaggtgcactacgacctcctcaccaaagagtagctccagcgagcatcgatccggcagattgctctctatgaggcgcgcggttgctgattgcatgcacctctagtgtgattgattgtttgtttgattgattgagcttgtgatgagagagtgggggaagttgaatggaatgccgtcaatgtcggacaactctcaactaggagaagaaaaaaaaacatggttgccagcaccatgcatgtgcaccaccattcgttttttaatgtcgtcctcattgaaacatt

SEQ ID NO: 2811 - DNA, 493 bp, Zea mays
  Clone ID: 700224336_FLI
gcaagctcgtgaaggtcaaggcttcgtacaagctctcggacgccgccaagaaggcatcccccaagaccaaggctaagccggcaaaggccgccgctgccaagaccaccgcccccaagccggccaaggccgccgccgccaagtcaaagaaggcagcggctgccaagccaaagaaggccgctgctgctgggaccaagcgcaaagtgcccgagaagaaggtcgtggcgaagccgaagaagtcccccgccgccaaggccaaggccaagccgaagaccgtgaagtcccctgcctccaagaaggcacggaaggcctccgcatgagatgggttgctttaggtctaagctctgattgtggttggtgtcagttaggtactgtacaaactaagtgtgtgcccaaagtgtctcaggcggtgtgttatgtgcttagcaagttctatctatcagagtgttttagtttaacaatggttttacctctggcttttgtagtcaggtttctg

SEQ ID NO: 2812 - DNA, 1146 bp, Zea mays
  Clone ID: 700224343_FLI
cacccggcctgtcgtgtcgatctcactctcagggtccggtccggtgcatcatatatacccttggtcgatcgatcgaccagatagatacactagatagctaggattgcattgtgttccaccaaaagccagccacaacacatcgacatgatgcaggacttgttctcggtcccttcgtgtttctcggcgggcgagaagcttccggacgtcccggcgtccgctgcggccaccaccaggtccgggcagagcgcggcgacgctggtctaccgcgcgggaatcgccggccacgaccgcctggtgacggtgacgtggtgcaggaacctgctcacccacgggctgaccgtgtcgatcgaagggtcggcgggcggcggcaaggacaagagcggcggcggcagggagtggggcgacgccgacggtggcgcggcctcgtcctccaacaagggctgcagcaccgcctgcaaggtggagatgcagccgtggcacttttggcgcaagtacggcgccaagcagttccacgtcgacggcagggccgtggacgtggtctgggacctcaggagcgcgaggtactccgacgagcccgagccgctgtccgactactacgtcgccgtggtgtcggacgaggaggtggtcctcctcctcggcaacctcaagaaggaggcgttccggcgcaccgggtcccggccgtcgctgcgggacgccgcactggtgtgcaagaaggagcacgtctttagcaagaagcggttcctcaccaaggccaggttccacgacaggggcaagctgcacgacatcagcatcgagtgcagcagcagcaacctcggcggcggcggcgtcgacgtcgacatggtcatcaagatcgacggctacgtcaacgtcctcgtcaggcacctgcagtggaagttcaggggcaacgagtgcatctccatcaaccagctcaaggtgcaggtgtactgggacgcgcacgactggatctttggcacgggggtgaggaacgcgctgttcatcttcaagcccgagccgctgccgtccgccaccaatgagtactctgatttctgcctgtttctgtacgcatggaagcttgagtgagctaggattcctgttcctgcattatactggacacctcaccatatatgttatgaaccaataattcat

SEQ ID NO: 2813 - DNA, 842 bp, Zea mays
  Clone ID: 700224348_FLI
aaatggagaggcatatgtaaacaccttacttgtagcttgtgtgttagtagttccatttgacttcaatgaggataaaggcagtgcaaaaggtcccaaaggtccaaactctatagtctccggtggtaactcatttttcacttgtttcaatgtgccattgataacttacttgtgttagtatatttttatttcacttgttcaaaaatttttatttcaatgtgctattggtaactcatttttttttcaattttttcagattttattcacttgtggcagccggccgtcgacaccaagcaggccttgagcttgtgacagccgtggtgatcggtcttatcaccagtggtgtcgttagatgccaaatgcagtttgctctgcacggggattttgctttctggtgtctgtcccgttggaaccggggatttcctgagtgacgaatagacttcccatggcagctattatgttgaggatgtgcgaaaggtgcactgcagagtctgagaagtgagagaaataaatgacaagtgttgtttaccgctcacccaattttaaccaatgccacggtgatacgattatctctgctaaaggaataattgtttcaactaaaccaagcaccacagttggaggtcaaatccttggaaggcaatattgtgaagttattataacttgtgtgctaaaacgagatacagttttgcctcgccctggagtgatgtcgctgtggtgcttttgtgactgatcatctctggagcttttgtgaatgatctagctagatatctgtaaatgatctagttgtgaatgatattataattgtgatgcttttgtgaatatataattgtggtgcttttgtgttt

SEQ ID NO: 2814 - DNA, 1204 bp, Zea mays
  Clone ID: 700224356_FLI
gttgttttgcagatgagctcatcaagaatgctgcctacatcggcacccctggcaagggtatccttgctgctgatgagtcaactggcaccattggcaagcgcctttccagcatcaatgtcgagaacgtggaggagaaccggcgggctctccgtgagctcctgttctgctgccctggtgccctccagtacatcagcggtgtgatcctcttcgaggagaccctctaccagaagaccaaggatggcaagccttttgtcgatgtcctcaaggagggaggcgtcctccctggcatcaaggtcgacaagggcaccattgaggttgttggcaccgacaaggagaccaccacccagggccacgatgacctcggcaagcgctgcgctaagtactacgaggccggtgcccgctttgccaagtggcgtgctgttctcaagattggccccaacgagccgtcacagcttgccattgacctgaatgctcagggtctggctcgctacgccatcatctgccaggagaacggtctggtgccaattgttgagcctgagatccttgttgatggccctcatgacattgatcgctgcgcttacgtcactgagacagtccttgctgcctgctacaaggctctcaacgagcaccatgtcctcctgaagcccaacatggtgactcctggctccgactctaagaaggtgacacctgaggtgatcgcccagtacaccgtccgtaccctccagaggaccgtccctgctgctgtgcctgctgttgtcttcctctccggtggacagagcgaggaggaggccaccctgaatctcaatgccatgaacaagctcagcaccaagaagccatgggccctgtccttctccttcggccgtgccctccaggcgagcaccctcaaggcctgggctggcaaggtggagaacgtggagaaggctagagcggccttcctcgccaggtgcaaggccaactccgaggctaccctcggcacctacaagggtgatgctgccgccgacaccgagagccttcacgtcaaggactacaagtactgagttgcttctctttgcgatcccgttgttttggaactcctgcctgcgagtaggttgctgagtgttgtttgcttgttagagcttttatattcggacatgaaaaaaacatgcttcctatgtggatgatggttatctttatattcgtatattaactactagtctctgttgtt

SEQ ID NO: 2815 - DNA, 1349 bp, Zea mays
  Clone ID: 700224362_FLI
cgccgaccgccgtcctcactccctgcccccccacgccgccacacgaaccacctcagctccctgcgccactaccctcggcctgccgccgcacgcctcccgcgctgtcgttgtcagccctccgctccccgagacgccgcacgcttcccgcgctgtcgttgtcagccctccgctccccgcgacgccgcccttggctttctgcccaccgacgtatcgacagcgccgcgtccgccccacttttccgttcgatttggtgggccgaggtctctcgctcgtggagtcgtagtacagcgcttcccgcacggcgatgtcggcgacgccgctgcccccgccgggccccgatggcgcggtggcgctcctgcctccgccgggtacggacatgactgggatctgcttccgcgaccagctgtggctcgacacttacccgctcgatcgcaacctcgtcttcgactacttcgcgctctcccccttctacgacatcacctgcaacaacgagtccctccgatcgcgccaaatccaccccctcgacatgtctcatctgacgaagatgaccgggatggagtaccttctgagcgaagtgatggagccgcacctatttgtgatccggaagcagaagcgggagagccccgagaaatctagccccatgctcgcctactacatccttgacggctccatctaccaggcgccacagctctgcaacgtcttcgcctcacgcataagcagggctatgcatcatatatcaaaagcctttaccatagcatgttcaaagttggagaagattggaaacgtggaaaccgagcccgatgcagtagcctctgaatcaaagacccaaaaggaagcaatcgacctgaaggaactcaaacgaattgatcatatcctgtcatccttgaaacggaagataggggctgctcctcccccacccccttaccccgagggctatgtcccaccatcagcagaacaagagaaagcgccggatgatgtggcagcatcagaggcaccgcctcaacttgaccctatcattgatcaaggtccttcgaaaagaccaagattccaatgaaagatttgtagcttaaacctgctgactcgacaacttcctgtatgctttaaagtcgccgacgtggactttataaatccattcttgctggttggttatttacaggccaaagacagaactaacctcgtggcatgatatctcgttctctgagttactagcttgaatcttgtagattggccagtgccatttgctccgggcttgtaatcttgtagataggccagtgtcatttgatctggtctatctacttagctatcataacttatgaggtggttatagttttgccttggtgcaaatctgc

SEQ ID NO: 2816 - DNA, 978 bp, Zea mays
  Clone ID: 700224368_FLI
aagaagctattcaaatctctgccataaaggagatactaagtgaccgtgtggaccagaaacaagtcctcaatgcaacaaaaagagagaacaccagaaaggacaaacaagagaaaaatcttaacactgaaattgccatgaaaagtcaggagaatcagacagatgatgtgcaagttggtcatgggggtgtagatgagctggttaggagaaaagaagaaaatgacaagagcaatatttctcggagtagaacagaagggaaacgacacttggtacagcaccttgagacggagattgagaaattatccatccgatccagcccacttggtaaagacaggcagtacaataggtactggtttttcaagcgtgaaggaaggctttttgttgaaactgcagattccagagaatggggttactacaacactaaggaagagctttgaaacggcaactagagaagttttacagtaagataagtaatgccctagagaaacgatcaaaagatatcgcaaacaggatgttacttgaagagggtgtactgcggcgttccacacgtgtccgggctcagccaaaggacatggcattcctcaagtacgtcaacaagtggaaggataactgaggtggcggtctgccagcggtggtggtggtctgccagcggtgggaggataacttgagccactgggtgacagggtttgcagtagatgtgtttggtttgaggttaaagtgggatgggacgggggcgacaccgtcctctcaattttttaattttttgggatcacgccgctacaaaaaaactactctggtgtttacctcgtccctacgtgactcccatttaaccactggagtaactgtgaccgtcccatttcatcctttcgtatacttggttaggtcgtcacagtggttcgccatactcgtcgcattagctaatgaaaactgtactagaacctagttttcttccctttgctactgaaatgaacactggttcac

SEQ ID NO: 2817 - DNA, 693 bp, Zea mays
  Clone ID: 700224379_FLI
ctctctttctctctctctcttcgacgactccgccgctgtcttccactcgggggccgccgtccctgtcgtcttccgcccatcactgtcttcttcgctccaccacacttgggaaacgcagcgatggatggccagccaggtgctgctgcgttgtcgagtcctggtccgagagtaaaagcaagcctggttctgggatccgaatcgttcgctatcaactccgagttcggtaccctgtcggagcagctggccgcggtgaaggagaagagcatggcggtcctcaaggaacacatcgccaggcacaatgctccgaacgaggtccccgacgaggccgccgagggcgagtctgacagtgagggcgaagcgccgcttgtcgacaacccgccgaagaaacctaagaagcagaagtgaccgtctctagtcatgcacttgactttttttttttttgccatgcgttgcttgtgtaacgccagactgttgtcagtcacaatagcaatatgcaggtgttagcactcacttgctgttcgtaccactatcattagttctgcttctctgtcatgtgttcatatttttcttcccatacacttgcaagggtgttcttgtctgtcggtgtgctgcacgctccgtatatctgtagcagaaacacaattcactaacagcttggtttgaggaatgggttagcctatcatcttctcagtc

SEQ ID NO: 2818 - DNA, 2904 bp, Zea mays
  Clone ID: 700224433_FLI
tttccttctaccgcagcctcagaattcccccctcccccgtagcgaaaccctagccgccacgccaaaaccaaatcccgccgagcccgaaattttccggcgggttccttgccgcgaatcgattgatttcgagcgattcgactcctttgtgatctctcggcggggtagagcgcggtcgaccgtcggccatgtcgaggtgcttcccctacccgccaccggggtacgtgcggaacccagtggccgtggccgagccggagtcgaccgctaaggtttgttgaaccttcggatttacacacgcacgtgccagatcgtttgttcaatctgtaggttttgcgcggatctgtggtttgcgcgtgcgtgatgtgggtattgcccgtgccttgaaagctaaccgagctgaggaagtgtatggatcttgtgtagctgcacgaggtcctccaaatcgattgtaaaatttaagttgtatggccggtaggccaagattgggttattccggttttcgaaaactggtagcatggttatcggggacattgaaagaatggtagaacatcaaattcgattcaaaactgtgctagatttgcatatttagtcgccctaaaattacgtggacgtgggtgatccgaattggttgttgtatgatggttggaagtgactggccaaatttttttgtttctcaaagttttctttgacaaactgtttgtcgagcgtcaattcgtatttacctgaatttactaattcttaatacagtatgtcgttattttgggctaagcttgtgtaagaagggtcgtttgacattttgtactgtattgatgctgttttgtgtttctttgttcggagcagcattcaatgctccttttgttgtttgagagaatctgatatttgccatcgtaccgaaagtccgaaaccaactattcaaattgggatttcatttctttttttttctactgtttttagagttctctttttcgctgctgtgctcttgtgggtcagtacgtgcatttctctttttttcttttttttctgatgttactcttctgttgaccaaaggagttcagaattattttggccctgtatatcaatagcaaccaacaccatttattgagcccatttttagttttcttgttctgtagagtatgcattgttgcaggtcttaactgttgtcagggaagtaacgtgttcaacatgattgtaaacgaatacaattctgttgctaactgtgtaatgatgagaaggataattgaataatctttgtgaagtattactgtctgaactgtacgcaaatgctacattcattctttgtgttcgtgtaaatatcattatacataaaaatgctgcattgcattcccgtcgtccgttctaaatcagaactgacgattgctctggtggctgaagctcctgaaagaaaaggaaaaggccgaaaagaagaaagagaaaaggagtgacaggaaagctcccaagcagtgtgagacgtccaaacattcaaagcacagccataagaagagaaagcttgaagatgtcatcaaagctgagcagggtcccaaaagagtacccaaagaatcagttgagcagttggagaagagtggactctcagaagagcatggagctccttcttttgtacatacgatacgtgactctcctgagagctcacaggacagcggcaagagacgaaaggttgtcctgtccagtcctagccaacctaagaatggaaacattcttcgcttcaagattaaaagtagtcaagatccccaatcagctgttctggagaaaccaagggttcttgagcaaccattggtccaacaaatgggatcaggttcatccctgtcgggcaagcaaaattcaatccatcataagatgaatgtgagatctacctctggtcagcggagggtcaatggtgactcccaagcagtacaaaaatgtttgattacagaatccccggcaaagaccatgcagagacttgtcccccagcctgcagctaaggtcacacatcctgttgatccccagtcagctgttaaggtgccagttggaagatcgggcctacctctgaagtcttcaggaagtgtggacccttcgcctgctagagttatgagaagatttgatcctccacctgttaagatgatgtcacagagagttcaccatccagcttccatggtgtcgcagaaagttgatcctccgtttccgaaggtattacataaggaaaccggatctgttgttcgcctaccagaagctacccggcctactgttcttcaaaaacccaaggacttgcctgctatcaagcagcaggatatcaggacctcttcctcaaaagaagagccctgcttctctggtaggaatgcagaagcagttcaagtgcaagatactaagctctcccggtcagacatgaagaaaatccgcaaagctgagaaaaaagataagaagttcagagatctgtttgttacctggaatccggtattgatagagaatgaaggttcagatcttggtgatgaagactggctgttcagcagtaaaaggaactccgatgctatcatggttcaaagcagagctactgatagttcagtgccgatccatccaatggtgcagcagaagccttctttacaacccagggcaacatttttgccggaccttaatatgtaccagctgccatatgtcgtaccattttaaacatctggcgaggtagatgagaattagatgagatgttgggagagagctgtgtggatgtgggagataatgggttccctgccgcagttttccagctttgttccatagtgtttctttgaggccaatagagttctggcagaatttataatgtaatattgattaattatttcgctcatgtatgtaagcagttgaactgcaaaatcttgtttctaggatgttactgttttatgacacgcagtatttgttatattg

SEQ ID NO: 2819 - DNA, 766 bp, Zea mays
  Clone ID: 700224449_FLI
ctcatggacgaggaggaccacacgcggatcgtgccccgcaagtgctactgcttcctcgccttcctgctcggcttcgtcgcgctcttctccttcttcgcgctcgtgctctggggcgccagcaggtcccagaagccgcgcatcgtcatgggcaccatccgcttcgacaacttcatcatccaggccggcaccgacgcgtcgctcgtgcccaccgacatggccaccaccaactccaccgtcagattcacctaccgcaacaggggcaccttcttcgggatccacgtcaccgccgacccgttccagctctcctacagccagctcacgctcgcgtcaggagacctccacaacttctaccagcctcgcagcagcagccgcaccgtcagcgtcgccgtggtcggcaacaaggtgccgctgtacggcggcggacccacgctgacggcggcgccggcggccgggggcaaggggcagcagcaggccagcgccaaggtggcatcggtgcccatggtgctgaggaccacgctgcactcgcgggcctacgtgctgggcgcgctggtcaagcccaagttcacgctcgccgtcgagtgcagggtgctcatgaacccaaacaagcagaacaagcccatctcgctcgggaacgcctgccactactcatgatatatttagcctctcatactagctgctcaacatcaccatgcccatgcatccatctcctacctacctctcaattgtactgtaatggagtatttattgatttatttatgctttgctt

SEQ ID NO: 2820 - DNA, 1203 bp, Zea mays
  Clone ID: 700224462_FLI
attatttcaggttgctaatgcaatggctgctaaagcaaaacttgtactccgtgaactaaaatctgttaaagcagatctagcctttgcgaagcagcgatgcgctcagctggaggaagagaacaggctcttgcgagaaacaaagcagaaagggagcaaaactgaagaagacgatgacttggtaatcttccccccccccccctgatcaaacgtatctgttgtcaggttcaatgtctttttcgtggattacatgcatataccttggccttcaattcatcaacaacattccaataggtgataactcgtcaccagactgacaaaaagaatattagtacatgtgaatctttaaattaaattatataagttgctgttaatatccattcctcttttgaaattcagcattacataaatttagattcatatgaaacaatagtatatggtcatgattcatgaaaaattttggcccggtatcttgtcggtactgtcgcttgttctttaacaacacctaaagagtatcactgcatcctctgaaatgcggtatataaaacatggtcatgtgcttgtgaaccaacgagtgcaacctgttctccgtatctattgaaatagtcatctattgaaatagtcgtcactctgaactacccattgtcgaatcagattcgcgtgcagctggagacattgctgtccgagaaatcgaggctggcgcaggaaaactcgacgtatgcccgtgaaaaccgcttcctgcgtgagattgtggacttccatcagttcaccacccacgacgttgtctcattggatgacggcgacatggaaggcaccgaaccagaagaagacgacgacaacgacaacggcctcatatgtgctgagaacgtgctgcctgcggttgaagaaaatccagtagacgaagaacactgccctgtcccctccaagctagaatctccagtggccagcctgggcgagccatcatcatcccccaggtccagcgattgtcacagtgcctcaaagccagacgcgtcagcgtctgatgtagcttgatgatgcatgcgacattggtgactttgccatcttgtttgtggtttcagttggcgttggttgtgagtgatgcatgtgtgtataatttttttgtccattgtccacattggattggtttgtagcatagttacaggtttctgcttttgtatagagcatatagtgctgtgttttgatggg

SEQ ID NO: 2821 - DNA, 1069 bp, Zea mays
  Clone ID: 700224470_FLI
ttagctccactccagctccaatcacagtcgtgaccagagcgcgagagctagctagagggccgtgaaaatgccgatcaataggatcgccctggggagccaccaggaggtgtaccacccgggcgccctcaaggcggcgttcgctgagttcatctccaccctcatcttcgtcttcgccggccagggctccggcatggccttcagcaagctgaccggcggcggcccgacgaccccggcgggcctgatcgcggcggcggtggcgcacgcgttcgcgctgttcgtggcggtgtctgtgggcgcgaacatctccggcgggcacgtgaaccctgccgtgaccttcggcgccttcgtgggcggcaacatcaccctgttccgggggctcctgtactgggtggcgcagctgctggggtccaccgtggcgtgcttcctgctccgcttctcgacgggcgggcaggccacgggcaccttcgggctgacgggcgtgtcggtgtgggaggcgctggtgctggagatcgtgatgaccttcgggctggtgtacacggtgtacgccacggcggtggacccgaagaagggcagcctgggcaccatcgcccccattgccatcggcttcatcgtgggggccaacatcctggtgggcggcgccttcgacggcgcgtccatgaaccccgccgtgtccttcggccccgccctcgtcagctgggagtggggctaccagtgggtgtactgggtcgggcccctcatcggcggcggcctcgccggcgtcatctacgagctgctcttcatctcccacacccacgagcagctcccctccaccgactactaaaagccgaagccgaccgacctaggggtgcgcagcgcagctagcgcatccagctctctctccccgctcgccgccgtttagtttctctcgtgcacgtgcatgcatcgtcgactgtctcaggccgccgctgcgccggcgccgctcgcatcgtttgcttccttggaccagcagtcgtcgccgtcaggctgaactgcttgtaaccgtgaattccggacccgtttgcttctgtaagatttgtgcatttgcctgagt

SEQ ID NO: 2822 - DNA, 1284 bp, Zea mays
  Clone ID: 700224494_FLI
gcacccagtctcggcgcctcaccccccaaaatcctctcgcggtcgcggatcgctcttccctccccctcttatctctttctcttctcccattccttccttccactcccccgcccagcgccaccatggcctcctccgtcgcggtgtccctccgcgccctcgctgccgccccgctccccaagtccagccccgccacttcctgccccttcttcgtgctccttgcgccggcgctgccccgacgcctgctccgcctccgctccgcacgccgcctgccgctcgccccgctcgccgcctccgattccgccttcgagtcctccgtcggagttaactacgcggagcccgacgactcggagaaggataaggaggtggagttgttcggatcgggtgacgacgagggggcgggtgagttggtggatgaccattccgtagaggtctcagccgctgtcgaggacgaggtggaggaggaggtcggggagtacgttgagccgcccgaggaggccaaggtctacgtcggaaacctgccctacgacgtcgacagcgagcgcctcgctcagctcttcgaccaggccggcgtcgtcgaggtcgcagaggtcatttacaacagagaaacagatcaaagtcgtgggtttgggtttgtcactatgagcactgtcgaggaggctgagaaggctgtggagatgttccatcgctatgatgtcaatggaaggcttctgactgtaaataaagcagctcctagaggctctcgtgtggacagacctcccagacaatctgggccttctctcagaatttatgttggcaacctgccttggcaagtggatgattctagattggtggagttgttcagcgagcatggtaaagtagttgatgccagagttgtctatgaccgagaaactgggcgttcgcggggatttggttttgttactatggcatcgcaggacgaattggatgatgctattgctgcccttgatggacagagtttggatgcccgtgccttgcgggtgaatgttgcagaggagcggccccggcgaggtttctaatgaggttgtatcgggtggactgcacgcttgttccatgggttgggagcatcatagcatgttctgatactggtttagacctgccattctctttccttgtgttgctgagcttctatcatcgtgtcttattgtgaagggggaactcttccctaatattttgttatgtacttgttgtgttcaaaagttcttgtactgtaggctactgttatgatgcccctagctcaatttgtcgatgcaattcgaaattttgtct

SEQ ID NO: 2823 - DNA, 1539 bp, Zea mays
  Clone ID: 700224574_FLI
gcagagaccatgaacatgcatgtgccagctgccagggtttacagttgttttgattctctctgtcttctgtttccacagcggatgttgccggccttcgccgcgtgctgcacggacctggtggagaggtgggaaggcctggtcgcggatgggcagcagccgtgcgaggtggacgtgtggcctgagatgcagaacctgacgggggacgtcatctctcgcgccgcgttcggcagcagctacctcgaaggcaggaggatcttccagctccagggggagcaggtccagctcgtcgtccaggccatgcacaagcttcacatccctggatacctgtacctgcccacgaaaaccaaccgaaggatgaagcggatcgcgtcggagatccaggagctcctcaagggcatcatcgccaagagagagaacgcgctgagaaccggcggcggcgcggcgagcgacgacctccttggcctgctcctggagtccaacatggagcactgcaggggtgacggcggcaagtccaaggcctccggcatcaccaccgacgacgtcatcggggagtgcaagctgttctacttcgccgggatggagaccacgtcggtgctgctcacgtggaccatggtcgtgctctccatgcacccggagtggcaggaccgggccagggaggaggtgctccacgtcttcggtgacaggacgacgccggactacgacggcctcagccgcctcagaatcgtgacgatggtgctctacgaggtgctgcgcctgtacacgccgctgacggcgctccagcgccagacgtacaagccgatggagctcggcggcgtcaggtacccggccggcgtgatgctgatgctgccgctgctgtgcatccaccacgacaaggacgtgtggggtcccgacgcgagcgagttcaggccgcagaggttcgccgagggcgtctccagggcgtccagggacgcgccggccttcttccccttcggctggggcccgcgcacctgcatcggccagagcttcgcgctgctcgaggccaagatggggctctccatgatcctgcagcgcttcgcgttcgagctctcgccggcctacacgcacgcgccgtttgcacacggcatgctgcagccggagcacggcgcgcaggtcatgctcaggcgcctcccctgagacgatgatgcatggcccgggcggggttaggttatttgatttgatggcttcatgtgtgcatgtacagcatatatatgtactacgtagtagatgtaaatcatgcaaggaactacacttgcaaggcgcgcttgtgaaaagttgattgcctttctagttactgatgagatgtatctcagttgttacggctggttgagataggcagctacccatattcatggtccggtgtatgtatgatgccttagggcttgttcggttgtccaggattggacctagaattattccagctgataaaatcttatataaaataggtaaacaatccagccaggaataattccatgtcaccgttcctgagcaaccgaacaaccccttagggtttttttttctcac

SEQ ID NO: 2824 - DNA, 1108 bp, Zea mays
  Clone ID: 700224619_FLI
gaatcttgcaaggacttcaacaacaggattcgtactttacacaacgggttgacgcaactggtatgccaggtctaggtcccctccaaaaagtatgtgcggcaatgcgggtacttgcatatgggttaccttctgatgcagtagacgagtacattcaaattggcgagtccacagctagggaatgccttcagcatttttgtcgaggaatcattgcatactttagtgggtggtatctacgaactcctaatgaagcggacataacacgcatcatgcaccatagcgaatcaaggggtttcccagggatgttgggttctatagattgcatgcattgggagtggcggaactgtcctaccgcatggcgtggtcagttttgtggcagaaatggtcgagcgtccatgatactagaagctgtagcaacgtatgatctttggatttggcatgcttttttggcatgccagggacaaacaacgacgtgaacgtgctccaccgatcaccagttttcgaccccatgacatccagtcgaatgccacatgtccattatacaattaatggtaatgcatataacttcggttattacctagctgatggtatttaccccaactggccaacttttgtaaaagctatcaggcacccatatgagcaaaagaaagtctatttcacacaaatgcaggaaagttgtcgaaaggatattgagcgtgcatttggagttcttcaagcaaggtgggcggtgctgcgaggtccagcgtatggttgggatcgtaatcgtttaactgaaataatcacagcttgcatcatcatgcacaacatgattgttgaagacgaaggggcgtttgctgctaatatcgattttggggataacagttcaaccattgaaccatcgcaactaattgctgaaggaagggcggaatgggtcataaaccacttggatcttcgtcgccaagaaagatcgtgctccctccaaaatgatcttgtcgagcatttgtgggcatggcgtggaagcatgtaaacttcataatttgttgctactttattttcaagttcattgaactatgtttaatttgcattgtaatgtctaacctatcggttatgaaataaagtttatgatcattgg

SEQ ID NO: 2825 - DNA, 2090 bp, Zea mays
  Clone ID: 700224627_FLI
cgacgcacgcagccgcgacccatcgcgacctgacccgaccctcccgaggccgccagccttatcctctccgcctccgcctcccgccgtcccccgcgacccatcgcaagcgcgagtagaagacatggcctcgacgttcggtgccacttctacagttggccttatggctgctccaacggggaagaatgtgcgccttcagaggagggctaacttcagagtaaaagcggctaaggagctgtacttcaacaaggatgggtcagctatcaagaagctccagactggagtcaataagcttgcagacctagttggagttacactcggaccgaagggaaggaatgtcgttttggagagcaagtacggctctcccaagattgttaacgatggcgttacagttgcaagagaggttgagctggaggaccctgtggaaaacattggagctaaattggtcaggcaagctgcagctaagaccaacgatcttgctggagatgggacaaccacctctgtggtccttgctcaggggctgattgctgagggtgttaaggtcgtagcagctggtgctaatcctgttcagattactcgtggtattgagaaaacagctaaagcactagttgaagaactacggaagttgtctaaggaggttgaagatagtgagcttgcagatgttgctgcagttagtgctggcaacaactatgaaattggtaacatgatagcagaggccatgagcaaggtcggtcggaagggcgttgtcacccttgaagaggggaagagttctgagaactttctctatgttgtggagggaatgcaatttgaccgtggttacatctctccgtactttgtaacagacagtgagaaaatgactgcagagtacgagaactgcaagctgcttttggttgataagaaaatcaccaatgcaagggatcttatcaacgttttggaagaatccatcagaggtgcatacccaatcctgataattgcagaggatattgagcaggaggctcttgctacccttgtcgtcaacaagctcagaggatcactgaagatcgctgccatcaaagcccctggttttggagagcgcaagactcagtacttggatgatattgccatccttactggagcaactgtaatcagagatgaagttgggctatcacttgacaaggcagacaaatcagttcttggaacagctgcaaaggttgtccttacgaaagagtcgacaacaattgttggtgatggcagcacccaggaagaagttactaagagggttgcacagattaaaaatctcattgaggcagcagaacaagaatacgaaaaggaaaagctcaatgagaggatagcgaagcttgctggtggtgttgctgtcattcaggtgggagcacaaacagaaactgaactaaaagagaagaagttgagagttgaggatgccctaaatgcaactaaggctgccgttgaggaaggtattgttgttggtggagggtgcactcttttgcggcttgcagctaaagtcgacgccatcaaagatacactggagaacgacgagcagaaggttggagctgaaatagtaaggagggccctgagctacccacttaaattgattgctaaaaacgccggtgtcaatggcagtgttgtcactgagaaggtcctttctaatgataacttcaagtatggttacaatgctgctactggacagtacgaggacctgatggctgctggtatcattgaccccaccaaggtggtgagatgctgcttggagcacgccgcgtcggtggccaagaccttcctgacatcagatgttgtggtcgtcgatatcaaggagccggaggctgcacctgtcgcaaacccgatggacaactctggctatggatactgatgagatgctatggccatgccccatgggacgaaggtgatcaccatattaattttttggtaggcgaggagtcgggtcgaggtagctttttagacgaccgaaaggcgaaaataagttgaggatctgcatcccaaatttgtgatgtaaactgagacaacagcagccaaatgaagcagagatatgctgaaagattctgtaactggttgcagctaatgttgaatgcagtttgcac

SEQ ID NO: 2826 - DNA, 907 bp, Zea mays
  Clone ID: 700224641_FLI
gtggaggggtatgtacgagtgccatcaagttcagacccacatcgtgcagcagctggagtacctgaacaatgctcggaataccaacccgacttccaatggccaccggcaagcagctcttcagctcgagatagaggttgacaggtgttattcagccttctgtagtctggtgaaatcccagagagactacgtctactcattgaccggctggcttcgtctatccctgttctgccaccacgacccactgactaaagctcagaactccgatatctatggcttgtgtgaggaatggcagctagccatcgacagaatcccagataaggtggcctcggaagggatcaagactctcctgacagtgattcatgctgtcgtcattcaacaagctgaggagcataagcagaagaagagggcggagtctgcattcaaagagtttgagaagaaggcagaggagctgagagccctggagtcaaaatatgtcggcgctgaaggttacagagaaatgtcacgaaaatcatcggtagctgacaagcgggcgaaggttgaggctctgaggagccgtgccgacgaggagaagatcaaatacgagaagagcatcggggtcaccagagcaatgaccctgaataacctgcagactggcttccctaacgttttccaggcgatgacgggcttcgccagcgtgtgcatggaggcatttgagtcggtgtacaacttcaagcggagctcggacccgaagaggctgctgacctgaagcaatgttgtataaaatgtatacagtcctaggtttttagtaacaatgataccttgcaacctttgtctggctgttatcaggttctaatggcgcaaaaaaaaaaaaaaaaaaccccgtcaagttcaattacaccaagtaattgaaacttgaggccttgttttt

SEQ ID NO: 2827 - DNA, 703 bp, Zea mays
  Clone ID: 700224708_FLI
gccgtgagcacccgagcccgtcccccctccggcatcccccacctgcagccggtgagctgctgtgagcctatccagtggcgattccattcctctccgtgtggacgcaaggactcagtgaaccacttccagatactcgctgcttctcccgtgcccatggctacaccacttatagcaggacttgcagttgcagcagctgcccttgccggtagatatagcatccaagcttggaatgcttataaggcccggcccgtagttccaaggatgcgcaaattctatgaaggtggtttccaacctacgatgacacgaagggaagctgctttaatccttggtgtcagggaaactgccagtgcagagaaggtcaaagaagcacacaagagagtgatggtggccaatcatccagatgcgggtggaagtcattaccttgcttcaaagattaacgaggcaaaggatgtaatgacagggaaaacaaaagggggtgggtctgccttttgatcggtacacggacaacgtgttcttccactgaaagagcaattttgtgtctccagactcgcattagaagatatgccgaaatctttgtgtgttttatgaaaatttgtggacaaaaaaaaagtagtggacctttatggagcaggcaattcgttgcttagtaaagctcggctcagttgtgcttgtgcccgaatcaattggacattgttgctaattg

SEQ ID NO: 2828 - DNA, 556 bp, Zea mays
  Clone ID: 700224716_FLI
cttcctcgagttctcctcaaccaaattcaaagtcacagcggcgaaactctcggcgatgtctggccgcggcaagggcgggaagggtctgggcaagggcggcgccaagcgccaccgcaaggtgctgcgtgacaacatccagggcatcaccaagccggcgatccgcaggttggcgaggaggggcggcgtcaagcgcatctccgggctcatctacgaggagacccgcggcgtgctcaagatcttcctcgagaacgtcatccgcgacgccgtcacctacaccgagcacgcccgccgcaagactgtgaccgccatggacgttgtctacgctctcaagcgccagggccgcaccctctacggtttcggcggttaggtcgcccctctcccggtggcgaattacgtggtggcggtggcggtcgtgttgtgttcttggtctagttagtctgtgttgtctttatcggtgctgttttctgtggtggttgtactgcatcgttctagtttctagtccatgtgctgtaatatctcgctgctgtaatcaatggaatgtcctcgtttcaagcct

SEQ ID NO: 2829 - DNA, 992 bp, Zea mays
  Clone ID: 700224734_FLI
gcgcggcggcggcggcggcggcgaccatggctgtcgggaagaacaagaggatctccaagggaaagaagggtggcaagaaaaagaccgtcgaccctttctctaagaaggattggtatgacatcaaggcaccgtcggtgttcagtgtgcgcaacatcgggaagactctcgtatccaggacacagggtaccaggattgcttctgagggtctgaagcacagagtctttgaggtttgcctagctgatcttcagggcgacgaggatcaagcttacaggaaaatcaggctccgtgctgaagatgtgcagggcaggaatgtgctcacaaacttttggggtatgaattttaccactgataaattgaggtccctagtgaagaagtggcagacattaatcgaagcccatgttgatgtcaagacaaccgacaactacatgttgcgtttgttctgcatcggcttcaccaagaggcgcccaaaccaggtcaagagaacctgctatgctcaggcatcccagatccgtcagatccgccgtaagatggttgagattatgatcaaccaggcttctacatgtgacctgaaagaacttgtttcgaagttcattccagaagttattggtaaggagattgagaagtctacctccagcatcttcccacttcaaaacgtcttcatccgcaaggtgaagatactcaaggcccccaagttcgatcttgggaagctcatggaggttcacggcgactacaaagaggatgttggtgtgaagcttgagaggcctgtcgagggagatgaggctgggcaggaggttgctgctgccgagtagtttgtttgctagttctatatctaggcgagtctggacatgaggttgcttatgacgtgaacttatagagttgtcttggctatgtgttttcgtctagccctaagattttgtcttgaaacaagtttaaaattaagattatttgtaacaagtgttaggattactcgtggtgatattctgtgttcgatt

SEQ ID NO: 2830 - DNA, 633 bp, Zea mays
  Clone ID: 700224738_FLI
cattgcttgcctccagtctccagagaacgcgatttgttctgttgttcggtccccaatcttcgcctccgctccgcccgccccgacccagatcaggagctgagagatggacgccaacaggcgccaaggtgggattcagcagttgctggctgcggagcaggaggctcagcaaattgtgaatgcggctagagctgctaagtcagcaaggcttaggcaagcgaaagaggaggcagagagggaaatagccgaataccgtgcccagatggaggctgagttccagaggaaggtcgcagagagcagtggtgactctggtgcgaacgtcaagcgtctcgaggaagagacaacggcgaaaatcgaacagctcaaccagcaggctgcaagcatctccccagatgtcattcagatgcttctgaggcatgtcaccaccgtgaagaactgagaagtgctgctcccaaactatgctcatcggtctatttatttttgtcagagcaggtgaggaataataatatggcccttgtaccagtaattctttttttaactacggaataagccgcagcagctttagcggcaaccgtgactgttactaccagaacttgccattatttggtataatcggcaaattaaataatattgttt

SEQ ID NO: 2831 - DNA, 994 bp, Zea mays
  Clone ID: 700224773_FLI
cggtcggtcgatcgatcgatggccagcgttatcgacggcaatggaggcagccggctggtggtgacggagctgggccacctcaaggagctggcgatgcagctggaggggcacctcggcggctcctcgccggacctctgcaagcacctcgcctcgcagatctcctccatcaccgaccgctccatcagcctgctcatcaccgccacctcatcaagcccccacggcggcgcctctgacgcgccgcccttcatcaaggctactaccaagaaaaggaagaggatggacaagaagaggcatgaggtgagggtgggctcggccggaggcggcggcggtgaccatccggccgacgacggctacagctggaggaagtacggccagaaggagatccttggagccaagcacccaaggggctactaccgctgcacgcacaagagctctcagggatgtgcggcgacgaagcaagtgcagcgcaccgacgaggacccggccttcttcgacgtcgtctacctcggcgaccacacctgcgttcagagccagagggcggcagcgacggcgggtcgtcaggctgccgcggacgcgcaggcgccggtgtacgacgccaacctcatggtgaagaccgaggggccggccttggagccagagcagcagcggcggggctgggacgacgcgcccacgccctttctcttctcctccacgccggcgtgccttgtgcaggagcgcagccccttctccgcgccgtccacgtccgagaactggggcgtgtccccggcgacctcggactccaaccacgtcgtctctttcccgcctttcgaggtcgccgccgccgccgccgcgcagttcgagttcgaggaagtcatgtcagcgatggacagagccgacggcgagtttctcgaggacctcgacatctatgtctcaagcttcttagcgtgatctgctggatgtaatgtaaccgatgaacgctagggaatgggaatctgaggcagctgttactgttacc

SEQ ID NO: 2832 - DNA, 3774 bp, Zea mays
  Clone ID: 700224830_FLI
gtttttttcctctcctgcgcctcgccaccgcttcctcttgtcgcccgcctctctcatcgaccctaggcgcgccgcctcgccgccgccgatcccgcagccgtcgatcctggccgctccgatagccggtcagtccgtccccatcatcccctcgctatcgatcgcctccgacttgcgtggttttccggcgcttgcacggccgcgacgcgactactcttggagtcatagttcgtggattgtcaatcgaaagagggctacttgattgtttggaatctacttttatagttgattccaagcatggaaagtctaccaaatggttcagtaaacaatgcggagcataaccaggaaaacaagaagtccatggatgctagtgtgcctgaagaagtacaagatgtttttatttacagagaagatgttgtgagcttgaagtccaaggaggatgtccgtggattagttttagaggtagctggggaatatgattctgaaggtagcatcactgatgatgatattgatactgaggaacatgaagataaaactgttcgtggagcagaaaatggtgctgctgatggtgataatgctagtaatggagctgaagttgaaagccagagttctttgccggataacaaagttcgagtgttatggcttgatgatagtgaaaaaacagaagacattgatgaggtagttgttgttgatagaagtttccttcatggtgatttagttgcctctgcctcagatccaactggtcagatggggcttgttttggatgtcaatcttgtggttgatttgcaaggtgtgaatggcgatatgataaagggtgtttcttccaaggatttgagacgaatcagggaattcaatgtgggtgattatgttgtctctgggctatggcttggtcgagttgatgaagtgctcgatagtgttaatgtgctttttgacgatggctctgtctgtaaagtcaatagagcagatcctatgtgcttaaagccagtatttggcccaatgcatccagatacagattgtcctttttatccaggacagcgtgtgaaggcagtgtcatcatctgttttcaaaacatcaaggtggcttaatggattgtggagagcaagtcgtcttgaaggtactgtcacaaaagtggaaagtgtttctgttatagtctattggattgcatctgcacactttgcttcagatcagcaacctgttcctccagagaagcagaacccaaaggaccttactcttctgtcttgtttctcttatgcaaactggcaattaactgactggtgtcttcctcaccgatacactttatgtactaatgataccgtgattaattctgataagcatacaggtcagatctgtacatgcccagaaagctcagttccactgtctgatattccagaatctcaagctgatgttcagactgaacaagatcaaatgactgatacagatgcaggtcataggcaaatagatgttgattctactgcagatggattgagtatgtcggacggagataattcatgcatagccaaagaatcagaaactagtgtatcaagcattctaaaggagccacaggacaatgcaacatctaggaaaaagcttaggaaagtgtccctaaaaaaacataaaagaacgaaaaaaagagacgacagctttgagcgagctctactcattgcaaatacttgtaccaaagttgatgtaatctggcaggacgggacaaaggaatgtggggtagccgcaacatcgttgattcctatccacaatccaaatgaccatgagttcttccctgagcagtatgttgtggacaaggtcacaaatgatgttgatgattcttctgaaccaaggcgtgtgggtcttgttagaagtgttagtgctaaggaccgaacagtaactgtatcatggtttaagccttcgctacatccagaggagacaaagaatatcgtgtgtaatgaaattgtgagtgcatatgaactggatggccatccggattatgattattgctatggagatattgtcgttcgcttgccgcctgtctcacctgtaattgaatcaaccaataacaaggatcaaatggaactagataggacggtcgatgcctcggaaggatttgctgcctcaaatgatgcaccctctaatactagtgcaagtgaacaacttttgcagaaggaatcctgctcgcagtttacaagcctctcatgggctggaaatatagttggctttcaagacggtgagattgaagtcatttggggtgatgggtcgatttcaaaggttgggcctcatgaaatatatgttgttggccgtgaagatgatgatgcctcactagatgacggaacagcctctgatggtgctagctgggagactgttgatgacaatgaaatggatgtacttgatgattctgcaaaggatgattcacaaagcatacctgagaatagcattgaaagggaagatggttcattcagctcccagaatggaagttctgttgcaactggtcccctttcagttgcttttgggtttgtgacccgactagcgagtgatctcttcgctcgaggtagaaggcatttagatagatcgtcaaactcggatgctatggatgaagttgagtctcaccagtctaatgaagtttcagaaactagtgatgacattgataagattaatgagaataatgtggaatcgccagaggatgctgcagtaatagaaaacgattcttctgtcgagaagtctgtagatgtggtcatggctgataatcttgtagatttggaatgtttcaaacactttgatattctgcaatgtcctccagaccaccattaccttgaaaacatagcccagggcacgggtggaagaaagtgggtaaaaaaagtacagcaggaatggagcatacttgagaagaacctaccagactatatttatgtcagagtctttgaggatcgcatggatctcttgagagccgtgattgttggagcaagtggaacaccctaccaagatggcctgttcttctttgatttctaccttccacctgagtatccgcaagttcctccgtcagcatactaccattctggtggtttgcgtgtaaatccaaacctgtatgtggatggaaaggtttgcttaagtctcttaaatacttggaccggcagagggaacgaagtgtgggacccatcatcatcaagtattctacaagtactggtttcacttcagggattggttctcaatgaaaaaccctattttaatgaggctgggtacgagaagcaagttggtactgttgaaggggagaagaatgcagtgccgtataatgagaatacgtacctgctgagcgtgaaatccatgctgtatatattgagacggcctcctttgcattttgaggattttgtgaagagccatttccgcaagcgtggccactacatccttaaagcctgtgaggcatatttgcaaggaaatgttgttggcactctcactgacgacgcatgcaccaccaacagaagcacggagcactcgagctctgtcggcttcaagcttgcactagcaaagattttaccaaggttgattacagccctgaaggagcatggagctgattgcgaccaatacgagcaccttggcaaaacagaccccgttagagagagctgatcattgagtgacttgtacttggatcttttgccttttatatctgttcttttttcgggtttcagaaaagatggtgacttaataccaccaggctgttttcgtataaatgtacattcaaagtttgttgtttccgtcaaacatttggaaaatatggccccaaatgatttattcgat

SEQ ID NO: 2833 - DNA, 1356 bp, Zea mays
  Clone ID: 700224857_FLI
cttgtttaccattcctccccaaaacacatcctgcgatcctcgaagcctccgccgagcatcgatcatgtcggcctactgcggcaagtacgcggatgagctcatcaagaatgctgcctacatcggcacccctggcaagggtatccttgctgctgatgagtcaactggcaccattggcaagcgcctttccagcatcaatgtcgagaacgtggaggagaaccggcgggctctccgtgagctcctgttctgctgccctggtgccctccagtacatcagcggtgtgatcctcttcgaggagaccctctaccagaagaccaaggatggcaagccttttgtcgatgtcctcaaggagggaggcgtcctccctggcatcaaggtcgacaagggcaccattgaggttgttggcaccgacaaggagaccaccacccagggccacgatgacctcggcaagcgctgcgctaagtactacgaggccggtgcccgctttgccaagtggcgtgctgttctcaagattggccccaacgagccgtcacagcttgccattgacctgaatgctcagggtctggctcgctacgccatcatctgccaggagaacggtctggtgccaattgttgagcctgagatccttgttgatggccctcatgacattgatcgctgcgcttacgtcactgagacagtccttgctgcctgctacaaggctctcaacgagcaccatgtcctcctggagggtaccctcctgaagcccaacatggtgactcctggctccgactctaagaaggtgacacctgaggtgatcgcccagtacaccgtccgtaccctccagaggaccgtccctgctgctgtgcctgctgttgtcttcctctccggtggacagagcgaggaggaggccaccctgaatctcaatgccatgaacaagctcagcaccaagaagccatgggccctgtccttctccttcggccgtgccctccaggcgagcaccctcaaggctgggctggcaaggtggagaacgtggagaaggctagagcggccttcctcgccaggtgcaaggccaactccgaggctaccctcggcacctacaagggtgatgctgccgccgacaccgagagccttcacgtcaaggactacaagtactgagttgcttctctttgcgatcccgttgttttggaactcctgcctgcgagtaggttgctgagtgttgtttgcttgttagagcttttatattcggacatgaaaaaaacatgcttcctatgtggatgatggttatctttatattcgtatattaactactagtctctgttgttaatttccgtgtaatttgctcctcccagatgggagaatcgaacgccgctttttttgttc

SEQ ID NO: 2834 - DNA, 1268 bp, Zea mays
  Clone ID: 700224866_FLI
gccatcatcccctttgcaagtatagtctctctgctaagcgaagcgaagcttcaagctagtctcggcggctctagaagacgatgggcaaggacgacgtgatcgagagcggcgctggcggcggcgagttcgctgccaaggactacacggaccctcccccggcgccgctgatcgacgcggcggagctggggtcctggtcgctgtaccgcgccgtgatcgccgagttcatcgccacgctgctgttcctgtacatcacggtggccaccgtgatcgggtacaagcaccagacggacgcgtcggcgtcgggcgccgacgcggcgtgcggcggcgtgggcgtgctgggcatcgcctgggccttcggcggcatgatcttcgtcctcgtctactgcaccgccggcatctcggggggccacatcaaccccgccgtcaccttcggcctcttcctggcgcgcaaggtctccctggtgcgcgcgctgctctacatcgtggcgcagtgcctcggcgccatctgcggcgtcggcctcgtcaaggcgttccagagcgcctacttcgacaggtacggcggcggcgccaactcgctcgcctccggctactcccgcggcaccggcctcggcgccgagatcatcggcaccttcgtgctcgtctacaccgtcttctccgccaccgaccccaagcgcaacgcccgcgactcccacgtcccggttctggctcccctccccatcggcttcgccgtgttcatggtgcacctggccaccatccccgtcaccggcaccggcatcaacccggccaggagcctgggcgccgccgtcatctacaacaaggacaagccctgggacgaccactggatcttctgggtgggccctctcgtgggcgctgccatcgcggccttctaccaccagtacatcctccgggctggcgccatcaaggccctcggctccttcaggagcaacgcgtgatgagcggggcttggctgtggagcaatggcgggcgacctacgggcggggggccgtgagcgaggagaatgccatcattcatcgatcgacttgggtgccggtggttggttcgggtcgccttttttttgtttcagcagctgctgcgttgcgcgcgtgcgtgagatttggtttggtttcgttcccctgcaatgtaatcatgtcgtgactctcaagggattattccgctctgctcttatggtctctgttttctatttaatgattgttattaccatgtagcagtaaccatcgtcatcagtgagaaccttgttgcttctgtct

SEQ ID NO: 2835 - DNA, 1212 bp, Zea mays
  Clone ID: 700224868_FLI
aggtgataaacgagtatctggtggagtaccctgaggttccgcagtgggcgccttggtgcatggagcagccgaagagtgttgactgggatgcactgatcaatagcatcttcagtgaggctgagaatgtgccggagattaactggtgcgagcctggggagtcctcagcgatggaggtccttcttgggagtaaggatgggttcttgacgaagaggattaagaactatgacactggccggaatgatcctacaaagccacatgcattgtcgtgcctttcaccgtacttacattttgggcacatttctgcacaaaggtgtgctcttgaagcaaaaaaacgccgtcatcttagtccaaagtcagtggacacgttcttggaggagctgataataaggagggaactagctgacaatttctgctattaccagcctcaatatgattcactggctggtgcatgggagtgggctagaaagacgttaacggatcacactggtgataaaagagagcatatctatacgagggagcagctcgaaaatgccaaaacatctgatccactttggaatgcatctcaattggagatggtgcaccatgggaaaatgcatggatttatgcgaatgtattgggccaaaaagattctagaatggaccagtcaacctgaagaagcactttccatagcaatatatttgaacgacaagtatcatatcgatggcagggatcccaatggctatgttggttgcatgtggtctatttgtggcctccatgaccagggttggaaggaacgtccggtatttggaaagatacgttatatgaattatgctggttgcaagagaaaatttgacgttgatgcttatatttcgtacgttaaaagattggttcctagggccaagaagaggaaaactgaggaaggtgaatccacggtcaaagaatccaatgtctgagttggctcagcagttcaacattgtctaaaacattggtataatttaaatttggcgcagtcaagtgacatacttttcttttgctggtagatgtttatacggctaactgaagagttgctaagtagagatagacattatacaaggttgtgctgagatcagtttgcctcgctgatattataggaaaaacatattaacatatatgttttataatagttttaaaaatactaatgttattctgtcgacgtttgattttattttttaataaatttggttaaactttgtg

SEQ ID NO: 2836 - DNA, 1623 bp, Zea mays
  Clone ID: 700224869_FLI
ctaaaggcctattaccgggacaatggtttgatgcagtatgctcgctctgtgcttgtgatacacaacattgctcatcagggtcgtggccctgtagacgacttcgtcaattttgacttgcctgaacactacatcgaccacttcaaactgtatgacaacattggtggggatcacagcaacgtttttgctgcggggctgaagacggcagaccgggtggtgaccgttagcaatggctacatgtgggagctgaagacttcggaaggcgggtggggcctccacgacatcataaaccagaacgactggaagctgcagggcatcgtgaacggtatcgacatgagcgagtggaaccccgctgtggacgtgcacctccactccgacgactacaccaactacacgttcgagacgctggacaccggcaagcggcagtgcaaggccgccctgcagcggcagctgggcctcaggtccgcgacgacgtgccactgatcgggttcatcgggcggctggaccaccagaagggcgtggacatcatcgccgacgcgatccactggatcgcggggcaggacgtgcagctcgtgatgctgggcaccgggcgggccgacctggaggacatgctgcggcggttcgagtcggagcacagcgacaaggtgcgcgcgtgggtggggttctcggtgcccctggcgcaccgcatcacggcgggcgcggacatcctgctgatgccgtcgcggttcgagccgtgcgggctgaaccagctctacgccatggcgtacgggaccgtgcccgtggtgcacgccgtgggggggctccgggacacggtggcgccgttcgacccgttcaacgacaccgggctcgggtggacgttcgaccgcgcggaggcgaaccggatgatcgacgcgctctcgcactgcctcaccacgtaccggaactacaaggagagctggcgcggcctgcaggcgcgcggcatggcgcaggacctcagctgggaccacgccgccgtgctgtatgaggacgtgctcgtcaaggcgaagtaccagtggtgagcgaattaattggcgacgccgacgccgctcctgtcgcaggacctggacgttatttagaaggctcttctccctggcggctttgatgcgtgcgtcgcatttgcgccgggcggacgggcgacggtggttggcctaccgcctacgtcggctgcgtgccctgggaatttgggcgggcacgatgatgccactgggcaccgggcgcgggttagtatgatatgaaaccgacggcgatggagatgaggcgcatggcattttcccactgataaatggggagttgtatgctactttaatatcgccactcctgttagtatttttattgatgctgtcaagttttccactccaagaacaaatgacggtagccggtaagtataggcctatttgtagagctagttagaagtacatgtgcccaaaccgacaacattgtacgtacattataaagcacggcactatttgttactgtcagtaaccgtgtcgtgctagtacgtcacaggtacagcattatagcacctatgacgccattgtatagcacttagtagtgctcttgtcagtctagatattatttcactttaagagtgctcaaaagagctagaac

SEQ ID NO: 2837 - DNA, 1127 bp, Zea mays
  Clone ID: 700235149_FLI
agggcagcgagctgcttgcttattactgtcctattgtctgcctccacctgccgcaagcaagggatgtggaacagcagatcacacttcgccggcgggcaggacaacgacggcaacgacgaccagccatacggatacggatacggtggcggccagcagtatgaagcaaccggcggcaagaaacgagcgtcctcgaggctgaagaagagcagcggcagcaagaaagacgacgagtacaccaagtacgcaggcaacagcaacgaggccgacgacaaccgccgcaacaggccgaacgacgacaataactacaacggcggcggcggcaaccactacagcggcgccggcgccgcaataggtgcgccctactacggtgctgctggcgccggcggctacgggagcagctctccctactacggcaacgccgctgtccacggcaccggcggcgacggcggcggcggctacgcaccgtacaacaacgctcccgccgccttctgggctccccaggacggcaccaggtcgcccatgtttatcagcactagggaggtgcacgtgtacggcgcgcctggcgggtacgacaactacgatggcagcaacaacgacgaccgccagaggaggagaggcggcggcggattcttcgggcccgcgttccatgccgtcggccgcttcttcgaccgcaagttcggcttcagcgacagggactgaagcgcacatacgccggcgttgccatgcattgcaacatgtatgctcgcgggcatctcgtcaatcgacgacagatctatctgccatctgcatgcgtgcaattacactacctagcttcttcgtccgcgtactagtgccctgctatcgttagctagagctcactgctcaccaccaggagccgtttattgcatcaaagtatttattccgagtgtgccatccagtgtcgtatttggtttccgttgtgatggagatgaaccgtatgtatacattaatacatgcatgtctatagcagaatgcaaatatgcatatgtgtggtgtgtgcttgctgctgagatttgtgtgcaagggcagcaagctagtgtgtgtgctatactattttgtttgtagacagtgtaataattatattatgtatatggtagtggtaattgttt

SEQ ID NO: 2838 - DNA, 2180 bp, Zea mays
  Clone ID: 700235156_FLI
gcggactcgtcctcccggccaaccctagcttcccttctcttcccctcccccgatggacccgccgccaaccagggacagaggggaggagctggagcctgaaacccgcgccttccccgacgccgacgacccggagacctcccgatctgaacgcgacgagggtatccctccaccgccaccgcctctgcgccagcagctcatgggggcttgccgcgccgacgagcgcctcaggccgctcctcaccctcaacgtctcctgcggcgcagcggacgaccgactcatcgcacacctcgcgcagcacttcgaggtgtcggaggtgggcatgctcgcgcgttgcctctgtgttcccctcgtttccctgcgcgttggcaaggttcagagggaaggggccctcctctgcccaacacacattagagggaagctgaaccttgttcttctgccatcatctagcatgcggcttacctttgtttgtgatgatggttatccagagcaactagctctcttgagcaatggctttgaattttcggaagttatgattgaagaaatatcagctgataattctggacgctctttcctaatcagaatttcagaatctaaagtgttttactactggtgtgctgagaagtcgaaggaacatggaatggaacttcttgcaaagatgaaaaaccttttggacgggaggccaacactctctgatctcactggcatctctaattcacgacttgatgcttttgccactcatttacatgcttatcttcttgcatcaagtatcggtgatgttacatcattgggctcacttaatgacttcctgagtacttcaagatcacatgatcaatatttacagctccagtcagatttttccaaaacttccaggttccgtgcctcggctgctagtgcaattaagccaagctctgtctatcaagccagcctaagtccgagatctggcacttttaaagatggggtaccaagggcttcatgtgcaagggttgttgggagggacaagctgaagcgtcgtgtggaatggttaggcccgttaactgctccgcttgatacgaatcctttgacaatcaaccctgattctgccagtgagaagtgtgatgcagattgttcaaagaacgatgttagctcagttccgttggacctgcctctttcgtttcccctgttgccttctatttactcccttggcactcgtccggttcctgaggtttctttggagaaacagtttaagccttactattgctggtgcccaccatgcccatcatcgctgcaatacactgtcacccatttgcatctgccagctacacctgtagatccgttgcccctaccacctttgagttcactgctagcaagtgagcagccaccttcttcaacagtttctgtaaagctggatacaactgatctcccttcccttaatcttccgtccatactgcattcaccacttattcccctacatggtccacaagtgccaacattcacaccattgatgtccgatcccattgtgcatgtcccagtcattgatgtttgttcggcgggtcaggcctatctagtgagttgtgggccgtctataacttcagcagttcccctgctcccgagcttgaagcctctgctgccagaagcagagtcgttagtcgagagaagcgcaagggaaacactgatgaggctcatagcttcgacaccacctgcaagcaatcctctacctggaagtatatcccgggcgaataacaatgtgaagaagcatgttgatgtgcgtcccaatgaaaaagcatccggtacgtcttgtgtttctgctgctgtgtttggaagtgggattgcacacgctgaggatgaagttccaagcggagctgattcacaagagccgtttgccgaatacgatggtaccagcaatgaatgtgatgtacatcattggcagaaattctagcttggctgcatcagcatggtaaatagggttttgaggattcgggggtttgatgtcctgtacgcagcagcagccttaaaagtttctgtgcccagccagcatctctatttggtttgcaaatgtaattactagtttgtactgtcttgtttttggcaaacttgctgcgagcttcgtgcttagtttggtttatttatttatgaactttaggcctgttcgaagcacccagtttgtaagaaaatggattatataaactgaagtgattccaaat

SEQ ID NO: 2839 - DNA, 1610 bp, Zea mays
  Clone ID: 700235221_FLI
cgtgtggctcacgctcaggagcaagaagagggtaaggcggcgggcatccgcaaatatcccaatcacccaaatccctgcaatttccaaggaaatcaaggaggtgagggtggagcaagtgccagcgagcgactttgtggcgcatgatggcgtcctcctcacgttccaggacaagaccagcgaccgggattcagacaaggtcatggcccatttgggtgttagcaaatcgaagcgtggtgatgagagccattcggggtcatttcgctacatggacaaggatgcaggattccagtcagctgaggaaggtggctctggaacgtttcggcaggcttcagctaatgccatagttgctccttcacctctggttggcctgcccgagttttcataccttggttggggtcactggtttacgctgagggatctggagcttgctaccaatcgcttttcaaaggacaacattattggtgagggtggatacggtgtagtttatcgcgggcagctaatcaatggctcccctgttgctgtcaaaaagcttctcaataacctaggtcaagctgagaaggaattcagagtagaagttgaggctattggtcatgttcgacacaagaacttggtccggcttcttggttattgcgtggagggtacccaaaggatgcttgtctatgagtatgtgaacaatggaaatctagaacaatggcttcatggagctatgagtcaacatggctctcttacatgggaggcccgcataaagattcttcttgggactgctaaagcgcttgcttacttgcatgaggcgattgaacccaaagttgtgcaccgtgacatcaaatccagcaatattttgattgatgatgagttcgagtccaaagtatcagattttggtttagccaagcttcttggtgctggaaagagtcatgtcaccactagggttatgggtacctttgggtatgtggcaccagagtatgcaaatactggactcttgaacgaaaagagtgacatttacagctttggagtcgttctccttgaagcaattaccggaaggaatcctgttgactatggacgcccaccaaacgaggtgaatctagttgactggctaaaaatgatggttgccagcaggcggtcagaagaagtagtggatcccaccatagagacacgaccttcgacgagagctctaaagcgtgcacttttgacagctctgaggtgtgtggatccagattcagagaagagaccgaagatgggtcaagttgtccggatgctggaatcggatgatccaattcctcgaggggacagaagatctaagcaccaccgtggagggagcacagaaatggattcgcaaaaggacaacaactccgacacggagaagagtgataatgcagattcgaaacctagcaggaccagagcatcttcgtccaaatgagcaaaccagcatttcacctattacagtcttcggcacattgcatggactgggggctacttccattttacattgctgacgaattggtaactgaaagctctgaagaaagacctatttttcttttcttttcttttcttttctttttgttgcaacaatttatgatttatttgtagagaaggtattggtttttgtacttatc

SEQ ID NO: 2840 - DNA, 628 bp, Zea mays
  Clone ID: 700235237_FLI
gctcaagtcgtgggccgtcatgaagaaggacgccgccaacctgggcctccgcttctttctcaaggtcttcgagatcgcgccgtcggcgaagcagatgttctcgttcctgcgcgactccgacgtgccgctggagaagaaccccaagctcaagacgcacgccatgtccgtcttcgtcatgacctgcgaggcggcggcgcagcttcgcaaggccgggaaggtcaccgtgagggagaccacgctcaagaggctgggcgccacgcacttgaggtacggcgtcgcagatggacacttcgaggtgacggggttcgcgctgcttgagacgatcaaggaggcgctccccgctgacatgtggagcctcgagatgaagaaagcctgggccgaggcctacagccagctggtggcggccatcaagcgggagatgaagcccgatgcctagtagtggcgattgcgaccagtgtttaacccatgacgcagcgccgtcacagatgtcccgtgtggtcttgcgctttagcaatttctctctggagggagcgtgtattgttatcttgtgatcgagagcctgtgtgctgcctttgcttcttgtgattatatagctactgaataaagatgtagcgttcttcagcctgtt

SEQ ID NO: 2841 - DNA, 740 bp, Zea mays
  Clone ID: 700235266_FLI
agtgactttcttttgtttgatcttatagagctagcagactattgcaatgcaaagaaagtgcatctgatttatgacaaaagagaacatccgaaacagtccttactgcagcagagtctaggtgacctccagggttcttcgttgacagtggtctttgaaggaaccataatgaatcgcgaagaagtttgcagcttccaacttcctcctccctggaaactgagagggaacatccttaattatggcttgggacttcttagtagttactttgtttgtgatgcattgactattctttctggaggttacttttacatttttgatcccttgggcttgactggtggtacgacttccactgctacctcatcagcaagatacttctctttgttaggtgcggaatataatcactcaatttatttgcatatcaaatagaatcacaagttctactgtgaacacatgacacaaactttagattctcttttactgtaaaagaaataagaatatctttcttatgttgcaatttttttcttctgtcaggttgaaattatatatgttgattagttataacatagtgtactcaaaatctgtgtattacttctccctaaatcaaagtacagacttggttaattgaaattctttatgtttgaaatatccactaagtgtggtcaaaactacgtgatattaatgtaattactagatagtcttgaagaaagaagctccttatcaatggcaagaccatgtcacactgc

SEQ ID NO: 2842 - DNA, 730 bp, Zea mays
  Clone ID: 700235293_FLI
ggcggcgccggcgtgcttgtgatctcaacccaagtcgtgcctccgctccggtcacccgtcgctccacgcaaccatgtcgaggaggaagaccagggagcccaaggaggagaacgtcacccttggacccactgtccgtgaaggagagtatgtctttggtgttgctcacatctttgcatccttcaatgacaccttcattcatatcactgatttgtctgggagggaaactctggttcggatcaccggtggcatgaaggtgaaggctgaccgtgacgagtcgtcaccttacgctgctatgcttgctgctcaagatgtcgcacagcgctgcaaggagcttggcattactgcactgcacattaagcttcgtgccaccggaggcaacaagaccaagacccctggacctggtgcccagtctgccctcagggcgcttgctcgttccgggatgaaaatcggacgcattgaggacgttaccccggtccccacggacagcactcgcagaaagggcggtaggaggggaaggaggctgtaggcgtctcttctgcgtgccatttgctggctcttgtcgggtggccatcatgaagctagtcctctctgggtggtgttgctgttttctgtgtttgtcaagacgagctttaattttgctctatgtggatgactgtttaccgttagtcgaacctgtatgatgttgcatggataatgttttttggctgaggaattggctcgtcatatttct

SEQ ID NO: 2843 - DNA, 737 bp, Zea mays
  Clone ID: 700235331_FLI
cacgctcaagttctcgcgcccacagccaaatttttctccactcaatcgcggcataagctgcactgcagccatggacgccagcggagccggtagcaaggcgaagaagggggcggctgggcgcaaggctggcggccccaggaagaagtcggtgtcgcggtccgtcaaggccgggctgcagttccccgtcggccggatcgggcgctacctcaagaaggggcggtacgcgcagcgcgtgggcaccggcgcccccgtctatctcgccgccgtgcttgagtacctcgccgccgaggtgctggagctggccgggaacgcggcgaaggacaacaagaagacgcgcatcgtcccgcgacacttgctcctggcgattcgtaacgacgttgagctcggcaagctgctgtctggcgtcaccatcgcgcacggcggtgtcctccccaacatcaacccggttctcctgcccaagaaggtggcggagaaggcgtccagcggcggcagcaaggagagcaagtcccctaagaaggccgccaagtccccaaagaaggcagccaagtccccgaagaaggcttagaaattagtcacttcactagcgctctgctgtagcatgttcgtgtttagatctgtggaacttatgtgttccagcctaatttcctctttgccttgtggctcctgatatgttcactggcatgtttgccgtgttgtgttccttgttctgattttgcaattcatcatcttgttgaatt

SEQ ID NO: 2844 - DNA, 1392 bp, Zea mays
  Clone ID: 700235358_FLI
ggctagaaagcaaacatattgacctggataaggggtgcacatacagccatgccacactgtcaaattgcgcctcaaatgcttttggagatgatttatacggcttcagagaatttacagtgttggatatgcaatctgctacgtgtaaattctcagagagcttcaggatgtggtcgcaaggtcgtgggtgtgtttacaaaggagaaattatgaacagaactgtgatgatctataagctgcactgccatagcattgagagcgtgaggcagttccagcaagaggtttatatcctcagcaatgtgaggcaccctcatctagtgacactggttggggcgtgcccggaagcgctgtgcctcgtttatgaatacctgccaaacgggagccttcacgaccgcctcttcagcagacgcagcagccgtcacttgccgtggagaattcgtgcacgcatcgtcgccgagatctcagacgcgctgctgttcttgcattcctgtaagcctcagacgatcgtacacggcaacttgaaactcgagaacatccttctagataccgaatgccattgcaagatagccgatttcggtatctctcggctattcacaggcgacgtgaaggattacccgtcggggggttctgagcctccggaagggtcttttccctacgcagatccggagtacatgagaagcaaagtgttgacacccaagtctgacgtatactgcttcggaaccgtgatactccagctactgaccggaagacaggagcctgcacggcggcttgctggtgaagtaaggtgtgccatggcttgtggcaagctatcgtcaattctcgaccctgctgctgggcattggcctatggaggtggccggaaggctagcggaactgggcctgaggtgcagtgaggacagaagccgggatcgcccagacctgactgctgagaccgtacgagagctggaacagctacacttgacgagggaggaggaacaagcaccctcctctttcctgtgcccgattatgcaggagataatgcatgatcctcaggtgtgcgctgctgatggggtgacctacgaagggcgggcgatccgtgagcggatggagttggagactgggcaggggacagcgcctctgaacaacctgaaactggagcatctcagtctcacacctaaccacgcccttcggttcgctatccaggattggcttcgtcgctctcgccgatgaaactttttgcctggcgtttcttttgggttttcgacctgtacagatttcacgtgtaaaggggtatagcatatctgcatatgaataatttgaatagctgttctaaggttttgtctgtacttcatgaaatgtatcaggatgcatgtacgcggcaatgcagcttcaggatcgatcgcataaatcttaaaat

SEQ ID NO: 2845 - DNA, 954 bp, Zea mays
  Clone ID: 700235367_FLI
ggtttttgtgcgcatagcggatctgtacaataagtcagggaagctgagggagtcaaaatcttactgtgaaaacgctctcaaaatttaccaaaaacctattccagggacttctctggaagaaattgccactggtttaactgatgtttcagccatatatgagacgatgaatgagcatgagcaagcactcaagttacttcagaaggccttaaaaatgtacaacaattctgctggccaacagagcacaattgctggaattgaggctcagatgggtgtcttgcactatattttgggcaattatggcgagtcatatgattccttcaagagtgcgattgcaaagctccgcacctgtggtgagaaaaagtctgccttcttcggaattgccctgaaccagatgggattggcatgcgttcaaagatattcgataaatgaagcagcagaactgtttgacgaagctagaacagttctggaacaagaatacgggccttatcatccagatactttaggagtgtacagtaatcttgctggaacttatgatgcaatgggcagacttgatgaggccatcgagatcttggaatatgttgttggaatgcgcgaggagaagctaggtacggcaaacccagatgtcgacgacgagaagcggaggcttggggagctattgaaggaggctggccgggtgcgaagcagaaaggcaaagtccctggagaatctgctcgagaccaacccatatatcgccaccaagagaaatgcagttgctgcatgaatcactgttctgaagatgaaaggcgaggattgttactaaggtattcaattggttcgttcagatgggggtaacgggaatattggtgcttacctattaagaaaatatgaaatgatcaaatcactgatctcaaattctttgctgtaaagttttcaaatactattaccgttacatgtacagtgctcttttataccgtt

SEQ ID NO: 2846 - DNA, 393 bp, Zea mays
  Clone ID: 700235386_FLI
ctgagggattgggtaaagatcaatgtcagccctgaggtctctgaatctacaaggatcatttatggaggttcagtaactgctgcgaactgcaaagagctggcagcacagcctgatgtcgatggtttccttgtgggcggtgcttctttgaagcccgagttcatcgacatcatcaacgccgccgccgtgtgaaatccgcttaagatgttccaacccttcaccctgttgcggtgatgtgctgaagacagatcagactatttttttgtttaaccgtgccgtgctatgtaagctactaactttgcgctggtgcggatgctgatttccctcccccctagctttttgtgaggctactctacagcttgattcagcttgctaataatgtttgcctctggacat

SEQ ID NO: 2847 - DNA, 1257 bp, Zea mays
  Clone ID: 700235424_FLI
agtctgagctcgccgctttagcgagcgcaagcagagcctgccaaaaggctagagaaaaaaaaatccgccttctcctcccagtcgcaggccaggctcagcctcccctctcccctcctcggcatcttcgccgccggcgatctatctctctcacaatggcggcgcccatgtcagccatcgactcagcgtggcagctcctgatcgccaacttcaccgagttccagctcgccaccgtcgtcaccttcctgctccacgagaccgtcttcttcctctccggcctcccctccctcctcttcgagcgcttcggactcttcgccaagtacaagatccagaagaagagcaacacctctgcttaccaaaacagatgtgtcttgcgcctcattctctaccatgtatgtgtgaacctgcctgtcatgattttctcgtatcctgccttcaaattcatgggtctcaggagctctcttcctttgccacattggtcggttgttgtatctcaagttcttttctactttgtccttgaggattttatattctattgggggcacagggcattgcatacgaaatggctatacaaacacgttcacagcgtccaccatgagtacgccacaccctttggtttaacatcggaatatgcccacccagctgaaattttgttcctgggattcgccacagttgttggtcctgctcttactggccctcatctcttcaccctgtggctgtggatggtgttgagggttttggagacagttgaagctcacagcggctatcacttcccatggagcccatcaaatttcctgccgctgtatggcggctcggacttccatgactaccatcaccgtgtgctgtacacaaagtcagggaactatgcctcaacatttgtttacatggactggttgttcggcacggacaaggattatcgcaaggcaaagaccattgaggagaaagaagggaaaaatctgtagattgtggaagctgctcagcaagactggcgatagagtttcactcatggaaggagatatggatgcaccctagaaacagtcagtttatctcctgaccatcgatactataggttgagatattgatttcctgtgtttgctatgatcaagaatgaggccctggtggccctggtctgtcatgaactgaatttgatgatttgtcatctcctcctggtggtttgctttgcgtttctttcgtgactcgacgggatgtatacatatggaatggcctggcagcagtaataaccatctgaattgagtcgtc

SEQ ID NO: 2848 - DNA, 1121 bp, Zea mays
  Clone ID: 700235435_FLI
gtccgtccgggtacggcggcggtggcgactggtgcgatgcaaagggcggaagacgcggaggagataggacaactcagcgcaccacacaaggcactgtcagcagcggcggccggagactcccacgccagtgccagactcgattgggaggggagagatgaaggccacgctcaagggtcgctacgagggcgacaaggccacggccgccaccagcctcgccgcccccgccggcgacctccgcctcaaggcctccgccaccgaggccgtcttcgccaacgggccttccctccggggcctcaccctcaccctcgagaagcctggagctttcctcgtcgacctcaagccccacaaccaggatgtgcgcttccagttcatgaaatccgcgctcgtgctcgacaagcgcgtcagcctcacctacacccactccaccagccttgcggcgccggcgccgccctcccgcaccacgctcgactgcactgccaccttcgaccccgccaacaaggtcagcctctcccacacgctcgggtccggcggctgccgcgtcaagtacacctacgcgcacggggtcgagcgcctcaccaccatcgagcccctcttcgacaccaacaagaacgcctgggagttcgccgtcaccaggaagttagcgggaggggacgccgtcaagggcacctacgccgccaccaccaagctgctcggcctcgagtggagcagggactccatcgccggcggttccttgaaggtcgcgactatgtttgatttgtcggaccaacccaaagcaccaaagctaatagcagagagcacatggaattacgagatatgatttttttcccataaaaatgagaaatcatccttctcatattacttacacctactgcttgcttgattactgtatcctccagaacaatggagctattgtttcccatgtgctggtttgcatctggttatgttgaccattttgagctgcggtcgaatgatgccgcgacattggattctgagaatgaatggacgccgaatatggtctgtccttcggcaaggttacatctaaataggagtaacattgtacttaaactgaaacctcatgaccttagtgtctcatatcaacattgagtagacggttcatattt

SEQ ID NO: 2849 - DNA, 1750 bp, Zea mays
  Clone ID: 700235447_FLI
gtcagtcagtcctcgatctgatatcctctcctccctgcagcgactccagctccgatcgattccattccatccatcgagctgcagcagggccatgacgatggcagctacgacgacgatgatgtcagcagcagcgcaggcggcgacgtcgcagctgccgccggggttccggttccacccgacggacgaggagctcatcctgcactacctccgcaaccgcgccgcgtcggcgccgtgccccgtgcccatcatcgccgacgtcgacatctacaagttcgacccatgggacctgccggccaaggcgctgtacggcgacggcgagtactacttcttcagcccgcgggaccgcaagtaccccaacggcatccgccccaaccgcgccgccggctccggctactggaaggccaccggcaccgacaagcccatccacgacgccgccaccggcgagggcgtcggcgtcaagaaggcgctcgtcttctacaagggccgcccgcccaggggctccaagaccaactggatcatgcacgagtaccgcctcgccgccgtcgccggctgcaccagccccctcgccgcctaccgcccgccctccaagttcaggaacgtctccatgaggctggacgactgggtgctgtgccggatctacaagaagtccggccacgcgtcgccgatggtgccgccgctcgccgactacgagcacctcgaccgcgacggaccttctcccggcggcttcttcgacgactacttctgcggcagcaccagcttgtacgccgccgccgcgccggccatcggcggcggtgctgctgctgctggtactacaaacactactacgacgccggccgtcgtcatgcagcagcaccagcagccggcggcgctgccgaggctccccaagatcccctccatctccgagctgctgtgggacgagtacgcgctcgcgcagatcttggaccccccggccgacgtggccgccgaccacgcctcgttcgccgtgcacccgtccctcaaccagctcctggccgtcggcgacgacggctccgatctcatgatgttctcgccgcccccggccgccgcagcaggcgggaagcgcaaggcgatggtggcgatgaacatgagcccagctgacgagtgcgccgccactgcccaccagcaccagtctccggcggccaagcggctcaacggtggctcctgcttcgacgacgcgccgcagccggccagcggcttgccggcgacgatgtcgtccgtgcttggcggcggcctcaaccaccacatgctcccacagttctagatagacgacttctggtagctgactttgttgggggcacatcttccgtgcatgtactgcgtcatcaactgatcaatatggtggatcgtctacgcggaatagctagcaacctgcggcgacatggaaagcaaggatcgagctcgtggattggaggccattaataaagatgggtcgtgcggtgaagaacaattgtagcagtacgtagcactatttgtactggagccagtgttgatcaacgttaggcgtaaccatggtatgtatcccatttttttccctccgttgtagagtacaggtactctatattcatttcaggcgcagtgcgaaggtagctggagcttgatgggtccatgtactactacactagtactcttatttattattcaatatgaagtatatattatattgtcttgctagatcaatgggatatttctagaatgtaattttaattccagatatatagacagattattaagt

SEQ ID NO: 2850 - DNA, 985 bp, Zea mays
  Clone ID: 700235453_FLI
ccagcacgacgaccattaccatggcagcagtgaacctgtgctgctcggatgaggcgctgtcctcgcattcctctgccacctcctcgccacccccggccaagaggaggaagaggtcgccaacggccacgtgaaaactgaagaacgcaagtagataggattatttatacgctttttgggggggcagattaacagggtttgatcgatttctttgcagtttgtttgtcgttttttcttctttgtgattctttctcctttttttcccccctttgccatttatttgttctgttcttttgggttggatctctactcctcggtggggggattctgcctgcctgctcgaccggcccagtcatcatggtggcctctggcctctgcaacgcgcgccagccagtatgtgaaggcgacgagactcgagagagagagaaagaaagacagctactacgtataacagacacatctgtgtttctctgtgcaacactctgtggggcttcttcaaccccgacgcagagctgcagagagggaccattgattggtgagcgagggcagccatggcggcagatggagatggagagggtgggggaaagaggcaatgagttgcggtggatggatgatgattggtagggttaaatgaggtggtcaaagggccgggcggtcagtgctcctgccaagatgcagccctgcctgcaaagtttctgttcatattcatgagggcaaaaattgtttgtttccgagtggtttgtttgtattttgttgatgccgctgaggcgagggcgtcagagagagagaaagagagagagagaaagaggggcatgctttgctttgctgtgatgggagtcacatggatatgccctactgtggtggtgctctggagggaaatatttgtccatctccagagctaacagtgtccaagcatggggcttttgggggcccttgctgattgtttgtatctcttttttcttgcttgtgtatcaatgaagattttgcc

SEQ ID NO: 2851 - DNA, 717 bp, Zea mays
  Clone ID: 700235463_FLI
gcgtgaaggacctcgcgcgcgctctcctctactgcttggtcgtctcgttgccccggccgaacatccaagcctctccatgtctggcccttcgaagaagcagcgcggcatgccggcactggggtgctggctcatggctgtcggcaccttccgcttggccttcacctggtcgtgcttcttcggctccgggtcgctctgctcagccacctactccgagatacaggtgatcggcgtgcatgggcgcacggttgcggtgtggacgctgctgtcgtgcaccctctgcttcctgtgcgccttcaacctcaccagcaagccgctgtacgcggccaccttcctgtccttcgtctacgccttcgggtacctgagcaccgagtgcatggtgttccacaccatgagtgcagctagtctcgtcccgttcaccttcatcgctgtcacatccatggtctggatgctgattcaatggaactcggatggtcacggcccccgtcttcttcatgggtctactgcttccaagcagccatgacttcgcaggttctctcacctatggcttccttcaactacatacggttcagtgcatgcaagcaccatggaattatggaatatctgtaatcttttgtaataatcgtttctatgtcccgcaggctagtgaatgaaactagcaagctatcatctgtgataaatttgtaattttaccactctcaatttcggcttcctgttatt

SEQ ID NO: 2852 - DNA, 1832 bp, Zea mays
  Clone ID: 700235548_FLI
gcggccagctgatcgagccgcccggccggccgcgcctggtgtgacgtgccatctcgatctcgatggggcatcttgctcctcctcgctctcttcttcttaatttgccgctgcgtgcggccttttattcgccctgcctctagctgctgcttcttccaggatcggggatcggagcttgtgctgctactgctactataccagcgctagctagcagcagccgccggccggctcgcgcaagctaaggaagggtcgacatgacgatggggctccgcgtccgcgactcctccgcgctgctggctctggccgtcgcgctcgcctgctgctccgttgcagtggtggcctacgaccccctggacccgaacggcaacatcaccatcaagtgggacgtgatctcgtggacgcccgacgggtacgtggcgatggtgacgatgagcaactaccagatgtaccggcacatcatggcgcccgggtggacgttggggtggtcgtgggccaagaaggaggtgatctggtccatcgtgggggcgcaggccacggagcagggggactgctccaagttcaagggcggcatcccgcactgctgcaagcgcaccccggccgtggtggacctcctcccgggggtgccctacaaccagcagatcgccaactgctgcaaggccggcgtggtgtcggcgtacgggcaggacccggcggggtccgtctccgcgttccaggtctccgtcggcctggccggtaccaccaacaagacggtgaagctgcccaggaacttcacgctcatggggcccgggctgggctacacctgcgggcccgccgccgtggtgccgtccaccgtgtactggacgcccgaccaccggcgccggacgcaggcgctcatgacgtggacggtgacctgcacctactcgcagcagctggcgtcccggtacccgtcctgctgcgtctccttctcctccttctacaacagcaccatcgtgccgtgcgcccggtgcgcgtgcggctgcggcggccacggcggccacgcgggtccgggcggctgcatcgagggggactccaagcgcgcgctgtcggccggggtgaacacgccgcgcaaggacggccaggcgctgctgcagtgcacgccgcacatgtgccccatccgggtgcactggcacgtcaagctcaactacaaggactactggcgcgccaagatcgccatcaccaactacaactacaggatgaactacacgcagtggacgctggtggcgcagcaccccaacctggacaacgtcaccgaggtcttcagcttccagtacaagccgctgcaaccatacgggagcatcaatgacactggcatgttctacgggctcaagttctacaacgactttctcatggaggccggcccgttcggcaacgtgcagtcggaggtgctcatgcgcaaggacgcaaggaccttcaccttcagcatgggctgggcgttcccgcgcaagatctacttcaacggcgacgagtgcaagatgccgccgccggactcctacccctacctgcccaacgccgcgcccgtcgtcgcctcgcagctggtcctgtccgccgccgcctcggcgttcctactgttgctgctcctggtggcatgaccgtgaccgaaccaagggcaaggcctccgttttgttttcccgtctcgtcccgtgggcagggagcagacttcagtaggcagggcattttatttggtttttttgccaaggattcaacacttgggttttcgtcagaggaaaactgtcgtgtatgtagtgtgagttgcaggtcgtcggatccccacgtacaagacaatctttggatctagaatatgcaaaacgtgaatcagc

SEQ ID NO: 2853 - DNA, 1318 bp, Zea mays
  Clone ID: 700235557_FLI
cactgcaccacttctgctaatcccttgttcttgtgcctccgatccggagctctcaccattgtcatcgtcaatcgatcaatataaagcgagccaattaccccaaggagctaccgcttgcgacggtatggcgatcccggtgattgacttctccaagctggacggccctgagagggccgagaccatggcggccctcgctgccgggttcgagcacgtggggttcttccagctggtgaacaccggcatctccgacgacctgctggagcgggtgaagaaggtgtgcagcgactcctacaagctgcgggacgaggcgttcaaggactccaaccccgcggtgaaggcgctcacagagctcgtggacaaggagatcgaggacggcctccccgcgaggaagataaaggacatggactgggaggacgtcttcaccctccatgacgacctgccatggccttccaaccctcccgccttcaaggagacgatgatggagtaccgcagggagctgaagaagctggcggagaagatgctgggcgtgatggaggagctgctggggttggaggagggccacatcaggaaggccttcagcaacgacggcgagttcgagcccttctacggcaccaaggtcagccactacccgccgtgcccgcggccggacctcatcgacggcctgcgcgcgcacaccgacgccggcggcctcatccttctgttccaggatgaccgcttcggcggcctgcaggcgcagcttccggacggcagctgggtcgacgtccagcccctcgagaacgccatcgtcatcaacaccggcgaccagatcgaggtgctgagcaatggccggtacaagagcgcatggcaccgcatcctggcgacccgcgacggcaaccggcgctccatcgcctccttctacaacccagcgcgcctggccaccatcgctccggcgatccccgccgcaggggtcggcgacgacgactacccgagcttcgtgttcggcaactacatggaggtgtacgtcaagcagaagttccagcctaaggcgcccagatttgaagccatggccacgacgacgaccaagtgatgacctagcagcgactcagcgagagcctaaataaatattaattcacagtcgtcaagttaatcttgtggttatacggtacgggcggggcttgtacttatgtaggttgctaagtcttaagtgtgtagtttaattaacgtgtgtgtggaatgtacgcgtcatacaaatgtgttggtgtgtgccctgccgcaagattgcggtgagcggtggatctatggtcaacgggtgcctaaatgatttgtgcttttgtagcat

SEQ ID NO: 2854 - DNA, 1995 bp, Zea mays
  Clone ID: 700235561_FLI
ggccacggcaacagaaggcagactcaacctcggcttcggaggaaaccccacgtcgccctgcctagggcacagaccgccacgtcaacaggaggtgccatcatcatcccaccccgaatcgactcgggtcacggagaacaagaccggcgtctcatccggccagctccgccagaggggcaatgatggcgctccacaagctctatgacggcggcggcccctagctctcttacgaaagcaggacaacgtcagcagggactcgaccgctccaacagctgtccctccatcaggctccgccgcacctccaacagccacgacatcacgccagcagggtgcccagatctctccggctgccacattggcatgtacctagggcgctagctctccctccgctagacacgtagcactctgctacatccccattgtacacctggatcctctccttacgactataaaaggaaggaccagggccttctcaggaaaggttggccgcgcgggaccgaggacgggacaggcgctctcttggggccgctcgcttccctcacccgcgtggacgcttgtaacccccctactgcaagcgcacctgacctgggcgcgggacgaacacgaaggccgcgggacttccacctctctcacgctcggctccggccgcctcgcctctccccccttcgcgctcgcccacgcgctcgacccatctgggctggggcacgcagcacactcactcgtcggcttagggacccccctgtctcgaaacgccgacaaaaataatttgcattcatgataatctgccgttcgactattaaggaattaaggatgatgccatcacgtttcgtaactattaatttctgtttctgcacaagatcttgcatctattgtgaattctctctttgaatttctaatgggaccaagacatctagagagattcaaatgcatttttcattttactcaactgacacttaaatatctgatacattgttttgaatgcccgatgagattgatagtgcaactacctccacattattctgtgcatttctcaggggagtcacaatcaatgaaatggaccatgagattaagggttgttctctgtcttgctgaggctttagaatattgcaccaacaggggccgtgctctctaccatgatctcaatgcctatagagctctgtttgatgatgattgtaaccctagactttcctgttttggcctcatgaagaacagtcgtgatggaaaaagttatagcaccaatttggcatttacgcctccagaatacatgaggactggacgtattactcctgaaagtgtcatacacagctttggaaccttactgattgatgttcttagtgggaaacatattcctcctagccatgcccttgacctgattcgggaccgaaacttcaatatgctcttagactcatgtttagagggtcaattttcaaatgaggaaggggcagaaatggtacgattagcttcaaggtgccttcactatgaaccccgtgaacgacctaatgtccgatcacttgtgcaagtattgactcctctacagagggatgttgagactccatcttatgtgctgatgggtgttccacgtggcggtgcatcttctatccaaccattgcatctttcccctcttgccgaagcttgttccagaaaggatctgacagcaatacatgaaattctagaaaagacaggctacaaggatgatgaggggactgcaaatgagctctcgtttcagatgtggacaaatcagatgcaagatacactgaactcaaaaaagaagggtgacaatgcttttcgacaaaaggattttactactgccattgattgctattcccaggtttgaagtttgatgtgttctgttcttctattttgtatggatgtgacagagatactggagttgcatgattgaatgtaattagagtcatacaggttcaacgtcttctaatttgttccctaatactcgtatattaaggcactatgggaaaacagctctgggttacatatgct

SEQ ID NO: 2855 - DNA, 951 bp, Zea mays
  Clone ID: 700235625_FLI
cgcccctgtccatccgctcggccgagcgctccccgagcacggcagctcgcccaacctccctgctctctgctccaacttcctggttgccgcgccctgtgtcgcgtgctccctgccagccgtcagccgagtccttccccatccccatggcgcccagcttggtctgcgtgacgctactctcacacatggtggtcaccgtcgagtcttcccttggctcgctcctccataacttgctcctgcgcgctctgctcgtcctatggcgctcggcatccagttttctgcgcgccgactccttgttcccatcctgtgtgcactacaagtttctttctccaatcatcgcgcagctccctcgagctctgtccatgccgtccctcgagctctgtccatgccgcgtcgtcgttcgtcgtcacgtcgttcgccatcaagcctcactgtcattcctgttgtgcctcgcttcggatgtgttcgattaaatgtcggatcaagaatccaagatgtcgctcctcctcgctgtgaaatcctcacgctcaccattctctattcgatctcgtcgtcaagctgaaggccgtcgtcgttcaggcaactaccaaatcaagttgtgatgtggtacgttaattaatcgcgcgatgcggaagacaagccaagtcgaccccaagcgcggactactccgcatgatgatgctgatggacaaacctgaagatgttcgccaagtggacgtcgtctaacaacactaacctagtgttactcagatctctgcgcagaaggtcaacttgggcatcaataagaatctggtcccgtcaaactgactgtgattccattatcttctgtttgaaaatgttaccgacaaactaccctgttttctttgtcaatttggcatggaagcagaagttgtgtgcttccattctcaagttgttgtctttgtattatgaaattatgaaatattccattattcat

SEQ ID NO: 2856 - DNA, 849 bp, Zea mays
  Clone ID: 700235634_FLI
gcgtcaccaataccacgcgagccgtccccccctccttgtccatccccggccggcacgacgaaccgcctgaggagggagcaatagctcggggctctcgctcttggctgcgtgtctgaagctgttgatgcgagtgaaggctcggtttccatggctctcatggcggcggggatggacgaccacgacgagtacgccaagctcgtcaggaggatgaacccgcccagggttgtgatcgacaacgaggcctccgacgacgccaccgtgattaaggtagacagcgtcaacagccacggcacgctgctcgccgtcgtccaggtcatcgccgacctcaacctcgtcatccggaaggcatacttctcctccgatggaaactggttcatggatgcgttcaatgtcaccgaccgtgacggcaacaaggttctggacgcctcaaccatctcctacatccagaagacgctggaggtggacgactggtactacccgggggcgcacaacacggtgggcatcgtgccgtcgggggactacacctccatcgagctcacgggcacggaccgcccgggcctgctctccgaggtgtgcgcggtgctcgcggccatgggctacgcggtccagagcgcggagctgtggacgcacaacacgcgcgtggccgccgttgtgcacgtcacggacgccgagactggcggcgccatcgaggactccgcccgcatcgccgacatcagcgcgcgcttgggcaacctgctgcgcgagcacagcgacgtgcgcgctggcggcggcgcgggcagcctggcactccacaaggagcggcggctgcaccagatgatgttcgacgatcggggagtggaaggccacgtc

SEQ ID NO: 2857 - DNA, 2340 bp, Zea mays
  Clone ID: 700235645_FLI
ctagatctctcctctacagcttcccagcaagccagttgcatacatttcactgctgttatctttctcagcttgatcagtgctttagttttctctagttccaatggcttgcgattccccgtgcatggcgacgccccgcgccgacccgcttaactgggggaaggcggcggaggagctgatgggcagccacctggacgaggtcaagcggatggtggccgagtaccgccaacccttggtgaagatcgagggcgccagcctcagcatcgcgcaggtggccgctgtggccgccggcgctggcgaggcccgggtcgagctggacgagtccgcccgtggccgggtcaaggcaagcagcgactgggtcatgagcagcatgatgaacggcaccgacagctacggcgtcaccaccggcttcggcgccacgtcgcacaggaggaccaaggagggcggcgcgctccagagggagctcatcaggttcctcaacgcaggcgccttcggcaccggcgcggacggccacgtcctgccggccgatgcgacgcgcgcggccatgctcgtccgcatcaacaccctcctccaggggtactccgggatccgcttcgagatcctcgaggcgatcgtcaagctgctcaacgccaacgtcacgccgtgcctgccgctccgcggcacggtcaccgcgtccggcgacctcgtgccgctctcctacattgccggcctcgtcaccgggcgtgagaactctgttgcggtcgctccagacggcagcaaggtgaacgctgccgaggcattcaagattgccggaatccagggcggcttcttcgagctgcagcccaaggagggtcttgcgatggtgaacggcacggccgtgggctctggcctcgcctccactgtgctcttcgaggctaacatccttgccatcctcgccgaggtcctgtccgccgtgttctgcgaagtcatgaacggcaagccggagtacaccgaccacctgacccacaagctcaagcaccacccgggacagattgaggctgctgccatcatggagcacatcttggagggcagctcctacatgaagcttgccaagaagctcggcgagctcgaccccttgatgaagcccaagcaggaccggtacgcgctccgcacgtcgccgcagtggcttggcccacaaattgaggttatccgcgccgccaccaaatccattgagcgcgagatcaactccgtcaacgacaacccgctcatcgatgtcgcccgaagcaaggcacttcacggtggcaacttccagggcacgcccatcggggtatctatggacaacacccgtctcgccatcgcagccatcggcaagctcatgtttgcgcagttctctgagctcgtcaacgactactataacaacggcttgccctccaacctgtccggtgggcgcaaccccagcttggactacggctttaagggcgccgagatcgccatggcgtcctactgctccgagctgcagtttctggggaacccggtcaccaaccacgtccagagcgcagagcagcacaaccaggacgtcaactcgctggggctcatctcctccaggaagactgctgaggccatcgagatcctgaagctcatgtcctcgacgttcctgatcgccctgtgccaggccgtggacctgcgccacatcgaggagaatgtcaagagcgccgtcaagagctgcgtgatgacggtggcgaagaagactctgagcaccgactccaccggtggcctccacgtcgcccgcttctgcgagaaggacctgctccaagagatcgagcgcgaggcggtgttcgcgtatgccgacgacccctgcagcgctaactacccgctgatgaagaagcttcgtaacgtgctcgtggagcgcgccctcgccaacggcgctgctgagttcaacgcggagacctccgtgttcgccaaggtcgcccagttcgaggaggacctgcgcgcggcgctgcccaaggcggtggaggctgcacgggcggctgtcgagaacggcacggcagcgataccgaacagaatcaccgactgccgctcctacccgctctaccgcttcgtgcgcgaggagctcggagccgtgtacctcaccggcgagaagacgcgctctcccggcgaggagctgaacaaagtgctcattgccatcaaccaaggcaagcacatcgatccgctgctcgagtgccttaaggagtggaacggcgagcccctgcccatctgctaaacagagaaacggataggaagaagactggagtgttcattgttcagtagttttgcgtggttggtagcaaaggctaatttgtcatactctacttatgaaacgttatattttcaagaaatgtgtattcc

SEQ ID NO: 2858 - DNA, 1347 bp, Zea mays
  Clone ID: 700235646_FLI
gtgatgcaattgggatgttcggcaaggtttgtgatgaacatgaagggtactttgttcatgaggccctttccattgccatcgattgcttacaacttgatattcaaatgaggccagaaatggaacatgtacttttccgtctccggatcattgttgctagaagcaaacttgctgctggtagtaacaataaacctagccaacatattggtcgggcccttgttaacaacattgataaacttcacccaactctcatatcaaccatttccatggaggaactgaatgaagcaaccgggaacttcagtaatgatgttcttataggacagggaccatacgccgaatgtttcctgggagttcttaaagatgggcagaatcttgctgtaaaaaggctacgtacttctgaagaaattcaagtagaggttccgaccattttaagaatgtgttaccatgacaatgttgtgcaatttctaggatgttttcttgaagggggaactcgtgttcttgcttatgagtacgccccaaggggctccttgcatgatattcttcatggtaaaatgggcatcaagggagcccgaccagggccacctctatcgtggttgcagcgtgtgaagattgccgtaagtgctgcaaaaggcatcgagttcctccatgagaaggttgatcctcgtatcatccacaacaacatcaagtccagtaacatacttctctttgacaacgatgttgcaaaaataggtgacattggtgtttcaatacatgatgcccatcgccgggttcataattgggccgagtactattctgtcagggaacatctagcacctgagttcgcattcagaagaaggtatagcacaaagagcgatgtctacagcttcgggcttgtactgttggagcttttaactggccgctcagtttttcatgttgcgacacaatgtggcccgaggagcgcagttagatgggctaaaccaatgcttagtcaagacaaggtggaacagtgcatagatccaaggcttggaggagggtacctactaaacgatgtcagaaagatggcttctgttgctgcactgtgtttacaagacgagccagagttccggcctgaaatgagcatcgtcgtcgaggctctgagcctgttactgaacagcaagtgaacaagtaaccgtccctgcattggtgaagcacgtggaatgtgatttccttgcatgtcattgcgagctcaagatcacgggtttcgtgaaggcgattggcccccaacagaaagttatgattactgcattcatctaggcttggaacttgtgctttctttgtctgtgcacatgtaatactcaaaattctaaataaagaatatagagagatcttctc

SEQ ID NO: 2859 - DNA, 1433 bp, Zea mays
  Clone ID: 700235670_FLI
cgatgccaagaaggtttctgttggtataatcacaccatataagttgcagttgaaatgccttcagcgggaattcaaggatgttatgaatactgaggaagggaaggatatctacataaatacagttgatgcttttcaaggccaggagcgtgatatcattattatgtcttgtgtccgtgcttcaaaccatggtgtaggttttgtcgctgatatacgtcgtatgaatgtagctctaactcgagcaaggagagctctatgggttgttggtaatgctaatgctctcatgcagtctgaggattgggcatcactaatagcggatgcaaaggccaggaaatgttttatggacctggatagcattcccaaggacttcttacccatgagggttccatccaatactccaggtaggaattcttccaacaacatccggaggactggtggtggacctagaccaagacgcttggacatgttctcagaaccaagggctggtatgaacatgaggcctgatgaatatgagcgtctgaattctgttccaagaaatggtagctacaggaatttggatgattttgtccaccctggagatcgctccagggataatatgcagtttggacatcctaggaggccaaatgcttctaatggtaggagagaagtctaagtagtgttgctatcaataactctggtacagcatggaacattgatgaagagctctgaacagtccaagattcagcaaggtgcagatgcatgttctgaagatcagttgcttgtgcattagattccttgcaacctttggtgggggtggtcacaataaagcattgctgtcagcggaggatgtgcgaatctaccatgttgtgacctggatcgagacacattcatgataggtgattaaaggctcatgatgtcaggtggaagaaaggctgctgtagccctcagtgttatgaactttgcaggattttcttttttagatcgaagctgtctgctgtgttttgacgttgcagtccttgctttagccagctccatctttccgtatatatgtacatgcatgggcatttccattttgctgctgcgatcgttgcatgccaggagaaagctcactggttctagatgaggataggtctccagcattgttgcctgattgttgctgcgatcgttgcatgcttgatatgtctggtaggatcagtatgctaacataggcaacgcttctgtatcatattcatatgacaaattccttctgtatacagggtcgagatctagagagaaaaaaagttcattatttcattcagctcatgttgttcccctttgttcttgttaattttttctgtgcatattgttgtaatatgttaccatgtttgtagcactgatatttctgtttatcagtggcatgatactctgcttgtatgttgatctacggatagttctggcactttgcagagtgttgtctt

SEQ ID NO: 2860 - DNA, 928 bp, Zea mays
  Clone ID: 700235682_FLI
aaagaaggccttgaactattgaaggcagccatagaaaaggctggctacactggaaaggtggtcattggaatggatgttgctgcttctgaattcttcggtgagaaagacaagacttatgatcttaatttcaaggaggagaacaacgatggctcaaacaaaatttcaggcgacagcctgaaagacctgtacaagtcctttgtttctgagtaccctatcgagtcgatcgaagacccatttgatcaggatgactggagcacttatgccaaactcactgatgagattggacagaaagtgcagattgtaggagatgatcttctcgttaccaaccccaccagggtcgccaaggccatcaatgagaagacctgcaatgctctcctcttgaaggtgaaccaaatcgggtctgtgaccgagagtatcgaagctgtcaggatgtccaagcgcgccggatggggagtgatggcaagccacaggagtggcgagacagaggacaccttcattgctgacctctcagttggcctgtctacgggccaaatcaagacgggagccccttgccggtctgagcgcctggccaaatacaaccagctgctcaggatcgaggaagagctcggtgatgccgcggtctacgccggagcaaagttcagggcaccagtggagccctactaagaaaggaagaggatgaggatgttttcttgtggagctatactagctcgctgctgccttttgttacaatgtttgtacggtcgcaataaatgtatggtcgtgtttgctcgagagctactcaggtgattttgtcgtgggagcaccaaaatcagaaaagaacccttttttttcaatctctctagattctgacgagtggtggtctgcactcgtcgtaatgtcgtttgcctaaactgattttgatggaacaggaaatcttgctggtcttgcc

SEQ ID NO: 2861 - DNA, 1371 bp, Zea mays
  Clone ID: 700235692_FLI
ttgttttcaaaacattgtgtatgttgtatatattctaatatgtttttaacagtgtctgatgaacatgcaatatgtcaccgtatggtattggtatgtgggacatcaacctgccacatggctgtttcaaaggacagattgtttatacctggtgtctgggggccgttttggtctgcgatgatccctgagttttggctcacagaaggtggccaaagtgcaactggcgctctgctcgattacattattgaaaaccatgttgcttctcctcttctttctaaccatgctgcttctcaaagtatatccatatttgagctactgaacaagatgttgctttctatgtcacaagagcagaatagtccgtttctttctgcattaactcaagacacccatgtgcttccggattttcatggaaatcgatttgcaggatgatgcttttcttctcctgccatcataattagacggtcaacaaaccatacaacagctgaagcagaaagccctcatatatttctatgaggctatacatcacaatcacaccagaatgtggcatagcatactctttatgtatgatgtctcatgacatctaactgaaaattgcagaggaataatctttaagtagcacactagttccaatatgtttgacttgagtgcaaactattataggtctcctgttcctgatccaaaatccaaaggagtgatttatggcttgacacttgatacaagtgagaagcatttagctcttctatacctagcaacaattcagggtattgcttatggtactcgtcatattgtggagcattgtaatgctcatggccacaagatagacacacttcttgcttgtgggggacttgcaaagaattctctgtatatccaagagcatgcagatattacaggatgtcctataatacttcctagagagagcgagtcagtgcttttgggtgccgctgttcttggcgctgttgctggcaagaagttcccgggtgttcgtgatgcaatgaaggctcttaatgcagcggggaaggtcgtaaatccgtcttcagaccctaaggtgaagaaataccacgatgcgaaatatcagatattcagatccctgtatgagcaacaactctctcatcgcgcaaccatggcacaggcattgcagtagggctctatggccactttggctcttcactcttggttattgatacccttggtttcatcgccatgttttattggcttatttacatgtaatcaatatcgccttgagtgatttgatagaatagaaaccatgataagatgcatgtatacacaaaagaaaactggtaagatgatctttctcacagggacgtgaaatccccaaagcctgtgcaatgttaataaaagaaaaggaggttcatt

SEQ ID NO: 2862 - DNA, 564 bp, Zea mays
  Clone ID: 700235791_FLI
aagaactcggatctcaaaagctttcttggtgatgactggatccggattcataacaggaaatttcagcagcaagctatgagatatgagagggcatcatggaataatgttctctcttacctcagtgatgatggcttgtgtgcttctggtgatgctgcttctcgcaaaaccatcagggagaagataaaaaatttcaatctgtcctttgaagaggtttaccgagttcagacagcatggtctgtcccagatgaccaacttcgcgacgacgtccggatttcaatatcactgaaagttatacaggcctataggaccttcgtgggaagatattcaggctttcttgatggctcaaggcatcgagatcgttatgtaaagtacagggcggaggatctggagacacttttgctagacctttttgaaggaactcaaaagacactgcagcattcttgtcgagtgtaagattaaaccagttcttgaagaagagatgcctcagtcttttctgggttccttctttggtttgtaatggactaatggtactgttgaatgagtatagtgatatcctgttctgcc

SEQ ID NO: 2863 - DNA, 827 bp, Zea mays
  Clone ID: 700235793_FLI
gttcccggagtaccgccccgcggcgagccccaccttcgtgccgtccatccactccaactcgcacaagagggtggtggagatgcgccagaaggctgtccggagcggcgacccgtcgtgcgaccttctccagttcatccgccgccgggattgacgtcccggcacggcgtcgccggactgtcggtcggtctcgtcccccatatagctatatatgtatgcatgcatggttgcttcatcagtcgtcgtcgcccatcatggtcatcatcaccgcttcaccggtcaccgccatggatcgtctcccgcccatcatcacatgcattggtttgtgtcagcatccatccaatcccaatccatcgccgggcgtcccggcgttgttagttcattaggtcttttttttcctcatcgggggctagtgttattttacctttgatccttttgtctattggttaattggttccccctggatgttttttgtttgtatagagtgaaaaagagagaggagaaatagatgaatcagagtggttgctgtattgcaattgcagttgcttgcaagctaggtaggtgagaaggagagctaaaccagcagcagagggagacagatttagagaggaaactttgcagctagtcagtcagtcagtcacttagaaaaaaacaaggagagtgcttgaagcaggtgaaagggcaatttgttggtttgctaattagaagagaggttctgtcaggtcaggtcaggtagttgctatcattattcatgaggattttcaaacttaatagggggacagccatcatccatcatagtttgtatttggaacttggtatactgaactctg

SEQ ID NO: 2864 - DNA, 808 bp, Zea mays
  Clone ID: 700235805_FLI
gtacgacgaggccatctgcccggtggactcgttccagaagggccccatcctggacgacgagatcaacgagaccatcgtccggccgctggtgcccggcgccaagctccacgccgtcgtcgacgcgtgccacagcgattccgtcctcgacctccccttcctctgcaacatgtccaggaccgggaactggcagtgggaggatcaccgtccaccgtcgggcgtctgcaagggcacgagcggcggccaggcggtgcttatcagcggctacagcgacggcaaaagcaagttcagcatgacgccggaggcctgcgcggcggtgggggccatgacccacagcttcatcaaggcggtggaatgcgagccccagggggtcacctacggccgcctgctcacctccatgaaagccatcatgaccaacgccggcggctgcaaccagcagctgcagggcgcctgcgcacccgcccgcaaggtcgtcaacttcagcggcgtgcaggaacctaacctgtcttgctcggagatgttcgacgtctaccgcaagccctttgcgctgtgaacctcctctgcattgccattgcctttgcagactaccacagattcccgtctggactctatatataaattaccgtgacggaataataaaccagacggatttatattatatatgatgatatgtcataatgtgtgccttaattgtcttgcggccaataatgtgtgtccatgtgtcgatcggttaccggccctgagccaagcttatagcctgtggaccgacgactttgttgaccattataaatacaatgttgataatgtttat

SEQ ID NO: 2865 - DNA, 1470 bp, Zea mays
  Clone ID: 700235839_FLI
tttcaaatcccattactttctcccttaaaacctcctctcccctcgttctcctccgcctcctcctcccacctccccacacgggcacacctgccctccccgtcgccgcggacccactcccatggcaaagctcccgcgtctaccctgctcgtttgccgttctcgcgctcatgtgcatcatcccgctcacagcgccgcggcctgcactgtcctcgcgcgcggccccaagggacggtgtctccttcgccggcgcaggcaacacgatacatcaacttcttaaagatcacggccttcccggaggactgctcccgcgcggcgtggagtcgtacaccctggacgagtcgaccggcctgctggaggcgcggctgtcggcgccgtgctacgccacgtacgacaacggcgaactggcctacttcgacaacgtggtgcgcggcaacctcagcaagggcgcgctccgaggcgtggagggcctctcccaggaggagctcttcgtctggctccccgtcaagggcatcctcgtccaggaccaggaacccggggtcatcctgttcgacatcgggttagcccacaagagcctgtcgaggtcgctcttcgaggacccgccggactgcaagccgtcggcctccggcgggatgagcgccgcctccgccgccaggagggagggcacgcaaggtgttactggactacggttgaggcgagagatggcagcagcaggcagcgaccagagtcaggagcagaggtgaggaggaggaggaggagctctgagacgacaacacccgagacaatggcgagccagttttccgctttataaaatcctgcggtgagtgagtgagtgagtgagtgagagagagagagagagagagagtgccgccgccgccgcaacaagaaatacaacagctgcagcttcctgcagaggttggaatgtatctactaagatgtgggtacctttttgcagttcttttttctcgcttcttttcttctcttttagcccaagctcctctcttgtccatgcactgtgtgaattaagtttgtcagtcagtcaattgttgttataaacaaagcacgcaggggagaaaaagaacaagggaaagagttggctgagaagccagttgggggatccgcggactgtggtctggcctagaatgatagatttttgttctcgtcagggataaaattcttctggtgagggtttgttgcatgtgccagctcagcggggagtgagctgggcacagcacatcctccatgtgggcttgtgttggcttggctggttgttggttggttcacttcttccgtggattgataagtatatatatataatattatgctaggtttggttaggccttatatatagcactattaaagaatatagaagttgcatttctttttatgtcttgatgaaaggtatctctgtcaatctgtctgtcaagtagctgtattggaatttttaaaaaatatatatatatggctgtattcc

SEQ ID NO: 2866 - DNA, 1025 bp, Zea mays
  Clone ID: 700235843_FLI
tttttgtcaatggatctttagcttttggtggcatgggaggtggtgcagatagtgttcatcctgctgacactcttaagtgtcttgaagatctcagcaagattagtggcctaaaactccctgacttcactgagctcctgtcagagacaatttttaggtctgaggtattaggcaacctgttggccactcaaaagttggatgatcatgacattgaaggggtaattcatctgtactacaacataatttctcagccttgtttagtctgcaaaaacctaactgatgtagagctattgcggaagtacactttcttgcattctcttccgttggacaaaagcctgaagatcgttagggacttcctcatttctgctaccgcaaaggactgtagcctgatgatcagctttcggccaagagagaatgggtacagattctgagtatgattcagtgtttcttgaatcagtgaagcgaacctatgagtacaaggcatatttccttgatctggatgtgaaacctctggataagatggagcattattttaaactggatcagaggatagtcaatttctacacaagaaatgggggaggtcttgccatctccaaagggcagtaataccaaagacacttcgaggatttatacatctggagaagggtgcatcagggagtgttggttgttgttcctgctgcttggtgctgctgttgtaacttcatgagtacagtcccaaggttgggaggctcgacccttaacgcctggaaagggcacagggagctgtgttgtccgtcagtcgctgttgtaactcaaactagtgcatacaccgtggcttgtcacggtaatttccgaagatgtccaacgttagttgagacaaccgaactgcttaccgtggcaatcactcattgtaacatcaagttgaaaatgagggctgaagtttccctcacaggctaccatatgtcagatatgtcctttgtaccactaataagtgcccctggggtcatgtatgaatgtatctcaatttgctattgcagaaatgtttggtg

SEQ ID NO: 2867 - DNA, 795 bp, Zea mays
  Clone ID: 700235889_FLI
ccgcagcagctgccgcagctactggagcatctggatttgaatttggtgtggacccaaacgtagatccagaattggcacttgccctgcggttgtctatggaagaagagcgggcaaggcaagaggctattgcaaaaaaggctgctgaagatacttctaatacagaacataacaatgtcccaagctcaaacagtgattctgttatggctgaaggagaacctgcctcaaatgctgctgctggtgacaaagaacaaccaaaggatgatgacgatctactacagcaggcacttgcaatgtcaatggagggtggtgcttcaggatctgcagctgtgactgactctgctatggcagaagctggtgcagttgaccctgacttggcattggctcttcaaatgtctgtccaggatgcaaacatgtccagtgacactgatatgagtaaggtgtttgaagacagaacgtttgtgtcatctatccttaattcgcttcctggtgttgatcccaatgatccatctgttaaagatttgctggcatcgttgcacagccagggagagcaagagaagaaggaagacacgtcagacaaaacagaagacgataagaactgatatagccatgttcacgcttccatgcgtacaaagaaattaaagaccggtctccattgactgcgtttactctcttggtcgtggagtttgtttatcctcatataacggtgctttgattataacttaccgccgagggaatttgtattatgacactgcaacaatcttctctccatatatgttcaagggattttcgtgtttc

SEQ ID NO: 2868 - DNA, 1419 bp, Zea mays
  Clone ID: 700235934_FLI
gaagcagcaaaagctgttgaagaggaaaggataaggaaagaagaagagtctaagaaagctgcagaagctgctctacatcagaagaagctaaaggagaaagagaagaagctgctccgcaaagagaaaactcggttgcgcactcttgcagcacctgtcattgcagatagccactttggtctgtcagaggcaaatgttgaatcggcatgtgcttcacttgatatggaacagctgaagaagctctgtgatggaatggatagtaaggatgcagctggaaaggccaggttgctgagcaatgtacttcgcaatgaaagttcctcaaaggaagcaaagaaaattgaagggaatggtgtggagccttctgccccaaaatccaactctacaggaggtagagcgacagaagccagtaacagcatattgaacagctatgagaaaaaagagagaccatggggaaaggaagagattgagatgcttaggaaagcaattcaaaagtatcctaagggaacatcgaggagatgggaggttgtttctgaatttattgggactagcagatcggttgaggaaattctcaaggccaccaagactgttcttctgcagaagccagactcatcgaaagctttcgactctttccttgagaagcggaaaccgacacaatcaattgcttcgcctctttcgacccgagatgaaattagttcaactgagggagctgggactgcatcgtcaaaggctgcagcacaatctgcgaatagccagacagccaatgagaaagctgctgctgatcctgtcacggatggaggaccatccgtgtcagatccagatgcctggacagatgcgcaggtcctggctctagtccaagctttgaaggcttttcccaaggatgcaagccaaagatgggagcgtgtggctgctgctgttccatgtaaaaccgtagtccagtgcaagaaaaaaagtagcggcaatgagagagaatttccggagcaagaaaagtggggagtaggctgaggcattgcctcactggaagtatattttgcaagaaagagtctggacggcaatatttatagaatggattcagcatcttagctagagaggtattgcttggcgaacctttcatctcatgccaccagtggtgaggataattttgttatggagctgtgacagctcatttattgtggctggccaccagggttgttttactttgagcagccgtagcaggatgccatcgaagctcatctattgttgatgggctgatggttggcaattttgccgcagtggttcgtgtgggattttgtttctgcaggctcctggggttgtatatgcgctgctgtaagccaatgaatgaattgtgagctattccaacattcttagagtcaattcatctcaggtttgatcaaatttatataataaaacactaatatttatgat

SEQ ID NO: 2869 - DNA, 1281 bp, Zea mays
  Clone ID: 700236001_FLI
aaaaatggagggaaaatccatcatctagagaccatgttatattacttgacatatcatatggtgtggaaaataaccctgtctgccttgtaaatgaggttgacgatgaaaagggccctagccgcttcacttatacaactaatttgacatatgggaattctctcagctcgatgagaaagatgcaaggttgcaaatgcataagtgtatgcctccctggtgataacaactgctcctgtacgcatcgaaatgctggtgaccttccttacagtgcttcaggcatacttgttagccgaatgcccgttttatacgagagtggtgattcctgcacatgttcacaaaattgccggaaccgagttgtacagaaaggtacgcagatccgttttgaagtttttaagacaggagatcgtggttggggcctccgtagttgggatccaattcgagcaggcacatttatctgtgaatatgcaggtgaaatcattgacataaatagagtgaatggtgaagatgactacatatttgagacttctcctttagagcagaatttaagatggaactatgcaccggaattgctgggtgagcctagtctttctgactcaaatgaaacaccaaagcagctgcctatagtcatcagtgcaaaacgaaccggcaacatagctcgctttatgaaccacagctgctcacctaatgtgttttggcaaccagttctgtatgatcatggtgatgagggatatccacatattgcattctttgcaattaagcatattcctccaatgacagagcttacctatgattatggtcagaaccagcgtaatagtattcaaatgggaacccattctggttttcggaagtctaaaagttgcttatgttggtccccgaagtgtagaggttcctttggctaataaccagccctataaggaatatattggatcataatactccatttcaaagttacacctaagatatctgctggtcgacttttatattcagctcccaaaaatctgtcacaagtttgtgagagcaactgaattgtctttaccagcagaagcagcccgtcatggtggcctgtatgaagcagcaggggtctcctatgtcctaggtgttccatgcaccatcgaataaatccacccctcttcatgttagaatgggaaacggggatgtgttttgcacaaattatctgtcatgcagtcgtcgtattaagttttcttgaactagtttgtagtcatcctcagagaatgcatgatgtgcactttgtagtaatatatgcaggttgttatcccacctact

SEQ ID NO: 2870 - DNA, 1280 bp, Zea mays
  Clone ID: 700236002_FLI
cggacgccgacctctacgcgccggccaaggagctgtacctcggcgaccgctgccaggtggccgacaccccggcgccgtggcagttctggatggtcatgctcaagaacggcaacctcgacaccaccgccgccgcctgcccggagaacggccgccccgcgcgcccgttcccgcagacgtcccgcttcccgtgccccgccggcgccgggtgcatgaaccagccgctgctgttccacaaccgcaccgcgctggacgacgccggccgccggctccgcggcggcctgttcgggacctacgacctcgacgccgccgcgggtctcggcgctggcgacgtctccttctactccgtgacgtgggagaaggatgtggcggcgagcggtcgcggcggcgggtgggcattccaccacaagctgcgcacgtccaccaagtacccgtggctgatgctgtacctgcggtccgacgccaccaggggcttttccggcggttaccactacgacaccagaggcatgaccaagacagtgccggagtctccggacttcaaggtgcggctgaccctggacgtgaagcagggcggcgggcgcaacagccagttctacctgatggacatgggcagctgctggaagaacgacggtcgcggatcgaccagtgcccgccgtggcacaccttccggaacggcagccgcgtgcaccgccgcgacggggcccgcttcccctacggcgcctaccacgtgtactgctcccccgggaacgcggcgcgcgcggagcagcccaccacctactgcgacgcctacagcaacccgcaggcgcaggagatcctgcagctgctgccgcaccccgtgtggggcgagttcggctacccgacggccagggggcaggggtgggtcggcgaccccagggcgtgggacctcgacgtcggcgccatgtcccaggcgctctacttctaccaggaccccggcacgccgccggccaggaggcggtggacgtcgctcgacgtcggcacggagatatacgtcagcgacagggccgaggaggcggagtggacgctcagtggcttcgacatccttgtgccggacaagtgtaccaagtcacagcaacgggccagcaacagctgctggtagacagacactttactgtcactgtacgttacgttgagtagcaggccagagtgttaggggtgtttggttcaaggagccactagctccatactagatgaggtggtgcatcacaagtacgatgactatatttaactaactataactataaaaaataaaatattgattgatc

SEQ ID NO: 2871 - DNA, 752 bp, Zea mays
  Clone ID: 700236039_FLI
ccccagtctcggaagagaactatccagaagcgcaagactccaaagccgtcgccttcctatccatcccttcctcgccacgggggtcgcctgagatcacataaacaatggtgaaggctgttgctgtgcttggtagcagcgatggtgtcaagggcaccatctttttcacccaagtgggagatggccctaccactgtcaccggaagtgtctctggcctcaagcctggcctccatgggtttcatgtgcatgcgcttggtgacaccaccaatggctgcatgtcaactggaccacactacaatcctgcgagcaaggaacatggagcaccagaagatgagaaccgccatgccggtgatcttggaaatgtgacagctggagcagatggtgttgcaaacattaatgttaccgacagccagatcccactgactgggccaaactcaatcattggcagagctgttgttgttcacgctgaccccgatgatcttggaaagggtggacacgagctcagcaagagcaccggaaacgctggcggccgtgttgcttgtgggatcatcggactccagggctgaactgaaacgaatggtcgctggacttcgggggcgcctgggagtgccgtcaccactcaccagcaggctagaataacatcccgagacatcgtgaaataataataataagagcgcctgatatgtgatcagtggtgtactcgccattaagcacctgtggcaaccgatgagctgaactgtgttggactgttggat

SEQ ID NO: 2872 - DNA, 782 bp, Zea mays
  Clone ID: 700236060_FLI
ccccaaggccccaactacccccagtctcggaagagaactatccagaagcgcaagactccaaagccgtcgccttcctatccatcccttcctcgccgcgggggtcgcctgagatcacataaacaatggtgaaggctgttgctgtgcttggtagcagcgatggtgtcaagggcaccatcttcttcacccaagagggagatggccctaccactgtcaccggaagtgtctctggcctcaagcctggcctccatgggttccatgtgcatgcacttggtgacaccaccaatggctgcatgtcaactggaccacactacaatcctgcgagcaaggaacatggagcaccagaagatgagaaccgccatgccggtgatcttggaaatgtgacagctggagcagatggtgttgcaaacattaatgttaccgacagccagatcccactgactgggccaaactcaatcattggcagagctgttgttgttcacgctgaccccgatgatcttggaaagggtggacacgagctcagcaagagcaccggaaacgctggcggccgtgttgcttgtgggatcatcggactccagggctgaactgaaacaaatggtcgctggacttcgggggcgcctgagagtgccgtcaccagcaggctagaataacatcccgaagacatcgtgaaataataataagagcgcctgatatgtgatcagtggtgtacttgccattaagcacctgtggcaaccgatgagctgaactgtgttggactgttggctaaaatgctggttcgcctgagc

SEQ ID NO: 2873 - DNA, 835 bp, Zea mays
  Clone ID: 700236108_FLI
gggcggacggcgtgggccgcaccctttcatcagcctgcctgtccactgttggcttggtgacttcctccgctccgctccgctcccctccgctcccgaacggtcgatctttgcatggcagcagcagctggctccaaggggcgggcgatcgctggaagcttcgtcagccgcgtcctcgccggcaaggccgcctcgccgaggagggccgtgcacgcctcggcgtacgacaagaacctggaggaacaggtgcgcccggcgttcgtgccggacgatgtgatcggcagcgccgggagccccgacaagtactggagcccccaccccaagaccggcgtgttcggcccggcggcggtggaccccaagctggcagctggtggcgcgccggacgccggcgcggatgctgcaggaggcacggtgctggaccagaaggtgtggttccgcccgctcgaggacgtcgagaagccgccccccgccgcgtgagccgcgcggcgctgctaggccagcccacactgctgctcgctcataaaaagggcggcgggagagcctggcagtggcaggcaccctgctcgtgctcggctgggctgggctccctgcttatatcactacaatattatactactagtagtggtgcttgatagcagtgtgtggctgtgctaataccagtataatactggttctactataatacagtcgtatcaggcatggcgtgcatcaggactggttgtgatagtagcaacgtgatgctcgtgcctgtaataagaacaagcaggcgatgtgtgcctgtgatgtaccggtgtcgtcagtgttataagtacttgggtcaatggttttctgcatgttt

SEQ ID NO: 2874 - DNA, 1268 bp, Zea mays
  Clone ID: 700236111_FLI
catttcccgtcctgtccttcccttacccggcggcttaaaccctagttctcactcccatcgccgcttcagctccgccgcagcagatggagttctggggtctcgaggtcaagcctggttccactgttaagtgtgagcctggatatggctttgtgctgcacctttcccaggctgctcttggggaatcgaagaagagtgataatgccttgatgtatgtcaaaattgatgatcagaaacttgccattggaaccctctctgttgacaagaacccacacatacaatttgatctggttttcgataaagagtttgagctgtcgcacacatcaaaaactaccagcgtcttcttcactggctacaaggttgagcagccattcgaggaagatgaaatggatcttgattctgaagatgaagacgaggagcgggatgttccagtagtcaaggaaaatggcaaagctgatgggaagaaacagaaaagtcaagaaaaggcagttgctgcaccttcaaaatcaagtccggattccaagaagagcaaggatgacgatgattctgatgaggacgagactgatgattctgatgaggatgagacggacgattctgatgagggtttatcttctgaagaaggcgatgatgattcaagtgatgaagatgataccagtgacgatgaggaggaagacactccaactcctaagaagcctgaggtaggcaagaagagagctgctgaaagttccgtgctgaaaactcctctatctgataagaaagcaaaggttgccacaccgtcatctcagaagacaggtggcaagaagggcgccgccgtccatgtggcaactccacacccagcaaaaggcaagaccattgtaaacaatgacaaatcggtcaagtctccaaaatctgcgccaaaatctggtgtcccttgcaaatcgtgcagcaagtcattcatcagtgagacggcacttcaggctcactcgaaggcgaagcatgggggcaagtgagtcgcaggtccaatagagtcaacaacaaatgcgaaacatgggagaggagggtaagcgagagtctcgaaagagtgtcggtggaagtaggcctaaccttattttgtttagagacgggctatgcgttcgatgtagcaaaacaaggctgtggtttatggtcttcaatatttgggttgtgtatttcgatttttttctgaacgtgtctcggattgttgtgctgcgaattggttgtttctgtcacgtttctttctctatttgaatgacctgtcgcattctatttcttgg

SEQ ID NO: 2875 - DNA, 920 bp, Zea mays
  Clone ID: 700236134_FLI
ccattccgtgccgtcccgagtctcttctcttgacacgacctgcggaaagcaaaaaggcaaaacctcagtgagtcctgtccacgccgatgtactccttcgagcagcaggaccacacggcggcagcgcgtactactaccggtaccgccacgctcgacacgacgagctacctgcagccctgtgccggcgcagctgcagctgcccgctcgctccagctccccgcacatcacccaggccaccaggcgctccggacagcgcccgccgtgccgccgcggcgcggcaagagcgccaagaagcacgcgacggcggcggcggcgcggcactcgccgtcgccgtcgtcgtcgcgccgctcctcgaccaccgtggtcgcgaccgacgtggccaactttcgggccatggtgcaggagctcaccggcttcccgcccgccgccatcttccgcccgctgccgcgcagggtgcacgcggccagccccttcgtcgccgtcgccgcggggcagggatgtggacacggaggttcggaggccacgaacagtagcactgccggcgccggcagcggcagcggcagcggcagcagccccggcgacgcaccggccgtgccgcctgtggcgctggcggcgcagcagcagccgcagttcgcgccgctgggcgtgttcgacggcctgcccgacctcgggtcgccggagttcgactcctggggagacttgtccatcgattaagtactcggtggcaggctaggtctgaaggaacgattgctcaaggatggtaatcggtgggggtatttgctaatttcgttgtgatcaagcgtgttgtgtttattatctatgtgcgtgcacgtgaccatgtgttggcagtttagccccctgtggcagtagtgcttgttgctttcacaagataaaaaaaaacatgctgagctcatgtgacgc

SEQ ID NO: 2876 - DNA, 513 bp, Zea mays
  Clone ID: 700236140_FLI
ctcagatccacgctgcctagttgttcggacttcagaccccgccgtgcgctgcccatggccgcgggtcgcggcgacgccgcgagcatggtggcagtgggtctggtgtggggcgccaccaacgcgctgatgcggcggggcgcgctcgtctgggaccgccgcgcccgtgcctgcccctccggtaacgtcctccggcggtgggcggagctgctcctgacgtggcagtactcggcgccgttcgccgccaacctgagcgcgtccgcggccttcttcgcgctcctcggcgccgcgcccatctccgtggccgtccccgtcaccaacgccgtcactttcgccgccacggccgccgccgccgcggccctcggcgagcgcgtccggccagcgcccgcggtccttggtaccacgctcatcgtcctcggcgtctgggtctgcatctcgtagacttaggctgaagatctgcttggtttggttctggcattacagtcgcatgggaaataaaaaggaagttttgagggc

SEQ ID NO: 2877 - DNA, 760 bp, Zea mays
  Clone ID: 700236163_FLI
gttcctgaacgacgacttccccgtggacttcgccttcttcgacggcggcgccgcgccgctggtggacccgggcagcggcgtgtcgtacaccaacgtgttcgacgccaacttcgacaccctggtggcggcgctcaagtcggtggggcacggcgacatgcccgtcgtggtgggcgaggtcggctggcccaccgacggcgacaagcacgccaccaacgcgtacgcgcagcggttctacaacggcctgctgaggcggctggcggcgaacgccggcacgcccgcgcggccgaaccagtacattgaggtgtacctgttcgggctcctggacgaggacgtgaagagcgtggcgccgggcaacttcgagcggcactggggcatcctccggtacgacgggcagcccaagtacccgatggacctgagcgggcaggggcagaacgcgatgctggtgccggcgcgcggcgtggagtacctgccccggacgtggtgcgtcgtcaacaccaacgccggcaacatggacaagctcgccgacaacatcaactacgcgtgcacgttcgccgactgcaccgcgctgggctacggctccacgtgcggcggcatggacagcaacggcaacgcgtcctacgcattcaacgccttcttccaggtgcagaaccagaaggaggaggcctgcggcttccagggcctcgccgtgcccacgcagacggacccgtccaccgccgcctgcaacttcaccatacagatcgccaccacctcggcgggtcac

SEQ ID NO: 2878 - DNA, 1355 bp, Zea mays
  Clone ID: 700236227_FLI
gacttcagaaagcgttgctatcaaggtgattgacaaagataagatcaagaagtgtggtcttatggatcaaataattcaagagatttcagtgatgaagttggtaaaacatccaaacattgtccaattgtatgaggttatggctaccaaaaccaagatatattttgtgatagagtatgtcaagggaggagagttgttcaaaaaggttcaacgtggaaggttaaaagaagatgttgctcgtgcatatttccaacaattgatcagtgctgttgacttctgccatactagacaagtttatcatagagatctaaagcccgaaaatcttcttcttgacggaagtcgcaacttaaagatttcagactttggtttgagtgcacttccaaactgcaagagaaaagatgggttactccacacaatttgtgggactcctgcatatgttgctccagaagtaattagtcaaaaaggatatgatggtgcaaaagctgacatatgggcttgtggagtgatcctctatgtgttgttggcgggctatcttcctttccaagacaagaacatgatggacatgtataagaaaattttcaaagcagaactcaaatggccaagttggttttcttcagatgttcgaaagcttttgcggcgcatccttcatccaaaccctaatagacgaatatctattgaagaaataaggactcatccttggtttagaattggtcttgatgcaagattgtttgattctacaacgagagattatgtgcctagtgacatggatttggctttgaattccttaaatagcaatatggtcgagtgtaattcagcggcagagaaactgactattttgaatgcttttgatatcatctccctgtctaacgggtttgatctctctggtatatttgagaactcaaacaaggtgtctaaattcacgtctaccaacacagctatgacaattatcacgaagctaatggaagttgcaaagagcttggatctgaaggttataacaaaaactggtggattgttgaacatggaagctgccgaatcaggaataaaaggtgtgatgtctataaatgctgagatatttcaaatcacaccaaattatcatctcgtggagatcaagaaaatcaatggtgacatccttgagtatcataactttatgaaccaaagcatgagaccggcactagaagatattgtgtgggcatggcatggtgaacaacctgacgagaagtagactcatcaactttagataatcatcaacctaccaccttagatattgtggcagctttaatgctattagaaagtgtatcaggcattcaggccaaaaaaaaagtcatgggacttaataatattacttatatgttgttttt

SEQ ID NO: 2879 - DNA, 1742 bp, Zea mays
  Clone ID: 700236232_FLI
ggaggacattattttgatttcaacagtttggtccaataaagatgggaaagtaggctctctgattctgagagaatcaacgtggctttcacaagagccaagtatcttgccctagactccctagtatagtgaagtcacatttaaaacactcttccactgcatttttagttcagtaattgctatatttctgccataatagttcagtagtgcctttggattcttggaaatggaaccactttactggctagcaattcaatatgggctgatttagtctgtgtcgttagcactatcttcttgaatatgacaagtggaagtgtgtttttcttcttctaaaagatagaatgcagatgcattttagccatgaatcagttgttatttctgccatattagatagcacactgaatgcatgatagtctttgccgagtgtttttgacactcggcaaagaacacgattccggtagtgatagaataacacaacatcgtgttgttgcctatttctactttgatatgtttaccgacaattaagtcaggcttctgaaccggaatgcttagttagctatacatgttctgcatgttgtcaacaagactcgctagtggtttgattgtaatacccccatagaccatagtatgttgtcaacaagagccgctagtggcttatctctagctgttcgtcgtcgaaggacttaggtgctgtttggttgacgaaatgtaatgaaaatggtaatggtaacgattgacactcgaataccggcgctaacaaatttgaataaggatgtattcatttgtagtatgatattgattacggttgaactaaaataaacataatctaatgttattggttacccattgcattaccaatatatgaaccaaacggcatcttagcttgtttagtggctgctattaaaaagaccaaagtatatccgggtgcggtccaaacaagccatcgttgtttgtgttgcctgctaggagtattaaaaagggcgcaaattaaatagtgctcaataatacagcaagcacatcaatcagtggactccattactacttgcattggtccagtccagctatggccgtacgtacgagatatcgcgtcatcattttcatgggcgtgcactcctctcctatcaactaaccgttccttgtatataatcattacatggcgacgacagacaacacacgctccatatatctcatctgatagaagatggaggatgcttaaccatgcgccatgacgcgatggatgttgctgtctcgggaaaagctgtttttgactgagaatatcttggagatttttggaggcagacgttttatttatggagatggctattatctatggaggaggtcagaaattcatctctcctaaaattgattcacgggattgaagatgaactcgagcaattaataatcttggtcatacgtaccatttctcgtacggcgggcggattaagagtgcaagtcagccagacccggctggcgtaagtcaactcggaggctagagagccgatcgagctttgagttggagtttagactgtctctagcagcgtcctctatatacatcctctatatccgtcctttacagtcttctctaaaagatttcatcttctatatctactttctctccaacgacgtcctctaaatcacgtcctctatatgtaaatatctatattaaagacatttttaatttttaaatttttgtacatacgtatttgttatactgtcaaatgtattgcacatattttagttttatt

SEQ ID NO: 2880 - DNA, 1426 bp, Zea mays
  Clone ID: 700236233_FLI
cgcagaagctcgcgctccagcactggctcgaagctattgacccgcgccaccgctacggccacaacctgcatctctactacgacatctggtccgccagctccagctgcgagcccttcttctactggctggacgtcggcaacggcagggacttgcatcaccacaagtgtccacggagcaagctcaactcgcagctcatcatgtacctcggaccaaacgagagggcggcgtacgaagtcgtcgtggaggaagggcggctcgtgtacaggcagagcggggacccggtgagcacgaacgaggagtccaagtggatcttcgtgctgagcaccagcaggtcgctgtacgtggggcagaagcgcaagggcaagttccagcactcgagcttcctgtccggggccgccacctcggccgccgggaggctggtcgccaaggagggcgtcctcagggcgatatggccctacagcggccactacctcccgaccgaggagaacttcagggagttcatcgccttcctcgaggacaacaacgtcgacctcgccaacgtcaagcgatgctcggtggacgacgacgagttcccgtcgttcaagaagccggcggcgggtacagaagagaagcagcaggcagcagaggaggcagccccagtggcgacagaagaggagccacgacccgtgccggagctgcccgcggtggacatcgtgaaggagggcacgggcacggccgcggacgcggagccgccgaagacggcgatgggcaggcggccgtcgttcaagtggtcgacgcccacgggcgcgcgcatcggctgcctccagaactacccggccgacgtgcagagcatggccctggagcaggtgaacctgtcgccgagggtggcggcggtggcgccgtcgccgcgcctgcccatcccgtcgccgcgccccagccccaggatcaggctgtcgcccggcctgcactacatgggctgccccaccccgacgggcgccagcaggctcgcgaccccgaccccggcgtgcaggcgctcctcgcccaagcagcagcagcagcagcagcacttgatggggttccgcgcgccggccgtggcgctcacgctccccaagcacaaggccaagtgatctgcttgctgcccattgacacctcgccgcagcggcgttttccgaggtgttgctgcgttgcgccgggttaacaattttgttgattggtttgttgcgttctctgatcggctaccattctttaacgttcgttcgttcgttctgggtcatcgtattttgacctcactctggtagtctggtagcactctggtgcttgcgctctgcgtgctgtacaactctaaactacagcctgcaatccaaggccctactgtaacctgaacctgcagttcctcagacaaaatggctgcaggttccgttttgaataaaaggattcgttcatgaat

SEQ ID NO: 2881 - DNA, 1354 bp, Zea mays
  Clone ID: 700236274_FLI
acacgatcgagagtgctgtgcacagcctggcccagtcgacgggagaagaggatcaaaggctgaaagactggttgcgcacgctgatcgtgagcttcatcgagtcgatcaggttcaactcggtggccagcgcggtggccgaagcgctgcgcaacgaccaagtaaatcagctcgagcagcaccacatccaccaaatccgcaactggagtgccatctccacggcgctactcgccgccgccaacgacgtcgtccaagaccccgacaccaacctcttcagccagttcgccaacgagtgcaggatacgcaacgcctaccaagcggccatcacgctcggcctggtgctcgtcacggccaggaccaatcgccgccatccccgcgccgccgacaccgccgccctcgggctcacccttgtggaagtcgtgtcggtgcggatcctctacatcgacggggaaagacccggcgacctctacgggacggtcagagtcgtcgactccttcggcggcgtgcacgtgtacgaccagcccagagccagcgcgcagtcggtctaccccggggacaacgccaagctcgtgtggccgtctcgtgtcgtgtcggccgccgacgacttcgtcatcgacgtccacctcatggaccgggacacagatccatcgccggacgatgaggtggccaaggggatggtggcgtggaactcccgcgacgccctcagcagccaccgcaacgtcgtgacgagccagctcatcacgggcgagtacggctcggcacaggtcttctacgcggtgttgaccaacgccgtggtggccaccgtcgccgtcctgctcatcaacggcgacgacgagagcgtccccgacgtgtacggctccatcacagccaggaccgacatgtccggcgccagcaactcgctccagtaccagctgttcaaaagggggcagaaccaagatgtgggtgtgccggccaatacctacataccccttaacaggaaggtggtcgcggcggcgctgggctcgccgttcaaggtggacgccgacctgtgggacagagacagggacccctcccctgacgaccagatcgcgctaggctccgtctccttcaacccacgcttcgtcggcacggacaaggccaggatcaccggcaagtacggcgagattgaggtgcaggtcacctggtcaccctccgtcatccaaccctagctaggtcatccatcttattacaataataatgaataaaccaagatcgagcgaatccaacgattcctgcatagataagatcgatcgatcgatctcgaagtgtttagtttttgtatgccaataaaccgcatgcatgcttgcggggatcaataaataaataaatgttctactcc

SEQ ID NO: 2882 - DNA, 1079 bp, Zea mays
  Clone ID: 700236295_FLI
ggcacccgtccggctgggactacatcttcagctacgtcaagacgttccgcgcccacccggaccgcctcctccccgaccgcgccctcgtcggcatggcccagcacttcatgcgctcctactcccacctcctcatccacacctgccaccgtcgcggagtccacgccatgggcggcatggcggctcagatcccgatcaaggacgatgcggcggcgaacgaggcggcactggagctggtgcgcaaggacaagctgagggaggtgcgcgcgggccacgacggcacgtgggcggcgcacccggggctcatcccggcgatacgggaggtcttcgagggccacctcggcgggaggccgaaccagatcggcgacgccgcagggcacgagggtgccagcgtgaaggaggaggacctcatccagccgccgcggggcgcgcgcactgtggacggtctgcggctcaacgtccgcgtgggcgtgcagtacctcgcggcgtggctggccggctccggctccgtcccgctgtacaacctgatggaggacgcggctacggcggagatcagccgcgtccagaactggcagtggctgcgccacggagcggcgctggacgccggcggcgtggaggtgcgcgcgacgccagagctactcgcacgcgtcgtcgaggaggagatggcgagggtcgaggctgaggtcggccccgacaggttccgaaaggggcggtacgcggaggcgggcaggatcttcagccggcagtgcaccgcgccggagctggacgacttcctcacgctggacgcgtacaacctcatcgtggcgcaccatccagccatcgaaataaggacggatgaccaacaacatgatagacatgaacagccttgtaaagcgcactgcatattctctgctctgggacttttagtcgtgcttatgatagtacagggtggtctatgtaataaactgagcttctgttgaactctcgggaaggacaactgcacaaccctgtatgagtgtaccgagactatcttttcaccctcagaactaccgctctacaacgtgtatctttctaattttataaatcaaacttatttaactttg

SEQ ID NO: 2883 - DNA, 1062 bp, Zea mays
  Clone ID: 700236373_FLI
aaggagaaatagaagagttgccatatgcacttaagaaagtagaacctggagaccggttggaggtcagccaggagaacggtacagagttatccgaaaaggcttctttctataaaggagtattctacaactaccttagcattgggatggatgctcaggttgcatatggcttccatcatcttcgtgatgaaaagccatatcttgcacaaggaccagttgcaaataagttgatttatgctggatatagctgcactcaggggtggttttgtacaccttgcacagcgagtccacagctaagggggcttaagaacattttgcgactttccattaaaaaggccaattgttcagagtgggagcaagtgaaaatgccttcaagcgttagatccctagttgtgttaaatttatacaattatggcagtggaaggcatccatggggtgatctaagacctgagtatctcgaaaagaaaggctttgttgaagcccattcagatgatggcttgcttgaaatatttggtctgaaggaaggttggcatgcttcatttgtcatggccgagcttatcaaagcaaagcacattgcccaggctgcggctatcaagttcgaaatgaggggtggcgagtggaaccgagcatatgttcagatggacggagagccgtggaaacaaccgctcctacaggagcactcaaccatcgtggaaataaacaaagttccgtaccattctctcatgataaacggggagtaatgagatttttcctctgtcaaccagattgtaccagggctgcattcatagatcgttaggatcgtgtacagttcaggagcagcgggcactagatccttagaactgggtcggacggactgcagcgaggatggcatgcatgttcgttttggccttttgtcgtgctatggtcgaagccatggccggagcgtggtgtggcaccatgcattgttgtattcgtaccataatatgtgcgttgttgtatcctaagttctttttgaaggaaacatgatttatttgtttgtattgtaacgttgtgtcattgcaaaagaataacctggtgtaaaactgt

SEQ ID NO: 2884 - DNA, 1243 bp, Zea mays
  Clone ID: 700236437_FLI
atcccctcccgttccactgttgcccaagtccaaccaccagcgagatggcggggaccgtgaccgcgaccgcaaccacggccaccaccgaggtcgggaccacagtgaccgcagccacctccgagatggaggccaccgcgaccgcagccacctccgagctggaggccaccgcgaccgcagccgccatcgggccgccttcagccatccccgataaatatatgcataaaaaccggttgcagtcatttgctgaacgaacatataagaaaacgccaatctacaaggttgagtctgaaggccagtctcatcagcctaagttcacatgcacagtggaagtgggtgatcaacagttctcatcaactggtagttttagtcgtaagaaggaagcagagcaggacgctgcgagagttgcttatgagatcttgacaacagttagtgagagtgacgttaaggaggcatttgagctaattgatcaggatgcagttttctgcaaatcaattctcattgaatttgctgtcaagacaaagaccactttgccctcttactctgtagtttgtgtttgtctcaaaaagcctttgaccctgttcgctgcaattgtggtgtttgatggaaatgcatatcatggtgaatctgcacccaacaagaaagatgcagagcagaatgcagctcgtgttgtgatcaagtcgattttagctaagcatgacacttgtatggtgagaattgttagatcgaagaaacaacttataactgctgtcagatcttctggaaacaccccagctacttttactcctatacagtttacacggcctgtttcatatgcagcatatggcagaccagatgatacaacacctgttttgccaaatgaatcttcctcattagctgttcaacgaggcatcaatgttgtacctgcagttgggacatctgtgaacccatcgtcagcaaatgtaagtcgctcaaagaagcgcaagggcagagttgaaggagcaggaggcaacgacacatgggttgccaagggtcattaacttctcagccatcaacatctaggatcctgtggtcaaccttttggcattcgattcgtcttggtacctctgcctgtcatgttgtttgctcaaaccactgcatatcgttgtaggttgcttttttaaccttaactttaattcgtaaccactgcattttgtaactgcataacaattcggctggatcagtttccaccaaagatataacgaacgaatggtaacagcctttatct

SEQ ID NO: 2885 - DNA, 1755 bp, Zea mays
  Clone ID: 700236446_FLI
cttcgcccaatttttctcccacccctgcccctcctctcgcgattctgccattgtcccccgctcaccaacctaaatcgagagaattcgatatttgccatcatcaccaaacacgatagtaaaaatgtcacagagtggcaaaattccaattattatttcacctaaacccctctgctctcaaacctagctcgctcccggcggaccgacgatgccgaaggcaggcggcggggcggcggacgaagaggagttccgcgccgaggtggaggagcgcctcatcaacgaggagtacaagatctggaagaagaacacacccttcctctacgacctcgtcatcacccacgcgctcgaatggccctcccttaccgtgcagtggctccccgaccgcaccgagccgccggggaaggaccactccgtccagaagatgatcctcggcacgcacacctctgacaacgagcccaactacctcatgctcgcgcaggtccagctgcccctcgatgacgccgaggccgacgcccgccactacgacgatgaccacgccgacatcggtgggtttggcgccgcctccggcaaggtgcaaattgttcagcagataaatcatgatggagaggtcaatcgagctcgctatatgccccaaaattcatttgtaattgctactaagacagttagcgcagaagtatatgttttcgactatagcaagcacccatctaagcctccactagatggtgcatgcaaccctgatttacggctgaagggacataattctgaaggatatggcttatcatggagtatttttaaagagggacatttgttaagtgggtctgacgatgctcaaatttgcttgtgggacattaaagcaaatagtagaaacaaaagtcttgacgccttgcagatttttaagcatcatgatggtgttgttgaagatgttgcttggcacttgaggcatgagtacttatttgggtcagttggtgacgattatcatcttttgatttgggacctgcggtctccagcccctactaaacctgttcagtcagtggtggcgcaccagggtgaggtgaactgcctggcttttcacccgttcaacgaatgggttgttgcaactggttctactgacaagactgtcaaattatttgatcttaggaagattgatacttctctgcacacctttgactgtcacaaagaggaagtttttcaagttggatggagtccaaagaatgaaactatacttgcatcctgttgtctgggcagaaggctcatggtctgggatctaagcaggatcggccaagaacaaacaccagaggatgctgaagatggtcctccagagctcatgttcatccacggaggccataccagcaagatctctgatttctcctggaacccctgcgaggactgggtggttgctagcgtcgctgaagacaacatcctccagatatggcagatggctgagaacatctaccatgacgaagatgatctgccaattagcgatgagccggcaaaaacttcttgaagcaacacagcacaaaaggaatcttaacttctatcgactgttggtgttcctagatcggaaccctgctcgccggagaatcttcatcgagtgagagttggctgtaggttgcttccgtggtcgtaactttatgcttgacgggttcgtcgtttcttcgaccgtctgtatgtgtattcggcgaacctttagcaatatacatatcccgattgactagatctgtacgtcgcagttgtgttttgtagtattgttttgcagcc

SEQ ID NO: 2886 - DNA, 1057 bp, Zea mays
  Clone ID: 700236447_FLI
cgccgatcatggaggatgagaggaacacccagcagcaccagggcggtgagcaggcccaggaccaggagaacgaggtgaaggacaggggactcctggacagcctactcggcaggaacaagcacgacgaccaggagaagaagaaccagcaggcggaggaggagctggcgaccggcatggagaaggtcacggtggccgagcccgaccacaaggaggagggacacgaggccgccgagaagaaggacagccttctcgccaagctgcaccgcaccagctccagttccagctcgtcgagcgacgacgaggaagaggaggtgatcgatgagaacggcgagattgtcaagaggaagaagaagaagggccttaaggagaaggtcaaggagaagctggcggcccacaaggcccacgatgagggcgaccaccaccagacgcccgcgccgcccgtggtggtggacacgcatgctcaccaccaggagggagagcacttcccggcgccggcgcctcccccgcacgtggagacgcaccaccccgtcgtcgtccacaagatcgaggacgacgacacgaagattcagaccccaccacaggcaccggaggaggagaagaaaggcctgctggacaagatcaaggagaagcttcccggtggccacaagaagccggaagacgctgctgccgccgccgccgcgccggccgtccacgcgccaccgccggcgccgcacgccgaggtcgacgtcagcagcccggatggcaagaagggcttgctgggcaagatcatggacaagatacccggctaccacaagagctcgggtgaagaagaccgcaaggacgccgccggcgagcacaagaccagctcctaaggtcgcagcgtgtgcgtgtccgtcgtacgttctggccggccgggccttgggcgcgcgatcagaagcgttgcgttggcgtgtgtgtgcttctggtttgctttaattttaccaagtttgtttcaaggtggatcgcgtggtcaaggcccgtgtgctttaaagacccaccggcactggcagtgagtgttgctgcttgtgtaggctttggt

SEQ ID NO: 2887 - DNA, 919 bp, Zea mays
  Clone ID: 700236460_FLI
gtctctgcctctctctcctcccttctcccacccacccctctctcttgctgtgggtgtgctgtggagaggagaaaggaagtagagcaagaacaagaactaataacaccaacaagagctgctgccaactcctgcacagcctgggctctcatcactgattgcccacctattaccttcctcttttgcaatttagaatcacccatatatctacctgctctcggtcctctgtgaactctctcgtcttctaggtttcccaggcctcaagataagcctctggaccaaagcttgaaagcagctgccgttcttgcctcttttttaattcttcatttcgtggttcctggatttttgggttcttaggtttcttgtatcttcccccaaccttgcaaaatcttgtggtgaagtttcttgcgttcgctgtttcgggaccatggacgaaaggattccgccgccgtccctcttgcaatactcgcagtcccctgctcattcttccccccatcccctcaattctatgaggtattcttcctctgaaagagaaaggtgagtgttgttcttgatttttttttatttcttttgtcactattgttctccctgttgttcttggtgagttttgttttgtttttgatcctgccctttcggaatccttctgaggagcacgagatttgatgctgcggtggagatttccgcttaattctaaacttccggatgccatgtttccccttgatcaatgctgccgattgttatggaggagtgatctgtaatcgtagggacttcttttgtgatggctcgctgatagatttgttactgctgtcctaaacggagctgtatggttgactcgctgctaatgggtgtaaactttgtgtgtaacaaatcgctcattggcgatagtcacatgtaaattttaatttgatggatcgttctgtat

SEQ ID NO: 2888 - DNA, 1492 bp, Zea mays
  Clone ID: 700236518_FLI
tcgctctcagacgactgggccgccgccgcttggtgctgaggctttggttggtctcttcggcggcgacgagcacccaccagcagttctgtagaaatggctgatggtgaggacatccagcctcttgtctgcgacaatggcaccggaatggtcaaggctggttttgctggcgacgatgcaccaagggcggtttttcctagcattgttggccgtcctcgccacactggtgtcatggtagggatgggacagaaggatgcatatgttggcgatgaggcacagtccaagagaggtattctcacgctcaagtacccgattgagcacggtattgtgagcaactgggatgacatggagaaaatatggcatcatactttctacaacgagcttcgtgttgccccagaggagcaccctgtgttgctcactgaggctcctttgaacccaaaggccaacagggagaagatgacccaaattatgtttgagactttcaatgttcctgccatgtatgttgcaatccaagcagtgctctcactctatgctagtgggcgtactactggtattgttcttgactctggtgatggtgtgagccacactgtgcccatttacgaaggatatgcccttcctcatgcgattcttcgtttggatcttgctggtcgggacctcacagactccctcatgaaaatcctgactgagaggggttactccttcacaacctctgccgagcgagaaattgtaagggacatcaaggagaagctggcatatatagctcttgactatgagcaagagttggaaactgccaagaacagctcctcagttgaaaagagctatgagctacctgatggccaagtaatcaccattggtgcagagagattcagatgccctgaggtcctcttccagccatccatgattggtatggaggctgccggaatccatgagacaacatacaattcaatcatgaagtgcgacgtggatatcaggaaggacctctacggcaacattgtgctcagtggaggttcaactatgttccctggaatcgctgatcgtatgagcaaggagatcacttcccttgcaccaagcagcatgaagatcaaggtcgttgcaccgcctgagaggaagtatagtgtctggataggagggtccatcctagcctcgctgagcactttccaacagatgtggatatctaaggaggagtacgatgagtctggcccggcaattgttcacaggaagtgcttctaggcttcgcaagttcctcatcgttgcctagtctcaagttatgtccccttcatttctcaagatacgtgtggcagatttgcatggtacggttcatttatcaagttatgcccaccccctctttgtatgttgtggccccatgtgcgagcacgctgtctgtcgtgacacctggttcgtcagatgttttgtcaaacttgcttggcttgattggttgtacttgtacctgtaagagctgatagttatatgaatggtttggactgtcctgctgttt

SEQ ID NO: 2889 - DNA, 2892 bp, Zea mays
  Clone ID: 700236556_FLI
tttattgagcacgaagatgaagaaaaccctctttatgggagggataatatgttggaggagggtgtaggttcatttgctgacattgatgatcttgctggaactttctcgaagctgaccagaatagtcaatggaccaaagcaaccagtagtagttagtcatagtggatcaatttctagacaaagttctaatgcagagtgggtgcaagagtctgaacttccatattggcctacacagcctgtattggacactgatcacgggctggataaaaagaattggtggtcccaaccaccccattcagtcaacttcattgactatagactgcagaggacatcgtcatccccacagcaagatgctcagcataatcctgttgaacctattcttgaagcaaagccatctcctttacatagaacatcaacgtacccacaacaagaacctcagtacagtaatactgaaccaattcctgtgcccaagtcatcattcatttcatgtcctccatctggtgcagcatctcattcttcacctagtcagccacatcatgtgaacatgccatctcctcccactgcattccagttgcatatgtcttctgcacaaaatgatctactccttccccagttccatcatggaggtacgcctccagggcctccatttggtagacagaatcatgttttaaataatggatcgatgcatggaaagggtcccaggtttatgccaggtttgatgcctcatcaattgcaatgtcccaatggactgatgccacctcagatgcagccacctcatcaacatggaatgctgccaatacaacagtccccaccacagttctcacaactacatgcacggatgattggtccccatcattccccaccacaaagcatgcagatgtttggtcctcaacatccttcttcacaagtgatgagtagatttgatgcaaactttgctatgcctgacttgagtgatccaagagcaagatcaatgttgcaacatgaaaggctgggacagcgttatcctcaccaaggttatgagctcaataatattaggatagataatggatggtcacggttcagatccaagtacatgtgtactgaagaaatcgagaacattgcaaggatgcagcaggctgccacacacatcaatgacccgtatattgatgattactaccatcaagcttgtttagcaaaaaaatcagcaggggctcaactaaagcaccacttttgtccaaccttgattagagatccatcttcacgtgcacgcagtaaggatgagccacatgcatatctacaggttgatgctcttgggaggcttccattttcttctatccgcaggcctcgtccgcttcttgatgttgaacaagcctctgcaccaagtgataatgctgaaaaatctgtgtcaaagcctcttgaccaagagcccatgcttgctgctaggatcacaattgaagacggactttgcctactgcttgatgttgatgatattgatcgtctgctgcaatttagccagcagcaagatggtggtttgcaactgagaaacagaagacaggggctcctcgagcagcttgcagaatcactgcaattagttgatctccttgcaccaaataagaattcacctgtgtctccgtatgatgatttggtgtttcttcgcatagtcactctatcaaagggccagaagctactttcccattaccttgagcttctgacatcaggcagtgagcttgcaaggatagcttgcatggcagtcttccggcatctaagatccatatttggaaatatgccctctgatatcagtgcagtggagacaatgaatagacttgcaaaagctgtatccgcacatattgttcagatggatttgagtgatctcagtgcttgccttgctgctgttgtgtgttcatcattgcaaccacctcttcgacctctgggatccccagcaggtgattgggcttctgtcatcataaagtatgtattggacagagcaacagttctactcactgatcaccatgtggcttctaactacagcatgcggaatcgatctctatggcaggcatcattcgacgccttttttgggctgcttacacagtactgcatgagtaagtttgatcgtgtggttcatactgcccaattgcaacctgctgctgcaaccgttataaccagggaaatgccagtagagcttctgcgtgccagcctccctcataccaatgaggctcaacgcaagcaattgctcagttttgctcaacgcactgtgcctgttggtacccacagttctcatgggtcttggtagtggaagcatcgagttcttattagaactgagtactcgctaaaaatggctctttaggggacctgttatgcttcccctgaaagaagagagggttaaacttgtcactagtactatgaatatcaaaaaacaagagtaaagatggttggagcatcaaaatggtaatactcaacatcaaattttgtgtcactcaaacatgtttgcatggattacttttgtagggtagtcagatgtctgcgtcaattttgtcaatacctgtgttggttattgcaaaatggttcctgtgggtctgttgctcttaagaggaatccgcaattggtctgtagcggttacttgaagacactgtttaattgctcttcaaggtggttcttttcaaggagtagttgccttggcctcaagatgtggaagttgcatagccacaacacgtcgttaagttcttcaggaacaatgcggttgctatggaagttgtaaaatggtagtattattgttttgcgacggccttttgccttttgagaactacaactgatgttgcccatttctctatgcttgatgtgcagaaagtggataaagcttgcatgcatccttactgaattgtgacatttatttggatagataggcgctcctttcttt

SEQ ID NO: 2890 - DNA, 896 bp, Zea mays
  Clone ID: 700236560_FLI
ccggggtggtaaaacccggcgaccacatcaaaacacgaggcgtccccgactccgcagtccgcaggaccggtcactcggcacgcaggctagcagcacagcagcagccagagccatcccctctcctcgctacgcttcgcttcctcggcgccgattcctcctcctcctcctccaccctcgtccgtccccttccggcgcacgagctcgcccgagatggcgaacgcgagatcgggtgtcgctgtgaacgatgagtgcatgctgaagtttggcgagctgcagtcgaagaggctgcaccgcttcataactttcaagatggacgacaagttcaaggagatagttgtggaccaggtcggggatcgcgctaccagctacgatgacttcacaaacagcctccctgagaatgactgccgatacgcgatctatgatttcgactttgttactgcagaggatgtccagaagagcaggatcttctatatcctatggtccccatcctccgccaaggtgaagagcaagatgctttacgcaagctcaaaccagaaattcaagagtggcctcaatggcattcaggttgaactccaggccacagatgcgagtgaatcagcctcgatgagatcaaggatcgggcacgctaggcgcaccgccatcgcgagtttcatgatcacgcatcatggactcgcctactactgtggatttgtatgccattatagacttggtgctgcgaaagactgctttggtgatttgtgggtttgttgctgtgtaaaaagatcctcatggcttccagaagaccatgaaggtttggatctatcatgtaattccttgttatctgccaattatgtatggactatggacatgtgttgcgctgttcaactcactacaaataagtaatcgatatattccct

SEQ ID NO: 2891 - DNA, 1278 bp, Zea mays
  Clone ID: 700236583_FLI
gcgaccgagcagcgatggtgtcggacttggagctggtggagcggctgcaggaggtgctgcggtcgtcggacctcaacaccacgaccaccgctgccttgcgccgccgcctcgaggaggacttcggcgcagacctctcccacaagaaggctttcatccgggagcaggttgacctcttcctcgccgaggtcgccgccaaggccgagccagaggagcccaaggaggaggaggagctcgaggacgcgccggtgcctaaagcggaggaggcggaggagggcgagggggtggaggaggagggcgagggggaggaggggggagaggaggaagaggaggaggaagaggaggaggtggatagcagcagcgcccggaagaagcagcggggtaatgatggcaagaaaaggggtggtggctttacaaaactatgcagtctttccccggcacttcaagagtttgtcggcgcctctgagttagccaggacagaggttgtcaagaagctttgggcatatattcgagaaaataatctgcaagaccaaaacaataggaggaagattttgcctgatgagagattgaagaagatcttcaatgtcaattccattgatatgttccaaatgaataaagctttgaccaagcatatctggccattgaattctgagggtcctgtctctcctgacagatcaacacccaaagagaagccacaaaagaaagacaggaatgaaggaaagaagcaaaagggtggctcttcaggagctggatctggtcttcttgtgccccttcaactttcggatgatttaatgaaatttatcggcactggtgagagcatgttatcacgatcggatgttgtgaagagaatgtgggactacataaaagagaacaacctgcaggatccttctgaccggaggaaaataatctgcgatgagaaactgaaggacctattaggagttgaaacgttcaccggctttactgtttcaaagctgcttgccccccattttaccaagacgaagtagcaacccgccatccagatcttctaaacccccaaaaggctgggtgatcatgttttgcagaatgtgtaatcatggaacagttaggagctatgtgagtggtgtgaaatttttttacatgtgggagtcggtggcactttccgaatgttaccagtaaagtaggttcctcgatgtctaatgaatctatcaactgtttactaaccgtcacgccctccgaaaactgtttatctgtgtggcttgtagtgcgttctttctgagtttatgggccaccattttcatgctc

SEQ ID NO: 2892 - DNA, 1746 bp, Zea mays
  Clone ID: 700236608_FLI
caagccacgccacactcccaatcgccgccgcagctggtcccctgctcggctcgtctgatccagcggctgaatccgcaggccatggggttcgacaaggaggcgagctcctcctcctcgcggctcgacgcggcgccgctgctcccgcagcacggcggcggcgcgggcgggcacctgtcgtcgcagcccaagacgttcgccaacgtcttcatcgccgtcgtcggctcgggcgtgctgggcctcccctacaccttctcccgcacgggctgggcggcggggacgctgctgctcctcgccgtcgccgcgctcaccttccactgcatgatgctgctcgtcgccgcgcgccgccggatcgcggacgcgcaccccaagatcgcctccttcggggacctgggccacgccatctacggcgcgcccgggcgccacgcggtcgacgccatgctcgtgctcagccaggccagcttctgcgtcggctacctgatcttcatctccaacaccatggcgcacctctaccccatcgccatcggggcccagtccccggcgtcgccgctcctcacggccaaggcgctcttcatctgggccatgctgccgttccagctcggcctcaactccatcaggacgctcacgctgctcgcgccgctcagcatcttcgccgacgtcgttgacctcggcgccatgggcgtcgtcctgggccaggacgcctccgtctggctcgccgacaggccccccgtgttcgccttcgctggccccgcccagctcctctacggcctcggcgtcgccgtctacgccttcgagggcatcggcatggtcctgccgctggaggcggaggccgccgacaagcgcaggttcggcgccacgctcgcgctgtccatggcgttcatcgccgtcatgtacgggctgttcggcgccatgggctacctcgccttcggcgccgccacgcgggacatcatcaccaccaacctcggcaccggctggctctcggtcctcgtgcagctcggcctctgcatcaacctcttcttcaccatgccggtgatgatgaacccggtctacgaggtcgcggagcgcctgctctgcggcaagcgctacgcctggtggctgcgctggatcctggtcgtgctcgtcgggctcctggcgatgctcgtgccaaacttcgcagacttcctctcgctcgtcggcagcagcgtctgcgtcgtgctcggcttcgtgctgcccgccgtgttccacctcaaggtcttcggcaccgagatcgggtgggccggcctcgtcgccgacgtggccgtcatcgtcatcgggattgcgctggcggtgtccgggacatggacgtcactcgtacagatcttcagttcttccgacctgtaagcatcgacagtctgatatgtgcaatgggagcgttcaaattggttccaatagattgagacccaattcagcgaccgggataacactgcatgcatttgtggacgtccgatcccgcaggcgatggttcaacagcaatttcttaaacactagccgcagtaccgactgcattttatccagctgccatgtcgatttgagcatgctttgcatcgcttaaaagtatgggaacaattgttgggagctctctgaaatctacattggtttggttcagatagagccatatagattctagctgtaccaggcagcagatccatgtgtaaagcctatatgatgttgtattgaattgaatcgatgcgaatgtacaagttacacaatacaagagtgactgctttatgc

SEQ ID NO: 2893 - DNA, 697 bp, Zea mays
  Clone ID: 700236652_FLI
ctgtctcgcagcgtcgtccgtgaagcaggccctcacggtcgctcccctctattactgctcccaagcctccatggctgtcccctcgaagaagcgcggcatgccggcactggggtggtggctcatggccgtcggcaccttgcgctcggccttcacctggtcgtgcttcttcggctcctccgcgtcgttctgctcagccacctactccgagatacaggtgatcggcgtgcatgggcgcacggttgcggtgtggacgctgctgtcgtgcacgctctgcttcctgtgcgccttcaacctcgacagcaagccgctgtacgcggccaccttcctgtccttcgtctacgccatcgcctacctgatcgtcgagtgcgtggtgtaccacaccatgagtgcggctagtctcgtcccgttcaccttcatcgctgtcatatccgtggtctggatgctgcttcagtggaactcggatggccacagcagccccagccgtccgcgccgtgggtctacttcgaagcagccatgaccaagaccggactttgcagcaggttgtgtcaccgttggcttcaaactacatgaactcaccaacacccacatcaacaattaataaacgggagtcatgtataacctcattaaatgaggcgcttattaattgaggggtttctagtggattaaatgaaaaaaatcgagagacagtctatttgcg

SEQ ID NO: 2894 - DNA, 915 bp, Zea mays
  Clone ID: 700236703_FLI
tgctggaacaagttgaaggagaagactgatgatgatattcccatgccagcctatttcaggttcctcgcgctgctcgcattcaagatattttctgctgagcaggtagatgttgctgttctcgaggttggcctaggagggaagtttgatgcaactaatgtggttaaagcacctgtagtttgtggcatatcttcccttggatatgatcatatggaaattcttggtgaccaaatcctgttcttggtgataaacttggtgtcgataaacgggttaattctgttggcaaaattaggatgacacaggttgttagttctcatgaatgtcatgttgtctcgaaataaagagcttctgtccgcacctaatcgcctaaaatggaaatgtttgactcattgtttaattcggggggaagctgaaggtggtctgatccggtaagagatcttaatctgcattacacttgttggattttgatgtcgcttctgggagtgtttgattgaattctacaccagttctaggaagagaaagcctgaccaagtcatcatctccagggacgatgttagcgaaagtcaatttaatcaggtgctgaacattgagttgcaacaaatcatcgatggagactgtcaccgcagccagaaaaccacggtctcaatttgaggagcctttccatctatgtttgttagaaggcatataatgcctatttatctcttgtattcgaacatttggcaattaagaaatagaagattacttccccaatatcccttattcctaatctcacctttcacggcttctggtgaacaatcacttgctattaccgactgacatgtccactcctcatatgtgagatattggggttgatatatatgttgttcgtttccatgtaattattgtgtactaacatttattgaataatttttacgccgt

SEQ ID NO: 2895 - DNA, 526 bp, Zea mays
  Clone ID: 700236706_FLI
gttggctggcgtcggtccgccgcccgcactaccacgcgaccacgcccccgctcctctcgtctctttcttcgcctcttccatcgcaggattcggcggccatgggcggcggcaacgcccagaagtccaagatggcgcgcgagaggaacgccgagaagaacaagggcggcaaaggcagccagctggaggccaacaagaaggccatgaacatccagtgcaagatctgcatgcagaccttcatctgcaccacctccgaggccaagtgcaaagaacatgcggaggcgaggcatcccaagaacgacctctaccagtgcttcccccacctcaagaactagtaagcagcagaagcatatgctctgctcagctaaaagacaagtactacatatatatatatacgctgtgtgtcaattaatgggttctaggctgctgctgatgcggctgcttcgttcgtgttgccccgtctgattatgtactgtaacccttggctgtcagcctgctgtgctaaaaaccattggttctgtgtggattc

SEQ ID NO: 2896 - DNA, 1436 bp, Zea mays
  Clone ID: 700236724_FLI
ctctcgtctcgtcacacaccatccgaaagccaccgggcaaccaaccaggccgccgtgtgatcccgatcgcgtactgcgcgcacgcagtacagctcgcgcgcgcaccagacagacgccttctccctctcccgcagtacagggtacagctcgcgctcacacaagacaccatctccctgcctgcgatccgatgcgtccaacgttttcagccggggtacggtcctaccaccgctgtgcctaataattggcggctagctagctagctagctgcagctgctgcgatcctggatcggcacagccggttcttgatgtggagggagcggcggcgggcgctgctcctgctggtggccggcgcggcgctgggactgatcggtgccgcgctcgcgagcgcgccgccggaggccgcgctgaaggtcgggttctaccatgcgacgtgccccatcgcggaggacgtggtcctcgccgagatgaggctcatcctcatggaggacgccacggtcgcgccgtccctgctccggatgcactaccacgactgcttcgtgcagggctgcgacgggtcgatcatgctccagtcgaggaagaaggggaaggcggagcgggacgcgctgcccaaccgtagcatgcgagggttcgacgccatcgagcggatcaaggcccggctcgagaccgtctgcccgctcaccgtctcctgcgccgacatcatcgccatggcggcgagggacgccgtctacctgagccacgggccgtggtacgacgtggagaccgggcggcgcgacggcaacgtcaccgtggccgagtacgtcgacaacgacctgccgccgccggactccaacattgtcgacgtgaagaccttcttcagcgtcaagtcgcttaactcgaaggacatcgccgtcctcttcgggtgccacagcatcgggacctcccactgcggcccgatccagaagcggctctacaacttcaccggcaacatggacggccaggacccgtcgctggacccggcctacgccgccgagctcaggaagctctgcccgcctcctcccagacccggcgacgatgataggaaggtcaaggtgcctttggaccccggcagcaactacaccttcgacctgagctactaccgccacgtgctcgccacgggcgggctgttccagtccgacggcagcctcctgcacgaccccgtcaccagaggctacgtcgagaaggtggtcaaggcgtcgtcgcccgacgagtactacgcggacttcgccacggcgatggtcaagatgggccgcaccgacgtgcttgtcggcgatcatggggagatcaggccaacgtgtggcatttttgttgactaggttcaggattgggttgaagatgcgaagataatctgtacgggtttctgtcaacgtgtactgtgcgtgctgttagctgagaaagagcacgagctctgttaactgtgt

SEQ ID NO: 2897 - DNA, 1857 bp, Zea mays
  Clone ID: 700236753_FLI
gttctagaggagaatcagtccttggaaaatgctcttcgaactttgctgcaggagcttgtgtcatctgcggtccaatcggataaaaagattatgcagtacgggaattctttggatagcggagaaagtaactgcctgataactcgccttcttgatattgtgctttacctttgcgaaagagggcatgttgaaggtggtatggtattccagctgttagaagacctaactgaaatgtcaacaatcaaagactgcaaagatatctttgggtatattgagagccagcaagatgtattggggaagcaagaactttttggacgtggcaaactagttatgctaaggacttgcaaccaacttcttcgcagactatcgaaggcaaatgatgtggtgttctgtgggcgcattattatgtttctagcacattttttcccattatcggagcgttcagctctcaacattaaaggagttttcaatacatcaaatgtaacaaagtacgaaaaggatgctatggatggaatctctgttgatttcaacttctacaagaccctctggagtctacaggaacatttcagcaacccagctttgacttctacaaatccggcaaaatggcaaaagttctcttctaatctggcggttgtgttgaacacatttgaagctcaacctcttagcgatgatgatggaaaacttaacaatctgaacgaggaggaagatgctgctttcaatatcaagtacctgactagcagtaaattaatgggtttggagttgaaggacccaagttttcgacgacacatccttgttcagtgtcttatattttttgactatctcaaggcacctgggaaaaatgacaaagaaggtccaacagggagcatgatagaggaaattaaatcttgtgaagagcatgttaagaagcttctggaaattattccccccaaagggaaggaatttctgaaaagcattgaacatattcttgagcgggagaaaaattgggtttggtggaagcgagatgggtgtctcgcatttgaaaagccaccctttgaaaagaaaccaggtcaggctggtgccagaaaacggaagccaaggtggagactgggaagcaaagagctcagccaactttggaaatgggcagaacaaaaccccaatgtgttgactgatcctgaccgtgtccgcatgccatcaattacagaatattggaaaccacttgcagaagatatggatccatctgctggaattgaagaggagtatcaccacaaaagtaatcgggtgtactgttggaaaggactacggttttcggccaggcaggacttggatggattcgcacggttttcggactacgggatcgaaggggttgtaccttcagaactactgccacctgaagtaaatgccaagttttcttctaaacccgcagagaaggttaagcggacgagaaaggaagattcaaaaagcgtgtcagctcatcagcccagagagcatcaggttgctgcgacacccgaaaccgacggcggtgttgacccggaagaaggcgaaggcgcggcgccaatggattccgacaacggcgcggtgggggatagccagaaacggagcccgggggaggtctctggccctgaaagcgggcagtgcgagcctgaggcggatggcgatgataacgtgaggacggaaactaccagtagggatgctcgtgccggagagatgaaatgaaacagtggcatgaagaggaaccagattttgtcgactcactcactgacattgaaagccgatcgagcgcgttttgaacagctgagatacattctcttgttggtgtgtactgtgtagtagacatcagtagccatccatttgaaggaaatgcttgccgtgacgtgctgctgc

SEQ ID NO: 2898 - DNA, 1439 bp, Zea mays
  Clone ID: 700236766_FLI
gaaaggcaccgaagaaactcgtagtgcacagaacacaggagatttagggcttattagttcttcatcaagtccagtaacaagcgcacaacggccactcccaagctccagcgtaggctcgaactcaagagaatcaaaaaagagggataccgctttgcatccactgattttcaaggaagctggccttccagataatactttgttgacttacaagttgaagaacggagaggcactactgcaagggtataagcagggagcaggtattgtctgcaattgttgcaatcaagaggtttccccttcggaatttgaaaaacacgctggcatggggaaaagacgacaaccgtatcaaaacatttatacatcacaaggattaacactccatgatgtagctctgcaactgcatcatttgaatttgaatttgaattcaaatggatttagcaatgctagtgtttccagcttcagtgactacccaaaccttacttcttcaggttgtggcaaagaaccttctgtcagtggacctattgtccccctgaaacggactttacaagaaagagtggtccaaacagagagttgctatttctgtgggtatggccacacagagcttggaaaaattgatccaaacatgattgtcttctgtaaccagtgtgagagaccatgccacgtgaaatgttacaatagtagagttgtaaaaaagaaggtgcctctggaaattttgaaagactatttgtgttttcacttcttgtgctgccaagaatgtcagtcacttcgtgtccgtctagaaggaatggagaagtgtgaagagattgccttccttggacggataagatccaatatttgttggcggcttttaagtagcgctgacgcaagtagggatgttaaactctacttgtctcaggtcatcgacatcttcaaagatgcatttgtggaatctactgatgcgcacagtgacatctcagagatggtttatggaaaaaatagagaaggagagaaggattttcgaggaatgtattgtgtagtgttaactgcaagtacgcatgttgtgtctgctgcgattctgaaagtgcgcatggaacaagctgcagaactggtccttattgctactcgtagcgagtgcagaaaaaagggctacttcagacttctcctagagtcaatcgagacaaatttgagagcctgtaatgtaagccttcttatggcacctgttgaccctgaaatggcacaaatctggtcagataaactcgggttcaccattttatcagccgatgagaagaagtcaatgctggagtcgcaccctttggtgatgttcaagaacctagtcttggtgcagaaaccacttgtttgagccaatttaatgaatgtttgattatactactctttccgtcctaaaatataatttgttttaggctaaacatacattcattatttaaattatacattcattattt

SEQ ID NO: 2899 - DNA, 837 bp, Zea mays
  Clone ID: 700236805_FLI
atctccgagaccgcgctcgtcgccgaggttcatcgcctcaacgctgaccccgccgtgcacgggatccttgtccagcttccacttcctaagcatatcaacgaagagaagatactgagcgagatttccatcgagaaagatgtggatggcttccatcctctcaacattggcaagcttgcaatgaaaggcagagagccactgttcgtaccatgtacgccaaaggggtgcatggagctcttgtcaaggagcggagtcactgttaaaggtaagcgggcagttgtggttggtcgcagcaacatcgtcgggctacctgtatccctgctccttctgaaggcagatgcgaccgtatctgttgtgcactcgcggacccctgatcctgaaagcattgtacgcgaagccgacatagtcatcgcggcagctgggcaggctatgatgatcaaaggtgactggatcaagccaggtgctgcggtcatcgatgtcgggacgaactccgtcgacgaccctacccggaagtccgggtaccggctcgtcggcgatgtggatttcgcagcggcgagcaaggttgctgggtacctgactccggttcccggaggcgttggcccaatgacggtggcaatgctgctgaagaacacggtggatggggcaaagcgggggatagtcgagtagctacgttcatctcacttctcgttgctgtacgactgtgttgcaaggatgtgagctgactcgaaaagcgtgtgttggttggtgtaacaatctgtttcccaagaataagaatgatagtcacagctgctttcctgtttaataaatgcagtgaagaaagaattttggctttgctgctgc

SEQ ID NO: 2900 - DNA, 1051 bp, Zea mays
  Clone ID: 700236816_FLI
caagaactgaaactacattgtttggagatagttcatcggaaatccttgatgagcctcagatggtgatgtctgctgaacctttccatgcacctgcttatttgaaccgttgggcttgaatttccagcctccaagttcactagcactgaagctggaaacattgattcatatagcatcttcacacctacatgtcatgcatcttttgcctcttcaaagaacaaagtgatgaaaaggctacattctgctggaaaaatgggagaacagtatgatccatgcactgagaagcattcaactgtatacttcaatctagctgaggttcagaaggcacttcatgttaatacagtcattggaaaatcaaaatgggagacttgcagtgaagctgttaatactcattggggggattgcgaaagatctgtgctgcatatctatcatgaacttatacagtatggcctccgtatatgggtgttcagtggagatacagatgcagtgattccagtgacttcaactagatacagcatcgatgctctcaagcttccaacaataactccatggcatgcttggtacgacgatgacggtgaggtcggtggatggacccaagggtacaggggactcaattttgtgaccgtgaggggagcaggtcacgaagtccctcttcatcgacccaaacaggccctcacgctaatcaaatcgttcttgactgggagcccaatgcctgtgcaatccagcacacacagcaacatgtaatccgtgttgttgcaactgattcacgagatgaatgaacatcccgaagcacccaagtcagccagttgtccaacccggcttgttctgcaacttgctgtagttgtttatgtatcagagctaccggtgccggttaccgcagcagccgtgcttttgtcggccctgttggtgcttgttgcagtaccagttatcccctaaggcaggggacagaaactgcggaatagtttttgtttgcattgacgtgaccgcactgtaatcttaaacatcgtaccatagtcctttctatgacaaaggtgtggtttctgatgtctgcaat

SEQ ID NO: 2901 - DNA, 588 bp, Zea mays
  Clone ID: 700236914_FLI
caatttcaaatccttcgatcgcgcagcgccgcccgccctctcgcagctctctccgatggcccgcacgaagcagacggcgaggaagtcaactggcggcaaggcgccgcggaagcagctggccaccaaggcggcgcgcaagtcggctccggccaccggcggcgtgaagaagccgcacaggttccgccccggcaccgtcgctctccgcgagatccgcaagtaccagaagagcacggagctgctcatccggaagctgcccttccagcggctggtgcgtgagatcgcgcaagacttcaagaccgaccttcggttccagtcctccgctgtcgccgcgctgcaggaggccgccgaggcgtatctggtgggtctctttgaggacaccaacctctgcgccatccacgccaagagggtcaccatcatgcccaaggacatccagctcgcgcgccgcatcaggggcgagagggcctgattgctgctctgtcttcctgtttctgtaatgtctgaactaggcgatggactctatcgcttcttgtcctgcaatcgtgtaccgatgttcttggcaaatcaatttggctgttatgaatgtgattc

SEQ ID NO: 2902 - DNA, 975 bp, Zea mays
  Clone ID: 700236916_FLI
cgggaagcgtgggaagagcggcctcgtggctctcaacttggatttctcatttcttgagatgaatccgttcaccatggtcaatggggagccatatcctctggacatgagaggagaactagatgacacagcagctttcaagaacttcaagaagtggggaggtatagaatttcctctaccttttggaagagtactcagccctacagaaagtttcatccatgaactagatgagaagacaagtgcctctctgaagttcacggttttgaacccgaaaggtcgcatctggaccatggtcgctggtggtggtgctagtgtcatttatgctgatacagttggagacttgggatatgcatcagagcttggaaactatgcagagtatagtggtgctcctaatgaggaggaggttctgaattattctagagttgttcttgattgtgcaactgctgatcctgatggccgcaagagagcccttctcattggaggtggcatagctaacttcactgatgttgctactacattcaatggcatcatccgagccttaagggagaaggaatccaagttgaaggcttcaaggatgcacatttatgtccgccgaggtggtccaaactaccaatctggactggctaaaatgcgtaagcttggtgcagaactcggcgttccaattgaggtgtatgggccagaagcgactatgactggaatctgcaaacaagcaattgaatgcatcatggctgcagcgtaatcagagcgtagctccgggtagtttgggatctgcaaacacgcaattgaatgtgtcatggactcagcataaatgagagatggatagtagttgcattatatagttcacacacggtgtttctgtttttgtttcagatatgttgtagcgtgtcgtttgaacgaaaccttcacagatcattactgcaaagaaattactgtgtgttaaaataaattcaaagtctagttttgtgccttttggaatgc

SEQ ID NO: 2903 - DNA, 1391 bp, Zea mays
  Clone ID: 700236926_FLI
gttcggattcccgtacgtggaaagcggaatcgattcgatcatccgcctagctagcacaagccatccgcgacagtgttagtgctaccgtcgaccgcacgccgctcaacccgcgcgcgcgctgttgtctgttgtctcagatcagctttgcagctaaggacagcgaattctcggactgggacggcgacatactcgcggtcgccgtgacggacaaggacgtgcaggtgcagccccacgtctcgggctccgagttcgagaacgccgtcctgaggaggctcgacgtccagctcggcggcctcctgcgggccgcggcggcagaggaggagttcgccggcaggcccgggcagtcggtggttctccgcgtgcgggggcagcggttcaagcgggtggctctcgtcggtttcgccgcccgcgaccgcgaccgcgacgccgggtgcctgcatggcctaggcgaatccgtcgcgtcagttgccagggctgctcgggccaccagcgccgccatccttgtcgccgaccccgctgtggtccgaccggagtccaggctgaatgctgccgcggcaattgcttctggaactgtgcttggactgtacgaggacaacagatacaagtccgagtgggaaaaggtgcatctgaaacaggtagacctgattgggctgggatctgggccggagctggaccagaaacttcgccatgctaaccgtctttcgtcaggggtcatgcttgcgagagatcttgtgaactctcctgccaatgtccttacccctggtgctctcgcggaggcggcggcgaagatcgcttcgacgtacagcgacgtgttcacagccacgatactagatgcggcgaaatgcagggaactgaagatgggctcgtacctggcagtcgcagcggcctctgagacaaacccgccttactttatccacctgtgttacaaaccccgcggtggtgacgtcaggaggaagctggctcttgttgggaaaggcataacatttgacagcggcggctacaacatcaaggccgtaccggtcgccaccatcgagctcatgaaaaaggacatgggaggcgcggcggcggtgtttggtgcagcagaggttttgggacagatcaagccgcctggagtcgaggtccacttcatatctgccgcgtctgaaaatatgatcagtggctcaggcatgagacccggcgacatcgtgactgcttccaatggaaagaccatcgaggtagataacacggatgcggaggggaggcttacactggctgacgctttggtctatgcttgtaaccaaggtgttgacaagattattgatctggcgacgttaacgggtgctattcgtgtcgcgcttgggcccagcatcgctgggattctaacgccaagcgacgagctagcggaggaattc

SEQ ID NO: 2904 - DNA, 2257 bp, Zea mays
  Clone ID: 700236927_FLI
gtcttacctgcttgagtactactctcccgttcaccacgttcactccgtatctctcgtgcctttttcctttcctggttgcgacgagccgacgactgggcggacgccgctgccgccctacgccaggtcttcgtcggccccttcgacgagcacacacaagattcagtcgggaatgttgaatgcatagtgtaatttctgcgcaaaaagatggcatcagacgagttcatcagccttgacgcaccttgtgaggctgatgcgaaagatgaagggggagacgttcaggttaaagctcctgatgtgagtgggatggagcctctggtatcggatctccaaccagaagggaaagctggtgctgtgggtagtaatcccaagacatctgctgggaacctggatcttgaagaggggcaagtggaagatatggacctcgcggatgatgacgtagtggttggaaaggatcagctattagatgcttccattcagcccgagatcagtgttgcagctgtgcagactgtgattggttttgaggtcaagctggacaagggggacgggactgaaaatgaaataatttatgagtcaaacagcatctctattgaagaaagtcgtatcctattgaatggaatattatgtatttcttctaatatacttgtgcaactgcaagtgtctatgttttctgaagattcatttgtttccattgaatccttggaactgtacttgcataagaagtgcagactcttgcttatactcctgggaccctaaacatgttattgtgatctggggggaatttatagttgttgttgttccttgatgtggcatttttagcctcaagaggagttaaaagagcccgtgtggaatcaaaggaaccttctgttcgtgtcatctacagtgacttgacaagggaaagcaaacgaaagcttatgcaattgatgcaacaatggtctgagtggcaggctagaaggatgcaccatttggaggaagctgtggaagtgaccttagaaagtggtgaagagacttattatcctgcattacatgttggttctgagaaatcttgtgccgtgtccttttgggtggataaccaagcaagggaaagtgatacagtagatgatggttctgttccactgtatgaccgggagtttaccttgcactcgactcctctaggtggttcatcaaacactgaaagggtggataaggacgattcacgctgcttcaattgtggttcttatagccatgctatgaaggattgcccaaagcctcgggacaatgttgcaattagcaatgcacgaaaacagcataatttgaaaagaaaccaatctaatgttaaccgtgtacaaaaccgatactaccagaaaacgcccggcaaatttgatgatttgaaagctggagtactgggacctgaaactagacagtgcttggggatcggggagaatgatcctcctccttggctgcacagaatgcgtgagttaggctatcctccgggctacctagatgtggttgacgatgaagatagaccttctggtatcaccatatttggagatggtgaggtgaaactagagtatgaggagggagagctttcagagcaaggcgaagcatctccgcctaagaaaaagatgacagtggaattccctggaataaacgcccccatcccagaaaatggtgatcagtggctgtggggtagcaccccgccccagtcctcaggccgccaccactcattggattcgagggatttccatgatagagggcctcctggcgctgatcattattcaccgagataccactcccacgattttggacctttgcgcccaagcatagggagatcacactcagacagggggtggagaagcccacctcgttatgataatccgcctgcagatgatggtgcctggaccccgcattcataccccagcaggcagcacttgggccattacagctcgagctctgagatgtcgtcacgccattccagggacaaagacagagataggcatgatagcaggcactaccaccaccgcagatgagtcaagcctgtagctgatttgtatcatattcttttgctgaagaatcctctacctgacgcattcgatctgacatagaaatcagtcctgctatagtttcttaagttacgaaatttcctttccttccaatatatttttgcagcagtgctcccaaacccatggtagagagtgaccttatctcgtctggtccgtgagctgtatctgaattatatgactgccttcctcacatatgcaactcttgctccttccttgac

SEQ ID NO: 2905 - DNA, 2135 bp, Zea mays
  Clone ID: 700237018_FLI
aagatacttcaaggagcttgtgaatagaagcatgatccagccgatagagaacataaatgattggtttgtagaagagttccgtattcacgacattgtgtttgatctcatctgtaagttgtccaaggatgaagacttcattagccttagcgggcaacattcatctcaggatagtttaagaagagagaagaaaacaggtgtgcctcgctcagactgcaagctacgtcgtctggtcgtccgaaatcaacgtgtgcagcgcttccctgaagaaaccatggacatgccagaggtgttgaggtcacttagcattataggttgtactattgcggttatggccccaattgatagcttcagggtttgccgtgtgctgtctatagaaaacaactacgtacccatcagcctaaagcataagcatctggggaagctgttgcatctcaagttcctagagatatttaacacgcctattgatgagctccctaaggaaattgggcatcttaggtttcttcagacactgatattagtccgtactggactagacgagctgccactggctgtttgctcgcttacacggctcatgtgtctgatagcctatgggttcgaaaggttgccagctgagatgatggggaacctaacgtccctggaggagctacgactaaatagtgtagttggccggagtgccacccaagccctagtggcagcagagcttggcaagctgaggaggttgagggtggtcagcatcacctttttagagcagctagaggagagcttgcaagaagcattcgtgcaatctctgtccaatctgcggggactccaggaactaatgctttcgtgtaaaatgccagagcggggaagcgatatgtggggagactgggagccaccaaggcagctccggtgcctgattattggagcaatcatcttctcacgacagcctcgatggatcaaccgctcctgcctgccacgcctctgctccttatgtctgatggtgcacgctcttgaagcacatgacctagataatctagcgaggttgccagagctccagtacctcacgctatatggtatcagctggcctccaaggtatactgttggcccagacgacttcaggaatctgaggttctgcgatgtgggtacaacgttcgagtttcgtaagggcgccatgccaaggcttgaagtgctgcgatttggagtttatgcagggtactgtagttgggaacagtatggtgtgccgttcgagcagttcccaacgaaggatgtgatcgaagatcttgacttggacctggataacgtccttttacttcagcaagtcagggtcaaagtcgactgctcaggtgctactgccgcacaagtggaggaagtggaggccgtggtcatgcgtgccgtggaaaatcatgccaaccgtccaaccataaaaatgaatcgagtatgtgaaaaaaatatcctatccgacgaagagcgggaggctctgcttcggcgacacattgaaaaggattgctgcgtgcgcacgatgaaggataaatctgatgctttcttcatcagccagctgcggaggtatcgacatcttcagaaagccattattttcatcgactgttcgggtgccagcaagtgtgaggtgcagaaagtggaagcagcttatagacatgcagccgaggatcatcctaaccatccaagtattgaacttatcagaacaaacaccgacggaatggcctcctcctcatctgaccatcccaacacagagcccaggaattgatgactcggtttgtccaatccttccaacccaacagtaggtaaatgtgagttgcttaagtaccaaagagagaggtcctgttcagctagatgattagaagcattggcatggcttgttaattagattcgtggttcttagtctaaaatcacattgaagagggagacggacccaagtgatgcagttcatgtgttatctgtatcagtctctatttttataagctgtcatatattttctcgaaactatcttgtgttgattttgtgtgaagtgtacttttaatggcacgggccatgtatttccttggaaacgaccatgtggacttatttttttccccattttctttcctgagatgggctgtgtatttgcttgaaagataaggatggtattatctttgtatttg

SEQ ID NO: 2906 - DNA, 1265 bp, Zea mays
  Clone ID: 700237036_FLI
gcaaattatatgcaatcgcaagcgagcagaatggcgaggtccagtggtagtagaccagtggccctcgtgctgctggcgctgtgcgccgccgccctctcgtcggccacggtgaccgtgaatgagcccatcgccaatggcctctcctggagcttctacgacgtttcctgcccgtcggtggagggcatcgtgcgctggcacgtcgccgaggccctccgccgcgacatcggcatcgccgcggggctcatccgcatcttcttccacgactgcttcccgcagggctgcgacgcgtccgtcctcctgtctggttccaacagcgagcagatcgaggtacccaaccagacgctgcgtcccgaggcgctcaagctcatcgacgacatccgcgccgccgtccacgccgtctgcgggcccacggtgtcctgcgccgacatcaccacgctcgccaccagggacgccgtcgtcgcgtccggcggccccttcttcgaggttcctctcgggcggcgcgacggtctggcgccggcgtcaagcgacctggtgggcaccctgccggcgcccttcttcgacgtgccgacgctgatcgagtcgttcaagaaccggagcctggacaaggcggacctggtggcgctgtccggcgcgcacacggtgggccgcggccactgcgtctccttcagcgaccggctgccgcccaacgcggacgacggcaccatggacccggcgttccggcagaggctgacggctaagtgcgccagcgaccccagcgggaacgtggtgacccaggtgctggacgtgcgcacgcccaacgccttcgacaacaagtactacttcgacctcatcgccaagcaggggctcttcaagtcggaccagggcctcatcaaccacccggacaccaagcgcgcggccacccgcttcgcgctcaaccaggccgccttcttcgaccagttcgccaggtccatggtgaagatgagccagatggacatcctcaccggcagcgcgggagagatccgccgcaactgctccgtgcgcaacaccgccctcggagatgtctcatcgtcagcccaccagctcgagaccaccgccggcgacgaggggctcgcggccgacgcgtgaaatgatgattagctgctgttgttttttctctggtctccttcgattctgttgaaataaggcttgctgcatcatcggtatagtttgcattcttctacccatcaatatggtatatcttcctgtgtcagccccgtgattaccatgcagaccaacgcgtgagcatc

SEQ ID NO: 2907 - DNA, 1245 bp, Zea mays
  Clone ID: 700237060_FLI
ggccagtgacgcgcacacaggagattaatatggcgagcagcggcggcgacgagaaggcggctgcggtggtgcagaacaagaaggtggtgctaaggaggtacgtcaccggcctccccaccgaagaggatatggagatcgtcgtggacactatcgttctgcgcgtgccggcggggcagaccgccgtcctagtcaagaacctctacctgtcctgcgacccctggatgcgtgaccgcatgagcaagcacgatgacggcgaccccaccgtcctcgccccggactttgtgatcggagaggccatggtcaatttcggtgtgggcaaggtgatcgattcgacgcacccagagctcaccgccggtgacctcgtgtgggggatgagtggatgggaggaatacacactcgtcacccagacggaatacctgagcaagatcaaccacaaggagctgccgctctcctactacacgggggttcttggcatgcccgggctcacagctttctcctgcttcttcgagctgggcaagccgaagaagggcgacttcgtgttcgtctccgcggcgtcaggcgccgtcgggcaagtcgtcgggcagctggccaagatcgccggctgcttcgtggtcggcagcgccggctccgacgagaaggtcagtctcctcaaggacaagttcggctacgacgacgcgttcaactacaggtccgagaccgacctcggcgccgcgctcaggaggtgccttccagacggcatcgacgtctacttcgacagcgtgggcggcgcgacgctggacgccgccctgctgcacatgcgccacggcggcagggtcgcggtctgcggcatgatctcgcagtacggtctggaggagccgtacggcgtgcgcaacctgtactgcatcatcggcaagaccgtccgtgtggaggggttcaacgttaatggctacttccatctgtacacgaggttcgaggaggagatggcgggctacatcaaggacgggaaggtaaccgtcgtggaggacgtcgtcgagggtattgagagcgcgccagcatctctgatcggattgttctctggcagaaacgtagggaagcaggtcgttgcgattgcgcattcaggaactccgtaacggtgacgagatgagaagaacaaggcttgggccacttgcctacttgttgtgtgtgatgtcatcataagaaggcttggcaccgttatatgcactacactaaaacataaaatctccgacggccaaaaccgtcgcacat

SEQ ID NO: 2908 - DNA, 617 bp, Zea mays
  Clone ID: 700237077_FLI
cttccccagccatggcgaccgcgacgcggaggctgctccccgcgctcctcaagaccctagctccagccggcgcgcgcggcctctccaccgagaaggctgttggtgcagccgccgtcgtcggcagccacaccgctaagtggatgcaggacacgagcaagaagtcgccaatggaactgatcaacgaggtacctccgatcaaggttgatggtcgcattgccgtctgtgaaggggcttctgaaggtgttggacttggccacccaattgagtacatctgccttgatctggaggcacctaatgtgtgcaagtactgtggtctccgttatgttcaagttcaccatcactaaattgggaagatactgccgtctaccgctgcagaagctgagttgaggagtttatgtgcacacacatttgttccacaatgttctgtagtgtactttgtactatgcttgcgggcaaaatattacctttgatgatcatcctcttctcgggcgatcgtttattaatcctgtcttagtatggttcatttttctacagatgaattgtgctcctttttcagaatctatacaagctgtgtgtattgaagttttactctaaataagcatggaactaacgagggc

SEQ ID NO: 2909 - DNA, 303 bp, Zea mays
  Clone ID: 700237118_FLI
atcagcccaatcaatatgctgtgagattttgacttctcacagtcacgggccagccacaccgacgcgaagacgagcacgaaaagatctgtacgccgctatccgctcgtggagaatcgatggaacgcgaccttgggaggatcggtgggtctgtctgggagctgtatttataagcctcggtcccctccggagtccgtcctagttgtggctgactcggactcgtgcatgcgggtaaatttgatttttattattggatatctaataatgagtggataatagttagggactaaaattagttgacacatt

SEQ ID NO: 2910 - DNA, 682 bp, Zea mays
  Clone ID: 700237152_FLI
cgctggaggaagttgatcctgatcttgtcaatgctggcaagcagaccgtcacctttgtccccggtgcctcaacctttgactcttccgagtcctttggcatgatccgcggcggtcacgtcgatgtttccatcctcggcgccctccaagtcagtgctgccggcgacctcgccaacttcatgatcccaggcaagctcttcaagggcatgggcggcgcaatggacctcgtcgccaaccccgaagccacaaaggtcattgtcgcgacggagcatctctgcaaagatggatcgtccaagattgtgcagcagtgcagcttgccactcactggcgcgcgatgcgtgagcaccatcattacagatttgtgtgtcttccaggtagaccgcgagaagggcaccttgacgctcaccgagctcgcaccaggtgtcaccgtcgacgaggtgaagagcaagacggacgcgacatttgcagttgcagatgagattgtgactatggaataagttgtaaaataggaaataattggatgggtggtgaaggatataccagcgtgcactagcatggagtttttattttggatgaatgggggttcgttctatggatatagagcgcatggttgggatattatagcatttcggcgtgagtgatggagagcttataagaggaagagagacgtaaagatgttcttgag

SEQ ID NO: 2911 - DNA, 512 bp, Zea mays
  Clone ID: 700237155_FLI
gccgaccttcaaggtgaggaaagagaagctcggggacagaatcactgcgctccagcagctagtctcgccttttggaaagacggatactgcatcggttcttcacgaggccatcgaatacatcaggttcctgcatgaccaagtagcttccctgagctctccctacctcgggtgtgggcggcccgtagtgcagcagatacagcaacgacgacaggcgaaggacgacggcggcgccgcggcgaaggaggacctgcgaagccgagggctgtgccttgtcccggtggcgagcactacgacttatgcagtggccgctggtggcgagacggcgccggagttctggctccctaactttgggggcacactacggtagggacagagacagagacatgaatatagtagcgtggacatggagatcttggtagctagctaggtctcgtaggcatgtatttgtagctaataaggccgtattctcatgtctgatgcaaaagcaaatgaataaacctgaccagtcgatc

SEQ ID NO: 2912 - DNA, 1117 bp, Zea mays
  Clone ID: 700237160_FLI
aaggtcggagcttgtatcaatgacaaggagagcaagctgatgcgtttggaggacagggtggatgaactgattaaagagaaggagcacattagtgtgctgctccggagcgcgctgcaggcaaccaccagtgaggtgttaaaggttgcagaggatggactgagggaagctggcattgagattgggcttgatgagcgaaaggtgcacgggccagggaatgtggagaaggacgaggtctataccctggcaggggctctcgagaataccatgaaggaatcccaggtcaggatcattgagctccaacatcttgtcgaagcactaagggcagaatctggtttacttagaacaaggctagaaggacaagaaaaggagattggtcagctaagaaagcaaataaagcacgttgaagagaaggaaagggtggcaaatgaaagtgttgagggtcttatgatggatgtgacagctgctgaagaggagattaaacggtggaagatggcagcagaggaagaagctgaagctggtagatcaattgagcaagagtttcaaattcagatatcatccctccgcaaggaattggacgaagctaaacaagctatggtggagctagaaaacaagctgaagttcaaggaagagacagctgctgctgcaatggcggcgcgcgatgctgcggagaagtctctaaagctagcagacatgcggtcgtccagactacgcgagaggctggaggagcttaacaggcagctcgaagaatcagatagtagaatagactcggtaaatcgcaatggccataggaggtacatgtgctggccatggcagtggttgggactgaactacaactacgtgcggttacctccagtggaggcagatgagacgtccaatgagatggagctatctgaacccctaataatataggtgctccggcctccacatttatacagatcccgctctttttcagtagataaaggggaacagtagacttttgttttttttggtttgggttcttgtgtagatgtttttttcctaatttattgatgcatgttttgcggaaaactgacgggtaattgtaaaaaggtaccacttgggacatacatagtagtgagatgatgagaagttcattctt

SEQ ID NO: 2913 - DNA, 807 bp, Zea mays
  Clone ID: 700237224_FLI
ggatgacaaggttcctgagagggttctgtatgaaattcttattcagatctctgggcaagacaaaccctcattaaatggcaatatccctgtaactcctaggttaaactctgtaccacagccaaagcctcatcaacctatgaggtctagtgatactcctttgccacagcatgcagcagtgaatggcaggaatgccgggtatggtatcccaccaaatcattcatacgacacgcacactcaagcactgtcgagtgggttaccgaatagaggactaagcaacggtacatatgaatatagtaggcgtgtatttggttctgttctgaatgatgttagccgtcgagctaccagggaaccaatcccgtacccgtcctactagcatgttgagccccggtgactgtgactctgtgctgacagaaaatatttctgaagatgttgtctgttgtgtcagccacctgtaatatctctgtactcaccatttcatgcctgtaaatatgggttatggtggtaggacatatgcttgtttttttggttctgcttcgcattgtagtgagacttgtccctgcttgttaggtccttctcatcccctagtgtgaaggccatgcctccactagtatggctgcactaggaaataccattcctagttacatgaatgggtggcaatatgctggcaattgtgttttaacattagtgccattagctatttcaatgttacagcagggcgtgtttgtgtttgcgatattagtatttggtggattttgtgcttctcatcatgtatctgggacatctgaaggagaaacattgttttaaaag

SEQ ID NO: 2914 - DNA, 407 bp, Zea mays
  Clone ID: 700237256_FLI
cgggaggaggcccgcaccgatgcacgatctgccggagggggttcgccacgggccaggcgctcggcgggcacaagcgctgccactactgggacggcgcgtcggcgtccgtctccctgtccgcgtccggtacggggtcgtcgggcgtcacactgaggaattttgacctcaacctgatgcccgtggcggagaacgcagggatgaagaggtgggtcgaggaggaggaggtgcagagtccactgccgatcaagaagcgcaggatcttggattagctctcgcgctactaccagcggttgagacctgtgtgcccacagcctcggttcgtgtaaaaaggaagattgattgtttcatcgattatttgattcgttctttacttctttcacactaataaaatatttgattgttgtatc

SEQ ID NO: 2915 - DNA, 869 bp, Zea mays
  Clone ID: 700237259_FLI
ccacgataaggccaaacaagcggtaaccttgaacaagggaagagaattgacttcctgggtcagtcatagcaaatgcatcggcagctgcgcatgcaatgaagtccagggctgccaactgagatgagaagttcctacgtgctcacacacccaaaccttagtcgcgatcaggccccaaggactcgagatgaagtcgagggcacggtccaccgccggcgactccaggctctcggtgaggaagaccaaggctgagaaggacccaaacaagcccaagaggcctccgagcgcgttcttcgtcttcatggaggagttcaggaaggactacaaggagaagcaccccaatgtgaagcaagtctccctgattggcaaggctggtggtgacaagtggaagtccctgtctgatgccgagaaggctccctacgtgtctaaggcagagaagctcaaggctgagtacaccaagaagatcgacgcttacaacaacaagcagtctggagaccccacggcgtctggtgattccgacaagtccaagtccgaggtgaacgacgaggacgaggagggtgacgagtgatgtatgacggatgaaactctgtccaagtgtttgcagtcagggaaaaaatctcgtcgttgtcggcctaaccgggttttctcgaaggactttctagatgcagtagattagtgccgtcttctgagtagtttccttgcaagtgtcgtcccgtccctggagtgaggcagtttagtttgtagtttcttcgcttcatcggcactcgaccgttgttggattgggatgtttagcctgcagtctgtacttaccccaagcatctatggtgcctgttttaaatctcagatcacaatagacgtttgttttaaatctc

SEQ ID NO: 2916 - DNA, 704 bp, Zea mays
  Clone ID: 700237267_FLI
aacaatggttcccttgattaacactctcaccttagtggccggctatctgtggtacgaatatatctacaagctggacaaacatacatataacaagtaccatccctacacgtcgtggattcctataactatttatgtctgcctacgcaattgcacccaacaattgaggagtacccatttgtctctttttgtttggcttggcaaaattacaatggagagttatatttctcagtttcacatttggctcaggtctagtattccgaacggacagccaaagttgcttctatctttcttaccagattatccgatgcttaactttttgcttactacgacgatatttctgtcggtatcattccgggtgtttaagctcacaaacgtactgaaagaggcatttatccccaccagggacaacaagtgtctatatcaaaattttattgctggagttgcagtctttgcatgcctatattgcagctcattattcttcaaaacctaccaacagtatagctgatacatagactctaaatcttagctatctcatgtagctcaactcagaaagcacattgcttttcctgggatggagaaattccaagtaattaagtgaacttgttaatttgtttcttttgtatgtatttccaagtcattgcgtgtttttacagacatccataatttttaactgcctatgtaaacaaaacaagtcttgtaaaatc

SEQ ID NO: 2917 - DNA, 2533 bp, Zea mays
  Clone ID: 700237276_FLI
tgccaacctacaagacctacaaggccaagcgacatcccaatccgagcgtttcatctcgccctctgctctgccccctcacaccttctcgccaggctcagtggtgacatcagctgaggtccggtagtttgcctctgcagccatgcctcaaatccagaacaccatgcggcaaaactgcacactcctagctgttctttgtggggagtttgctgagaagcggcagacaccagcttccctggcgccagacacaaagcggctgcggctgtcataccctttccctgagctcgcttcgtctgggagactggaggtgcacacgctaatcaatcccactttggagcaatttagagaggcacagcaggcggtgcatcctgtcttcttgtatcttcaggggcagcagcaagagaatgaggaggagattggcacgcttgtctggggtgatacagatttatctgacccgcagatgtttgtctcactcatcaccccaccatttccgaccatggtttatttagaggttcccactggggaaaagcttgcccagtcacttcattcaaaggggataccatatgtggtatattggaggaatctattttcatcttatacagcatctcattttcgtcatgcgttaatgtcagtcattcagagttcctgcagccatacatgggatgcatttcaacttgcacatgcctccttccgactatactgtgtaaaaaataatcatgtacaaagtgttaagcttggcccctgcctacttggggatgctccaaaaacaaatgtcatccctgctggggatgaagtgaatgaggaacaaggttgttctgaaggttttccagatataagaatatatgatgaagatgtgagcatgaaatttcttctctgtggagtaccatgcaccctggatgcatgtttgttgggggcactagaagatggtttgaatgcgctcttgaatatcgagattcgtgcaagtaaacttcagaaccgagccagtgctcatccacctcttcaagctgaagatcttccacatggatttgttacaatgcgctgcgatatcacaacttgcagttctgcacatgtgtcgtttcttgtttcttgcagtgcccaaacttgttttgatgatcagcttctagggagccgtatcaagaatgaaattattgagaagaggcagttagttcgtgttctattgaataatgaggataacaagccatcttcatatgagcctttgccttccatgtgcgtggcttgcggagcttctacttttgaagtctggataaccgtgccaaaatgggcagcacaggttttgaaacatcttgcgccagaaatctcctacagaagcttggttgcacttggaattgcttgggtaaatggtacaccagtgtcctcatttgataggcaggatgcagaccggcttcttttcttttgctctaaccagtgcggagatcaagctattcaaaatggctcatatgctcatgtatccagctggtcagcaccccttaccaaggatagaaccactggaagtctcgagtcaaaacagatgtcatttggtgcaaaaggagttgtaggggataatacgatctccctatcatcattgaaaccaaggttaaagcctgcaacaatgagaccccttccccactctcgcaagcaacaaatgcatccctttatggggtttcctcagtccatcattcacgatgctagtcaagttaagcctagcttgccagcccctcctgtgaagcacaacgcagtacctgttaccgcagtgacaccgagaaaatcatcatctgggtcaccatcatcctggtcacgtgttcagctaccaatcccattgaatcctctgccaataaagaaacatgagtgcaatcggttgcctatccacatttgctctgaagaagacttcttgaaagatgtcatgcagtttctacttcagaggggccacatccgacttgtacctcagggaggactggcagaatttcctgacgcagtgttaaattcaaagcgtcttgatttatataacttatacaaagaggtggtataccgaggtggcttttatgtaggcaatggcataaattggaaaggtcaaatcttttcaaagatgcacaaccatacagttacaaacaaaatgacgggtgttgggaacaccctaaaaaggcattatgagacgtacttgcttgaatatgaacttgcacatgacgatattgatggggaatgttgcttgatttgccacagtggtgctctgggtgactgggtgaactgtggattatgtggagaatgggcccaccttggctgcgatagacggaaagagctaggcactttcaaggactactcgaaggcagatgggatggaatacatatgtccccagtgtagccttgcgaaatacaagccgccgttgcctgcaccatgaaatatgttgattaacttctgttactttcttaagggtgatggtttggatagaaattagtggctaaggatgtgtagtgttgacctgtactattgaatatgatcctgtacgatttgtacattttttttataaaatttctgatttccg

SEQ ID NO: 2918 - DNA, 1185 bp, Zea mays
  Clone ID: 700237304_FLI
gcttccattccaatttccacacacacacgtctcagctcactccctcctccagtttcgtcagctcgtcatcataaaccgaacacagagctctcgattccattccaggatgctgctgaacccggcgtcagagacgtcggtgctagacaccatccggcagcacctcctcgaggagccagcggcggcggaggcgcggccggccgacgagagcttcgggagcctggtggcggaccagtggagcggctcgctcccgttccgcaccgacgacgccgacgacatggtggtgttcggggtgctgcaggacgccttcgcctacggctggctgcccgacggctcattcgtgcacgtgaagcccgagccagtgcggtcccccgactcgtcctcctaccacccctgctcctacgacggctcaccctgcttcggcctcctggacccggagccgccgctgacgcccggcaccaccacgcccgggagggggcaggaggaggccgcggcggccatggcccggggcaagcactacaggggggtgaggcagcgcccgtggggcaagttcgcggcggagatcagggaccccgccaggaacggcgcgcgcgtctggctcggcacgtacgacaccgccgaggacgcggcgctcgcctacgaccgcgccgcctaccgcatgcgcggctcgcgcgcgctcctcaacttcccgctccgcatcggctccggggacaagcggccgtcgccggcgccgcccgagcccgccacctcctcggactcctcgtcttcggccagcggctcgcacaagaggcggaagcgaggcgaggccgcggctgccaacatggccatggcgctggtgcccccgccctcccagcttaaccggccgccccagccgtggttccctgccgcgccggtcgagcaggcggcgatggctccgcgcgtggagcagatcgtcgtctagccatgcgtgcaacgatggatgcgccggcgaaagcgggggacgaacagggcaaggccctgcgctgcacttgcgtgacagctccaccggatggaatgcgaatatgcgataaagctcgtgatgccgctgttgctccgtgcaactggcgcaagtggaagaagctgtctctgtgtgtaatcaagtgtcttgtctgcggacgaattttcggtatgtgcgtcgttgtcactgctcgggattgtgctgctgctgat

SEQ ID NO: 2919 - DNA, 1678 bp, Zea mays
  Clone ID: 700237308_FLI
tcaagtgtaaagaaagaacaccgataaaactccgtcgaactactccagacgggaagcacctccaatcccctcgcccccacggaccctcgccgccggggaagcgccgctcgctcaggaggacagccatggcgccggagccggaggatgatattatgaacgagaagaatccccgcccgctcgacgaggacgacatcgcgctcctcaagacctatgggcttgggccgtactctactagcattaagaaggtcgagaaggagatcaaggaaatggccaagaaaatcaatgacctttgtggtataaaggagtctgatacagggttggctccacctagccagtgggatttggtttcagataaacagatgatgcaagaagaacaaccgttacaagtggcaaggtgtacaaagatcataagccctaatacggatgatgctaaatatgttataaatgtaaaacaaattgcaaagtttgttgttggactgggggataaggtgtctccaactgatatcgaggaagggatgagggtcggtgttgatcgcaataagtaccagattcaaatccctcttccaccaaaaattgacccaagtgttaccatgatgactgtggaggaaaagccagatgtgacgtacaatgatgttggtggctgcaaggaacagattgagaaaatgcgtgaagttgttgaacttcctatgcttcacccagaaaagtttgttaagcttggtattgatcctccaaaaggcgtcctttgctatggcccacctggcactggcaagacacttcttgcaagagctgtagcaaatcggactgatgcttgtttcatccgtgtaattggaagtgagttagttcagaagtatgtcggcgaaggtgctcggatggtcagggaacttttccagatggcccgctcaaagaaagcgtgcattgtattcttcgatgaagttgatgctattggtggtgctcgttttgatgatggggtgggtggcgacaatgaggtgcagcgtacaatgttggaaatagtaaaccagcttgatgggtttgatgcaagagggaacatcaaagttctcatggccactaataggcctgatacattggatcctgcacttctgcgtcctggtcgtctggacagaaaggtagaattcgggctacctgacctggagggccgtacccaaattttcaagatccatacacgaaccatgaactgcgagcgagatattcgttttgagcttctggcacggctctgccccaactctactggagcggatataagaagcgtgtgcacagaagccgggatgtatgccattcgtgcccgcaggaaaacggtgacagagaaggattttctcgatgctgtcaataaggtcatcaagggctaccagaaattcagtgcaacacccaagtatatggtgtacaactagagagtgtcttcatggaatatgttgattttagaactccgggatcttttcggtgattgtgtcatcgtgaggttctatgcaaggattgttgtttgttttgaaatctggatccccagggattgcatcctgtaccacatgtttttaagacaaggttatccgcttggtggttcactgtacctgtggcaattgttgccgacaccgaactgaacataaagtcagaaacaggctacagtgagtgttgaaaaggaagaaatacagtgggtgcctgtttaaat

SEQ ID NO: 2920 - DNA, 876 bp, Zea mays
  Clone ID: 700237327_FLI
ccgactgcctacctcagctgccgtcgccatgggcagaaggcctgctagatgctatcgccagatcaagaacaagccgtaccctaagtccaggtactgccgtggtgtccctgaccccaagatcaggatctacgatgtcgggatgaagaggaagggtgttgatgagttcccctactgtgtgcaccttgtctcttgggagaaggagaatgtctccagtgaggcgctcgaggctgcccgcattgcctgcaacaagtacatgaccaagtctgcaggaaaggatgccttccaccttagggtccgggttcacccgttccatgtcctccgtatcaacaagatgctttcctgtgccggggctgataggctccagactggaatgaggggtgcctttggcaagcctcagggcacctgtgctagggtggacattggtcaggtcctcctttccgtgcgatgcaaggacaacaatgctgcccatgccagcgaagctctgcgtcgcgctaagttcaagttccctggccgccaaaagatcattgagagcagaaagtggggcttcaccaagttcagccgcgctgactacctgaagtacaagagcgagggcagaattgttcctgatggtgtcaacgcaaagctgctcggcaaccacggcagacttgagaagcgtgctcctgggaaggctttcctcgatgccgttgcttaagtgcggatgcgaatcctgacgttttgctttagcgtatcttactttgcttcgtggaacatgaatttcaagtgttttgagggtattacagtgccttatgtgaacttgcctatcttgtgctgaacatcggaatgtatcctccgagtatgtttaatcgcattaattttattggaaattggttgcggaac

SEQ ID NO: 2921 - DNA, 1031 bp, Zea mays
  Clone ID: 700237333_FLI
gctcacttggacccctcttcggctcttcccacaatctcacagccctcgaaggcaccacccgcgccgccgccaccgctccgaaattacagccatcgtagtgcggcggctaggtcggccggcgtttggaggagctccgaagatgtggtgccagtcgtgcaaggaagggtacgacgaggaggacgccgggacctgcaaggagtgctacgaggaggccagcgagacggaggaggagctcaagcgggagatcgacgacctccgctcccgcctcctcttcctccgcctcccctcccctaccctcgacgccgcatccgcccccaactgcgacctcctcctccacgccatcccctccaccggcgcgggaggcgaacgcgatgctgggcgcacccccgacacacccgccgtgcccgcccatcgcgtcatccttgccagcagatctcctgttttcagagcgatgcttgagaatgagatggaagagagtaggagtggcgtcatcaagatctatgatgtgtcttatgacatccttcgtgcttttgtccattacatgtacactgcagaagctcttctagacgaacagatggcatctgacctcttggtgttggctgagaagtacgaagtaaagcacctgaaggcatactgtgagaagttcatagcatccaaagtgaatgacgacaatgctattacccactacgccttcgcgcaccgtcacagcgcaaagcagctgctggaggcctcgctttctgtgctcatggccaacatgtctacgctatcggatcgtgaagaatacaaggagcttgtggagaaggacccaaggcttgttgtggagatttatgaagcatatctcaaccggcaagtcaacactgcagctgggaaggacacaaattgtagcaacaggaagtgataattacgaacagaactcgtgcagtagcaatattctaactatgcatttatgcattcatgtaagcaagttaagaacatcatattctcatgctgtcttgatttaactgctaatttttttgatgataaatcaatta

SEQ ID NO: 2922 - DNA, 1292 bp, Zea mays
  Clone ID: 700237335_FLI
gacaaatctgctaaaatgtcaggtgatgttcctagagcagccattgccaatattttcttcaccgaaatatttacgccgctcttgctcgctgtcgtaacggtcatcccgtacttgttcatcaacgcgcaaactggtgtcctagcagacaaacaaactgttgccaaaggtgcaaacccgccaaagattcagcctacggcctcccttgtccgtattctgattgtcgcctttggcccggtggccatcaatgctggtgtgttgttggttatgtttgccatggcatgttttatgggccctctcttgagtatgtgctgcaaaaagttcggtagtgtcttggctgctattgcgcatgctttggctgtcatcttcatgctggttttcttcgaggtactgttcttgctcgaaggattcaactttgcccgtacaatggctggtatgattgcggtggtatcgctccagcgattcctgttcaaactgattgtctcattgactctgacgcgagagtttaaaaccgaccagtctaacattgctttctggactggaaaatggtactctatgggctggcactccgtctcacagcctgctcgtgagttcctttgcaagattacggaacttagcatgtttgcagctgatttcattctcggacattggttgttgatgttcatgcttccggtcattcttattcctcgtgttgatacactgcactcaatgatgctcttctggcttttgcccagtcaacaaatccgccctccgatttactctttgaagcagtcaaaacttagacgtcgtcgtgtcatccgttttgctatcctctatttcgttctcgctgttgttatgattgccctgattgttggaccagtttatggtggcaaggcagtttcggcctcattaaacaaccagctgtctgatattgctggtttccgattgttacagccaaaccaccaaaaccatgataacacgaacggaacccagcaaacaggtacaggggcgccaaactataccggtgctggcagaaaaacgacaagcacaggcgcgggtgctggtgtcactggcaagatcagactattttgattacagaggtatacattttatccaacttaatggcccgttcattatggagcaagtcttctagctctcgaatatctattgttacacctatagttgcttgatctttaagggataggtagtatatgcttgctcctcattcattgagcaatggccctttatgaattatcatagtattttttttatatctattccataacgatgcttgcctaaatagactttgttttctt

SEQ ID NO: 2923 - DNA, 916 bp, Zea mays
  Clone ID: 700237408_FLI
ctagcttttcgtcagtacaacgcctccgccgctccttccattagctcagacatggttctcggcctctacaccttcgccgacatcgacgccgacggagcaccccgcctcgaggttgccgatggcgaggagttcgtccgtgtcgatcgcgttgtcgagcttgccctcggtccccgggtgctgaaggcccctggaaccctttacctcaccaccaggagggtgattgggtcagcgatggcggcgagggctacgctgtggacttcgttgccatctcgctccacgccgtgtcgcgtgatcccgaggcgtatccatacccctgcatctacacacagatcgagacggaagctatttctgacgaggagtctgatgtgtcagattctgaaacaaatggagaactcgagctctcaaaagttatggaaatgcgcatcataccttcagatcctggtcaattggatgaactctttgaagcattctgcaattgcgctgagcttaaccctgatcctagtgctgagagtgatgaagaacatggctgggttcatggtgatgagggttatgaagatacggtagatggaagcgacactgagttttcagatgtcaacccaattggtcaaactggtgagcaggatattaaccatgctgtaatcgagctccagatcaatgaccaacgttttgaggacgcggtagatgaggagagtcacaggaacgggaactagggaccatgtgaattggtcgtcgtcgatgcagcatacttgtctgtaaagacttcacttttctcatgttgtcagatcatgtggaccaacttgaatggcaacaatgggggataacgagctttattatatgagttgtgcctgtaccatacgtgcatgaccatctatggtcatatgactactgactagtattttagagggcgagggggtgc

SEQ ID NO: 2924 - DNA, 585 bp, Zea mays
  Clone ID: 700237443_FLI
cgcgggaatgggacgccacgcggcctccggcggcggcgtgcagcagaagctgcgcaagggcctctggtcgcccgaggaagacgagaagctctacaaccacatcattcgctacggggtcgggtgctggagctccgtgcccaagctcgcagggctgcagagatgcggcaagagctgccggcttcggtggatcaactacctacgccccgacctgaagcggggcagcttctcgcagcaggaggaggacgcgatcgtcggcctccaccagatcctggggaacaggtggtcgcagatcgcgtcgcacttgccgggccggacggacaacgagatcaagaacttctggaacagctgcctcaagaagaagctgcgtcagcgcggcatcgacaccagcacccacaagcccgcggtctccgccagcgtgccggcatcggagcagccggtgtcgcaggaccgcaagccgttggccgcagccgccgctgatggcggctccgacatgaagcaccagcaggtgttcgacccgttcccgctgaccgacagcttcggcggcggcttcggcgccgcactgtacggccacacgggcggcaagca

SEQ ID NO: 2925 - DNA, 1444 bp, Zea mays
  Clone ID: 700237451_FLI
ccgctggctgcaagcggcaagcggcgaggaacgtgctgatcctgatgagcgacaccggcggcggccaccgcgcctccgccgaggccctgcgcgacgccttccgcatcgagttcggagacgcctacaaggtgttcgtgacggatctggggaaggagtacggcgggtggccgctgaacgacatggagcggtcgtacaagttcatgatccggcacgcgcggctctggaaggtggcgttccacggcacctccccgagatgggtgcacggcgtgtacctcgccgcgcttgcctacttctacgccaacgaggtggtggctgggatcatgaagtacgagccggacatgatcatcagcgtgcacccgctgatgcagcacatcccgctgtgggtgctcaagtggcagcagcaccccaaggcggtggtgcccttcgtcaccgtcgtcaccgacctcaacacctgccacccgacatggttccaccacggcgtgacgaggtgctactgcccctcggccgaggtggcgagccgggccctgctccggggcctcagcccgtcccaggtccgcgtcttcgggctgcccatccggccctctttctgccgcgccgtgctcgacaaggatgaggtgaggaaagagctggggctggaccctcagctgcccgctgttctgctgatgggaggcggcgaggggatcggccccgtggaggagaccgcgagggcgctcggcgaggagctctacgaccgccggagacggcgccgggtgggacaggtcgtggtcgtgtgcggcaggaaccgggcgctgcggtccaccctgcagtccctcagatggaaggtccctgtcaagatcagagggttcgagacacagatggagaagtggatggccgcctgcgactgcatcatcacaaaagctggtcctggtacgatcgcagaggcactcatacgagggcttcctatcatcctgaacgacttcatccctggacaggaagtcgggaacgtcccatatgtcgtggacaacggtgccggcgtgttctccaaggacccaggggaggccgcgagacaggtcgcccgctggttcagcagcacagacggggacgagctcaggagatactcgcgtaacgcgctgaggctagcgcagcccgaggcggtgttccacatcgtcagggacatccacaagcagctccagcgacagcctgccgcggtcacccggatcccctcccgctcgctgacctcgtccttcccgtaccatatgtgaaatcaagaatgctactgcagttacgtattctgctgcatgttggatattatgcttgggacttgatgtatgcctaaccttttgaagaacctgtatattatattatattgtatataagaattgctctctgttctgttcatgagtgatttttgtgtatttctcgctgctgaatactatttggaaagaagttaacatacattgtgact

SEQ ID NO: 2926 - DNA, 185 bp, Zea mays
  Clone ID: 700237474_FLI
gcgcgtgtaatttgctccttcttcttcaaatataattccgcctcaattgtatgtatgtatgtattaagtctgtctgcctgtaaaaactaaagctttttgtttctttacgcacaccgcgcgcgcctgtagcaagcaattcacagacgacgatgaacgaaaggaagctccttgatttggcactgagt

SEQ ID NO: 2927 - DNA, 1300 bp, Zea mays
  Clone ID: 700237475_FLI
cagatgctgaactgtgttgctggattgcgtgaatatttttcgcaaacagatgaaattcatacagttccaaggattccggtgatgcataccatggttaatgcggcctcaatgaaaaaggaccaaaaccttcaagaaccagactcgaagaccaaacaagctgataacaaacatttggatatggtagatgaagagtcggaagatgatgatgactatcaagttcctgatgctgatgtggaggaagaacctaccaaatctgacagtgatgctaagaactcagacccaatagatttgtcttggttttcgggcattattcgtcaggatacaaatgagaaaagtcgtaactgttgggcagtgcctgatagcaagatctttaaagttcgtagcaagaactttccacatgacaaatcaaaggtaccagcaggtaagtatctaatggagctcgtagcagttgactggtttaaggacgccaagcgcatggatcatgtcgctaggcggaaaggatctgcggttcaggttgccgctgagaagggaatgttcactttcctggtaaacatacaaattcctggaccaagtcattacagcttggtcctttattttgtctcaaactccttgaagaaaggatcgctgttgcagcgttttgccgatggtgatgatgattttagaaacagcagactgaagcttatcccatctgttccaaaggggtcttggatagtgcggcaaagtgttggaagcacaccttgcttgctggggaaagccgtggactgcagctatttgcgtggtcctgactacttagaagtggatgtagatatcggttcgtccgcggtagccaacggggtcctgggcttggtgtttggcgttgttaccaccttggtagtcgacatggcgtttcttatacaggcaaacacgtacgacgagctcccagagcagctcctaggcgctgcgcggctgtcacacatcgaaccttctgcggccgtgtatcctgtccttgacaacatttcctgaacgggacggacaaatcaacctgtgcagattctttcgttctttccgtccgccccgccacaaaaaggctctcccaatttgttcagccactgcagcattgtgcagctcgatacatttgaggttcagacagacagactgcagcagtccacaagtgccttgtacccttcatacagttttgccatttttttaggtcttttcttttacattttactttactcggtgtagtttgagcttcctacagatattgtaatgcaatagacacatcaaagtgagatatacagatacagcatggttcagaaac

SEQ ID NO: 2928 - DNA, 1282 bp, Zea mays
  Clone ID: 700237487_FLI
gtgcggcgcaacggccacaccttccccggtcccgcctccgtctctgtccagcgggcctccgctctcctcgccgcccgcccgcctgtccctccctcctcgccgccatgaacaacctcctcacggattcctttgagctccctcggcgggactcctcaagagacgcagatattgaaatgggaatgcatcaggctgatgcttcagacaacttgaaagatttcttgaagaaggtcgatgcaattgagagtataattgcaaagctgtcaaatctattgaataagctccagactgcaaatgaggaatccaaagcagttacaaaagcaagttccatgaaagcaattaagcagcggatggagaaagatattgatgaagtggggaaaattgctcgtcaggcaaagacaaaagttgatgaactggaaagagataacctatcgaataggcaaaaacctggatgtggaaagggttctgccgtggaccgatcaagagagcaaactactggagcagtgaaaaagaaattgaaggaacggatggatgattttcagaccttgagagaagcaatcaggcaagagtatcgagaggttgtcgaaagaagggtttttactgtaactggtaatcgtcctgatgaagagacaattgatgacttgatagagaccggaaaaagtgagcaaatattcaaagatgctatccaacatcagggaagaggccagatactggacacagttgctgaaatacaggagcgacatgatgctgtaagggatctagagaggaagcttttggagttgcaacagatatttatggacatggcagttcttgtcgaggctcaaggagacatgatcaacaacatcgagacacatgtctcgaacgccaccaaccacatacaacaaggcgtgagcgcgctccagaacgcgaagaagctgcagaagaactcgaggaagtggatgtgctacgccatcatcctgctgctggtgatagtggcggtcattgtcgtcgcggtcatccagccatggaagaagggagcctagggtggctctaaacagggaggagggcgtgggagatacgttttttttttgtctgtctgtgtaatatctgtgcagttgttgtgggtggttctgtgatttatggttgtacttatggacggcaccagagaagctttggtatttcgattctttctgtttgggatagttcgtgcagtccattgaccatagctctcagaaatgttattgtggtgaccatatattcatatgtcggtcagctgatgaaaagaatggtgcttctgaatctttcc

SEQ ID NO: 2929 - DNA, 1170 bp, Zea mays
  Clone ID: 700237549_FLI
gcggattgaacaggtttacaggcgcgctcccgcacgcatgccccaacccttttttgacaagctcagcgtccaccactaaacgtaagatggcggcggagaccaaaccggctgcggccatcggggttgccggcgagatggaggtggaggcataccgccgcctattcccggtggccttcctggagcgccacctgggtgagtccgtccgcatcgatgcccgccgcctgagagaggcccgcaccaccaccgtcgccctcggcgccgtgtcctccgcgcatggttccgctctcgtccgcgttggcgacaccgccatgctcgcgtcggtcaagctcgaggtgatgtcgccctcggccgagtacccagacgaaggatccgtctctgttgagttccacatgccgcccatctgctccccgctggttaggccaggccgatctgcggaggtggcaccagtcatctccaaggcccttgaagacgttttgatgagttccagaatgctaaatttgaaggacctctgtttgataactgggaaggcttcttggctagcatacctggatatctattgtttgaatgctgatgggtctctgtttgatgctgcacttatttcagcagtggctgcctttacacatttggagattcctttagtttctgttggtgacgatggtaaattatttactgttggaggcaatgacggaaaaaacaaatttgaattggtaaacagagaaaagaggaaactgacacttggcgacattccattgtcccttacatgtgcacttcataaaggatctatactaacggacccaacttctgaagaagaatcaattatagagacctatgtgactgttgtcgttgattcttcagaccgcctagtgtcattacaaaaagttggaggcacagtgacatccatggcaactattaaggagtgcattagcttggcgaaagaaaggaggctgaggctaagagaaattctgatagactctgtcaaagccatggaagtcgaccatactgaataattctgcaaatacattcagttaatctaaccggattatttcttgatggttctctgtgcctcggctgcactgattgtaacagcatttttgttgggttagtccaagtatgtagctatttgtactccgcacatgatttttgacttaagtagccagacaattttatctg

SEQ ID NO: 2930 - DNA, 1291 bp, Zea mays
  Clone ID: 700237552_FLI
ggtgaagatatttatgagcctttcttaaggttgttatggaaaggcaactggtttgtacaagaaaaaagttgtaagatattgactgctataatcagtgcacgaccaaagcttcggaatggcacacttccaaatggagatgcttcgaattcgaagagcaagcttacttcaacacatgatgtattgagaggtttggtcaattggctctgttcacagctgaggaatcctacacacccgagctgctctattcctacttctatccattgcctctccacttcgctaagagaaccatatgttaggacattatttgttcaagctgatggcatcaagctgctcattccattaatttccccagctgccacgcaacagtcaattcagctcctttatgaaacttgcctctgcatctggcttttatccttttatgatgctgcagttgattatttgtccaccacaagagttatgccaagacttgttgaggttgtcaagggatctactaaagagaaggtggtcagagttgctgtgttgtctttctgtaatttgctggcaaagggtgcatttgctgcccagatgatcgatcttggattgccgcaaatagtacaaaacttgaaagctcaagcatggactgatgaggatctgttagatgctttgaatcaactagaggtgggactcaaagaaaacctcaagaagttgagttcctttgataagtacaaacagcaagttcttcttggtcatcttgactggtctccaatgcacaaagatccaagtttctggcgtgagaacattaacaattttgaagagaatgatttccagattctacgagttctcatgacaatcattgacacatcaagtgacaccaccgctcttgccgtggcctgctacgacctctcacagttcctccagtaccatccatctggccgaatcgtggtggcagacctcaaggccaaggaccgagtcatgaagctcatgaatcatgaaaacactgaagtgcagaaaaatgcgctgctgtgtgcagaggctcttccttggcgcaaagtatgccagttttctgcgggcttgagagaaaccgagcctttttttgtatttagatccagagaactcctggccatttttcaaaatggctgttaagaaaaccttgaaaattcttgttcattatatcctattgttatttgatttctgagaccgatgtataataaataattagagccataccatgctcgatgtaataaagtgtccatgggcctgttgattcatttatgtaaattctgatctccaactttagcgatccttttttttc

SEQ ID NO: 2931 - DNA, 334 bp, Zea mays
  Clone ID: 700237560_FLI
cctctcaaaatgggtagcatatataggtttcgatcaccgatatcttgtcgatcgatcgatctttatatacaagaaggcaaacaagagatagatgcaatggcatgtcgcgttgtttcttcctaatctcgtcgtggtcctcaacacacacacccctctattaattagctgctattgtgactgtcccctccgaattccgattgcaagacgtgcagggagagagaaagaacgatgaatcaattagccagggaactgaaaattctcgggcgcgcgtgcgcgctctaaacctgcggcagttgttggtgcgcgtcgccggacttcatgaacactccgagcc

SEQ ID NO: 2932 - DNA, 773 bp, Zea mays
  Clone ID: 700237563_FLI
cgttcgtctgccactgcctgcccgagccgccgctccccttcctcggtctctcctcgcttcccagtcccagtcctagcccagcgcgccgcggcgttaagccgttaactggccagctggtagtgatggcaaccgagccgccggcggcagcggagaagaagaaagtgccgctccccaaggtggtcacgctcaataaggccctcaagctggcccagacatgggtggacaaaatgagtgcatcggagccggatgaacccaacgataaggatttcgagggccggccaccaaagctcggtcttggtgctaaagcggcacctggtgtgaagcgtgtggctcccactgacccagttgagaggaggttgcttgggaaggtgaatgcgcagaagaggaaggccttggaggatgataatagaaatgctcaggttgcgaatgaggctagtgacgacgatggtcctgaaagcaggaccagtgcctttaacaagaagaggccagtgccttcagttacttctacacctttagggaagaaggctaagtgacaagctatatgcatagactacctgagtgatctgcttgttttgatcacgtttcgtactaactcccatactgatgctattttcatacggcatagtataccttctcatgctccagtttgtgattcctgaatttaaagggatagctgtgcttgatattgttaatgctcattgccaattcagaaattcacatactctctgtttaaagctaaatacactgtgatattcatttgattattttttttt

SEQ ID NO: 2933 - DNA, 903 bp, Zea mays
  Clone ID: 700237614_FLI
accaacgcagctagagcactcgaaagagaagactgaagcgaaccaaccttcaccatctcaagacgaacaggccgcaactaatggtgacgttgctgcctcgatgcataccccttccgacaacaaacagaagagctggtgcattcctgcacctccaagtcagtggctgattcctgttatgtccccgtctgaaggacttgtctacaaaccttataccgggcactgccctccggtgggaagtcttttggcgcccccattttttgccagctaccccacctcctcctcctccacagctgggggggatttcatgagttcggcatgtggagccaggctgatgagtgcccctgtgtacttcccgtctttcagcatgcctgcagtgtcagggtctgcagttgagcaagtgagccatgttgcagcgtcgcagcataaacggaactcgtgtagtgaagcggtgttggcatcaagggacagcgaggtgcaaggcagtagtgctagcagtccggcatcttctgaaacagcagctcaacccagggtcattagggttgttccccacacggcacgcacggcttcagagtcggcagcaaggattttccgctcaatacagatggagaggaaacaaaacgacccgtgactggcagataaaaatgaaagaacggagggagtagactaattttttgaccgataattataatgatcgccgtaaattggctggcccgcccgccttatgttttttgttcagtgtaaatatgctgtgtctgtcagaatgatatggcatctgtagctattttggttctgtcagaatcatgttgattggaattcgtcggtcggttgagtaggatgaaaattgggcacagcccatacgtctacagcaacgtcaaataaaggaagagaaagcaatacatcacc

SEQ ID NO: 2934 - DNA, 764 bp, Zea mays
  Clone ID: 700237701_FLI
gcacatccatccaggtcatccatcagctcttccctctgctcacaactcacaagcaacagttctgttggagcttatcaatctctcgattcccaggaggaacggaaccaaaggtctgctggtcgcgcgcgtgccactagtcaggagacgggatgggcaaccttgtctcgcagtgcgtcgggaacggtgccggcgcgcggcctctggtcatcggggcgacggacggcagccgaacgatggtcgaggagaacaccgcggtcgcggagctgatgatcgacgcgccggggcacgtggttgctcgcgccacggacgtggcgagggagcgacggttgcgggcgatggcggccgacgaggtcctgcgcgctggcgtggtgtacctcctcgtgccggcaggccgggccggtgcgcggctaggcggccgtgaggtcgaggccatcgggaggctggtctctgggaagaagggttcgaggaagagcaggcccggcggcggcaggagggtctttccggacgtcagcgccgaagaggacgcggctgaaagaaaggaggttgtgtgtgctgttaaacgggcccatgatcatggatttgggcccaggcaatggaggcccgccctggataccatctatgaggcctagattttttcttcttattagagagagtaggaaaccccattctttggtttatatgtttaggaacttaccatgtacaactgtatacattcgtctaaccgtgcaactaaaaaacgaagacagaaaaaatattcttttttc

SEQ ID NO: 2935 - DNA, 974 bp, Zea mays
  Clone ID: 700237707_FLI
ctgcaggttggctggatgtggcttcggcagcgacaggcagcctggacgagcaacgcattctggctgattttttcgaacacagctccggcgccgatgcccggcacgcaaggagggcaggcggtggcgttccgcatctccggcgacaaggccttcttcttcggctgcgggttctacggcgcgcaggacacgctgtgcgacgacgccggccgccactacttccgcgactgctacatcgagggctccatcgacttcgtcttcggcaacgcccgctccctctacaaggactgcgagctgcactcgacggcgcagcggttcggctcggtggcggcgcacgggcggcgcgacccgtgcgagcgcaccggcttcgccttcgtcaactgccgggtgaccggcacggggcggctctacgtggggcgggccatggggcagtactcgcgcatcgtctacgcctacacctacttcgacagcgtcatcgcgcccggcggctgggatgactgggaccacaccagcaacaagagcatgacggcgttcttcgggatgtacaggaactgggggcccggcgtcgacgccgtgcacggcgtgtcctgggcgcgagagctcgactacttcgccgcccgccctttcctcggcaagagcttcgtcaacggataccactggctcacacctgatgtctgaaaaacacacaaacacacgcgcgagagtcaggagacacatcgattacagcaaaccagattaatttattcgtacagcaacagcataaacacagaataggacaccatttacaagctagccgctgaatatgtatagtgatccactggcacagaagtcagattcaagattcatttcgtctatacaaagtagtttccaaaacttcgtcatgtataccagtgtaaactagacagtgagcagtgagtctgttatgtctctgcataggagaccttggatgtgcaattcaagttgttccattatgtttg

SEQ ID NO: 2936 - DNA, 984 bp, Zea mays
  Clone ID: 700237741_FLI
gctcggctggctgcacgccggagccccggcgccagatctcgccaagtgccagggccgccgcaggcccctctttgcctgcgcgagtctcagaatcccgagagggaaaaagaaaagaaaagatgatgacttcctctgcctgttactacctgtgccgctccctcgtccgggctcctccgctcaagtcgaggagtgcagtgcgctgtccaagcgccgccccgccaggagccagcggtgccacctccacctccaagacacaggatccagttgaaaaccagaagctatgtgcctatttggttgagaaggcagtcaatagacttccgccaggagcagagaatatacttgggatctttgatctgcgaggctttcgggttgaaaatggtgatctccagttcctaaagtttttgatggacgttttttactattactacccgaagcggcttggccaagttctttttgtcgatgctccatttgtttttcaaccaatgtggcaggttgttaaacctctgttgaaatcatatgcctccctggtaagattttgtgataccgagactgtgaggaaggaatacttcaaagaagaaactgtgcctcctgatttccgcgattagaaatgtgcaggtggtctcggaaacatgacctttaattgattgagaatcgattggcacccaggggggctggcgccttcctataccttttgattaacttctcaaaagttgctcagacgacaacaaacgattggagagtccagtaaaaaatgaccctgtagtcctgtacttgtataacttctgcgaagtagaatgctgagtttaggctgctgtctggagtgctcctgtaccatatttttctggttttggatgaagctatatggaccaaattcatctctgttgaacaattgccaattacataacttgtgtttgcccaattccatggtgtagtaccataacttctcagtgcagtgcagacaacacatggattccatttttgatt

SEQ ID NO: 2937 - DNA, 872 bp, Zea mays
  Clone ID: 700237765_FLI
tggtagggaatgccgatggcgggctcgccgccggtggtcgcggggtccttggttgtcgccatgaggtctcagctcgccgaagcgtccaacggcgcggccggaaccgctcagggacgacgaccaggcggtgggaccaaagcaggctgccattgctgtcgggagacaagcgagccgtctgagcaggaccacacggcggtggtggtcgacataccggcaccatccgctgagcgtcctggtgttgtggcgccgaccgccgccaccggatgttgcagcagctccgcccgcgaagcttgtgctactccaaccaccgtgactactgtgaactctgcgccacgaggttgctgtggcggcattggcgaaggagacacccgcgagaatgcaaggacaagctgctgcaccgatgcccgtgactctcctaagaaggcagggcaacaatgcaacgcaaggtgttgttcttggggcaaacaaaatactctcaagtgtcaagcgcaggatacaatctcaaatctcaagtgaaatactgactgttctgttcatgcaacaagaccaaaagctttccgagtgttcagatcgactgggttgctcgtgaagttttcaacattgagagtgatcaaatccttagctgcttgcttttgtctctctattttctccttgtgtatttttaagcgtttatccatgaacaaagtatcggtactagggtactactaaaccaaggtatttaggctgtttggctcaggtttaaaaatgcttccactgtcaaaaggtagaacgtcaattaattgcgtgtttggtagaaataagctagtccatcatatttctactcctcactttcatgtttggtttgtggaatagaatagagtactatcccgtct

SEQ ID NO: 2938 - DNA, 1102 bp, Zea mays
  Clone ID: 700237778_FLI
gttggttcagccatgcctatcgccctcccactaaatctcatcgcgttcgcgacacctttctgcgaaaagatacggacatcaccgagcaccaagccaccatgttcgatgtttcctgtctatccaagaaactgcagaagcgcaattaggctagagattgcaggagaacagaattcaatcaggccgtcttccatctccaccttcctcgcctctctctctctctctctctctctctctctctctctaaccactgtactagaactatcagtacctgagcaagactgcttctacctgtactgtgctgacattatacacctcttcccttcttgcccgtgccaatcgccattgccaggcaccacgtagagctgcattgcttcgacgccatgggagttgcaacaagagtttgcttcgtagttcttgttctgatctgcacatctttcagaggagggagggccgcgacattcacgttcgtgaacaggtgcgcggcgacggtgtggccgggcatccagtcgaacgcggggagctcgaggctggacccgacgggcttcgcgctgcccgcgggcgcgtcgcgcgcggtgccggcgccgtcggggtggtccggccgggtctgggcgcgcacgggctgcgtgcaggacgccgctagcgggaaggtggcgtgcgccacgggagactgcggctcggggtccctggagtgcgacgggcggaacgcggcgacgccggcgacgctggccgagttcacgctggaccccgccggcggcaacgacttctacgacgtcagcctcgtggacggctacaacctgccggtcgtggtggagcccgcgggcggcagcggaggcggcggcggcgccgccacgacgacgacgtgcgccgcggccgggtgcgcggcggacctgagcgagcggtgccccgcggagctgcgcgccgagggcggctccgggtgccgcagcgcctgcgacgccttcggcaggcccgaatactgctgcagcggcgcctacgccagccccggcacctgccgccccaccgcctactcgcagctgttcaagtccgcgtgccccaggtcgtacagctacgcctacgacgaccccaccagcaccttcacctgcgc

SEQ ID NO: 2939 - DNA, 741 bp, Zea mays
  Clone ID: 700237789_FLI
gcaaaagcagaggggaaagtgccgtcagctctgactctcgggcacttggctgacgacccgttctctctttgcaactgcaactgcaacgcaccaagaaactgccggcgatcgatcggggcaaggagataaacatggtgcacgggaagctggaggtcctcctcgtctccgccaagggactcgaggacaccgatttcctcaataacatggaccccttcgtgatccttacctgccgcacccaagagcagaaaagcagcgtcgcaaatggagcaggaagcgagcccgagtggaacgagaccttcgtcttcaccgtctccgacgacaccccgcagctccacctcaagatcatggacagcgacctcaccaacgacgatttcgtcggcgaagcaaccatccccctggaggccgtgtttcaggaaggcagccttcccccggcggttcacccggtcgtcaaggaggagaagtactgcggagaggtcaagctcgcgctcaccttcactccagcagcggaaactcgccaccgccctgatgacaacgaggaggggccgccttacagcagctggagttgatctatctgccatgggatgcatgcatcatatatatccaccaagagaagagaggatacttaattaatctactcaagagaagaaccagtgttgctgttatgcgaccctctatctatctatatatatatgcttaatttgtcatgaatgactgccaatataaactaaactattcagagtt

SEQ ID NO: 2940 - DNA, 1457 bp, Zea mays
  Clone ID: 700237791_FLI
catagctaagctgagagcaaagatgtcttggcggcgaaaccagctacgtgcgtttctcgttctcgccgtcatcctcctcatcaccgcagctacctaccgagccaatgcgcagccggcgcctccagcagacccaacgccagccgctgacacctgcgccgaccccagcgtggaaggggcgtgccgcaacgtcccgaaggcgctgcgcctgaagctgatcgccatcccgacgatcctcgtctccagcgtgatcggcgtgtgcctgccgctcttgtcccgctctgtgcccgcgctccgccccgaccgcaacctcttcgtcatcgtcaaggccttcgcctcaggcgtcatcctcgcgacgggctacatgcacgtgctcccggactccttcagcaacctcacctcgccgtgcctgccgcggaagccgtgggccgatttctccttcaccaccttcgtcgccatgctcgccgccctgttcacgctcatggtggactcgctcatgctcagcttctacaaccggaggaagggtggcaacacctccggccgacgcactagcggcgcggtcgccgaccacgagagcccggcgcatgagcaccactggcacagccacggccatggacatggacatggacatgctgggggcatcgtggtggctgacaagcccgaggacgatgaggccagccaggtgcagctccgccggaaccgcgttgtcgttcaggtcctggagatgggcatcgtcgtgcactcggtggtgatcgggctgggcatgggagcgtcgcagaacgtgtgcaccatccggccgctggtgacggcgatgtgcttccaccagctcttcgagggcatgggactcggcggctgcatcctgcaggcggagtacggcgcgaagatgaaggcggggctggtgttcttcttctccacgacgacgccgttcgggatcgcgctggggctggcgctcaccaaggtgtacagggagaacagccccacggcgctcatcgtggtgggcctgctcaacgcggcctcggcggggctgctccactacatggcgctcgtggagctcctggccgccgacttcatggggcccaagctgcagagcagcgtcaggctccagctcctctgcttcctcgccgtcctcctcggcgccggcggcatgtccatcatggccaagtgggcgtgatcgtattcgtatctgagacgacatgacacagtactgttacaccaacactgcctgcagtctatctatctgcaagactgcatcgctgcatgcatgttcctcctatagctggctgttgtatcatttcgcgtgcttcgttgctccgtgcgcttccgtgtcgccatcaggaagctaggtatatattagacgcagatagcgttgttgtcatgactattcaacgtccacggtacaatacaaaagtagtactctatctatgtattaactatgttcttaaatatttgtcgtggtaaat

SEQ ID NO: 2941 - DNA, 867 bp, Zea mays
  Clone ID: 700237811_FLI
tgtgtccttcgcctacttaacccgcgaggacacgccgcattccgcaggcgcgatcgagctcaccaagcgcggatattggcccgtcagcagaacaagtgcgctgcacgcgacgcgatcgaccggccggccgggcagacagacattatctcaattcccactagctagctagctgctgcaggaggcaagagacgacgacagacagccagccgccaccgtgcggtgccaaggcgagctccggtccgcgacctgttgtgcgccgccgctgctggcttctcttccgcctcgacgcgcgacgatcgatggggttccccctgctcgcgttcgtggcggcgaggggcctcatgcaggtgttcaacctctcggcgccgctcaacctccgcctgccgctcgcgcgccacctgccggaggccttcgccgtcctcttcggcgtgctcgcgtcccacgccgcgtggctcagcgacgccctggcgcgcggcgccgcctggcgccacaccgggaaccggggcggcgtcgacgagtatgtccgctacgccatgctcagcatctccgactgagacgcgcgcatccacggcggacgacaaccaccatctccgactccgtccctgcgcgatcgagaaggcgctagctatcaagctgcggtccgtcgtgcatgctcgtggtggcaactgcatgccgcccctcgctagattagcttaggatctctctccccctccccctttgtaacacattgcttgctcgctcctttggtttcttcttgttcgtagcatgcgtgatttttggtagcatcggaaagatctgtgagattgttgtaacatgcaaccgtggaccgtggttaatttgtaaatacaggtgaattttgttcgagct

SEQ ID NO: 2942 - DNA, 1302 bp, Zea mays
  Clone ID: 700237825_FLI
cccagctcagcttagcaatccgtctctctatctacaggcgggggaattaatagatggagggcaaggaggaggacgttcgcctgggcgccaaccgctactcggagcgccagccaatcggcacggcggcgcagggcacggaggagaaggactacaaggagcctccgccggcgccgctgttcgaggcggaggagctgacgtcgtggtccttctaccgggccgggatcgccgagttcgtggccaccttcctgttcctgtacatcagcatcctgactgtgatgggcgtgagcaagtcgtccagcaagtgcgccaccgtgggcatccagggcatcgcgtggtccttcggcggcatgatattcgcgctggtgtactgcacggcgggcatctccggcggccacatcaacccggccgtcaccttcggcctcttcctggcgcggaagctgtcgctcacgcgcgcgctcttctacatggtcatgcagtgcctgggcgccatctgcggcgccggcgtcgtcaagggcttccaggagggcctctacatgggcgccggcggcggcgccaacgccgtcaaccccgggtacaccaagggcgacgggctcggggcggagatcgtcggcaccttcgtgctcgtctacaccgtcttctccgccaccgacgccaagcgcagcgcccgcgactcccacgtgcccatcctcgcgccgctccccataggcttcgccgtcttcctcgtgcacctggcgaccatccccatcaccggcaccggcatcaaccccgcgcgcagcctcggcgccgccatcgtctacaacaggtcccacgcatggaacgaccactggatcttctgggttggccccttcatcggtgctgctcttgccgccatctaccacgtggtcatcatcagggccctccccttcaagagccgtgactgattatacgtacattgtttattaccaacagcaaccatgcagcatacgaatcatcgttattaagctatatatgtataatatccagcatgtcttgttaattactagtatatgtgctagtaagtggtgcgtgctcgctcttccatcgctgtcgtcgtctcatctgctattgttcgtcatatatatatgtccatgtgagctagctagtgtgtatcacgcgcggaggccagttcagctagccatcagtctgcaatgcactttgtgacttctctgtttagtcctctctcgcttgggttttggtacggtgaagtatataaactaagcatgcatatgtgtaaaaattcaaattcaagtgtatgcatgcatgccaataatgaaagttaagaag

SEQ ID NO: 2943 - DNA, 2645 bp, Zea mays
  Clone ID: 700237832_FLI
gcactgctcttgatgtggagctggcaagttcaggaatttttaatgcactatcagatgggttaagggataaacatgataaactcaggcgattctgtatggcaacactaggagagttattattctatatttctacccagtctgatcaagataccaaggaaataaatacccaagaataccctttgaaggataacaggtctgcaacatcttggcaggttcctagtgctgtaattgcactggtgtcatctatcttgcgaaagggtgaagatgatctagctcagctatatgccttacggacagtcgataatatatgtagccaaggaactgaatggacatcccgttttgcatctcaggatgcgattggacatctgtgctacatctataaagcaactggaaagcaggagagtacgaggctcattgcaggatcttgtttggcccgcctctctcgcttcagtccatcatgcattcatttaatcttggaaaagatatcattcaaggatatagcatgcacacttatcaagggaaatacacgtgaacagcagattagtcttaatattctcaattcggcattagttaatagtcacactgtgacaagcatgaaccggcatattctttcattatcagatgacaaacaattggtccccgggctcatttctctaatagaacagggaactgatgttctgcgtgggaagacccttttgtttgttgctctgctttgcaagaatagtcgaaggtggcttcctcatttcttttgcaatgcaaaattaatatcagctgttgatagactgggaaaagagaaggagggttttattcatcattgtacagaagcatttgtgcagttggttgcttccttggtccctggtattcttgacactgtctccagcgatatacagcaggttatggttggcaaacgccatggacctgttactgctttagctgggcgagctcatccaaagagcacaattcatctgttccctgttattcttcatcttctgggaagtgcatccttcaagcatagagttgtgacaggccatgtattgcttcagttggcaaatcttattaagattttggaggcaccatttcaggctagggatgatttccaaatgacattgttgcgagttcttgaggctgctacagaggagccttctgttatacttaatgaacactcagtattcatgagtcgtatcattccaagcttatctgtcttatacaagggcaataaagatggtgatgccagatttctgtgtttgaagatactcgcagatgttatgattgtgatcttcagtgattcttcattaacttctgacgaacaaacaataactgatttgaaatcaatctctcagaggcattttctaccactgtacccttcttttgcagaggatgaagatcccatacccatatatgcacaaaaactgctagtaatgctaatggaacatggttgtgtagaagtctctgatattctgcacaaagcaacagtatcccagtgctttgaatttttgctaggagatctttcaaatgcaaatgtaagcaatgtcaagctttgctttgccctggcatctgcacctgagatggacacctatattctttctcagcttcaagttgttagaagaatagggaacctacttgagtttgttgctgcaaaagacatggacgattttcttgaacctaccctggaactttgcagagcttttattattcgtggcactggcagcaacagaagtgtcgccctctccaaaaacccagcacttcttcttgacagtgccttcagcatgagtattgctgttgatcaacaaacttgtgtcatggatatatgcgacttcggtggcaacatgggtatttttcttgagctagttggcaattcagatccgcagataagtgatttagcatcagattgtgtagtgttgttgctcaaggcagcacctcgagaggctacagtgggcttgttgacaagtcttcctaaattaagcagtgtcatggacttgctgaagcatgacagccacctacgtctgattcgcttattatatggcctagccttctcatgcagacaatacttagcccagggaatgatcctgtcaatatcagtgccagctttgatgcgagttgaagcacttgtttcagttttcaagggctccaatgatagccttcttgccgatgctgcttcttatttgagcgccgaactgcagcgcttacctcgctgtggttgaagctgcaacttggccaaggaggcaggttgtctgctattgttcaaggatgcgcatgtattccttcatccttcgtgcaccatgtacatgagctgagcaagtgagcaggacgtcatcaagtgaaaggtactttacatcagtggctgatctcagttgcctcaatggccaagtgacactttccgctcatagatgtgcagggtgcgagggtgttttatgctatcatttatgtgcagttcggggctgctgtatatggcgcttttgaacaataccttgaaggtggctagaagcaaaagaacacttcgttccctcgccaattttggttggcaattacctcagtttcatgtaattctgtagtacctgtaattttattgagaatactgtagtccaatttcatgtgtacatttataaattcctgtgaagttccatgtagctgttaaagagttcccc

SEQ ID NO: 2944 - DNA, 1801 bp, Zea mays
  Clone ID: 700237838_FLI
gggccgagcggcacaactctctcgcaggcttctctcccctctgcgcccttcccgcagcaccctgctcgcagcgctctccacaggacctgctccgcgcgcgccgcccccatcgccggcaaggcggcggtgctgctgcatattctcccggtcccccctccggagccaccctccccttctccgggacctcgagtaactttggagtaccagtgatgcaaagggacactagctctagcgatgtttctgcttctcatgtagggcgtgtaagacgtcgcaaacatccatctgaggcttccacagatgggaatagagctaatggacaaccgttgcttgtcaatgatcagaacaagtataaatcaatgcttatccgtacatattctacagtatggatgattggaggctttgcctttattatttatgtgggtcatctatatatctgggctatggtggttgtgattcaaatatacatggcaagagaacttttcaacctactcagaaaatccagtgaagagaaacaacttcctgggttcaggctactgaattggcacttctttttcacggcaatgctgtacacttatgggcgctttcttagtcggcagcttgtgaatacagtaacttcagatcacttgctttataaggtcgttagtggcctaataaagtatcagatgtttatctgttattttctttatattgcaggttttgtatggtttattttgactctcaagaaaaagacatacaagtaccagttcaaacagtatgcctggacgcacatgatacttctaacggtttttgcacagtctgctttcactgtggcaaacatatttgaagggatattctggtttcttttgcctgcttcacttattgtgatcaacgatatatttgcttatttatttgggttctttcttgggagaacaccattaatcaagttgtccccaaagaaaacatgggaaggttttattggtgcatccgtgacaactatcatctctgcatttctgttagcaaatgtaatgggccgtttccaatggttgacatgcccaagaaaggatctgtcaactgggtggctttattgtgatcctggtccaatgtttaagccagagcattactcattgggagagtcggtgccacattggttcccatggaaagatctagccattatgcctgtgcagtggcatgctttagccctaggtttatttgcgtcaataatagcaccatttggaggattttttgcgagtggcttcaagagggctttcaaaataaaggattttggtgacagcatacctgggcatggtggaattactgatagaatggattgccaaatggttatggcagtgtttgcatacatataccaccagtcattcattgcacctcagaacttctctgttgagataatcttggatcagattctaagaaacctgacctatgaggagcaaaaatacctatatgaacaacttggggaaatgtttcatgagaggcaattagggcaaagctgagagttagcgtgcttatgaaatgcatgataatttcttgtgtatttaagcattctgctcattatgtagctatagtccttgtccaaacctttgtatagaatggtagaatggagagaatgattgggttttaggtgctttattcactcttcactgacgctgcttaattcactccccttgtcatgatttctgcactctttgtagaaggggacctgggaagttttattgtttcttatcacttcctggtgctgtcctcagatcatatattcgaggattcacaaaatataagatgaagcagcagtgctagttcttatttggtt

SEQ ID NO: 2945 - DNA, 2157 bp, Zea mays
  Clone ID: 700237862_FLI
ctcttccttctttttttttccgcgcggggatttgagttggaggagacaggcagctgggttgggcttggggacgacgcgcagcgcaggagcaacgcccgagggaaagcagcgtacccatccattctccggatgttccatggcaattccggacgccggagcggttcgccgcgtgagatgcccgaggtgccactgcgtcctcgaggagcccggcgccccagtgtaccagtgcggtggatgcggcgctagccttcgagcaaagaaccgcaccggcaccagctcaggagacaccgacctgcctccgcctcctcagagcagccacctggacgccagcgacgtcgcgacgaccagcaggtccagcaccccgactcctcccgatgtcgggagcactagcaggtccggcgccccgacccctccgcatggcgggagcactcctgacgccaccgcgactggccatgccgagtcccccgaccccgtgccgccgaggaatcgtgtttctgaccaagtggcgttggtcgagaagagggggcgcgaacagacttcggccgctcaggaggtccatggcggcagcgcaacaagaaatgccggtggaaacagagacgccacctctgaatcgctggatgattcagacaagaggacgaaacgccagatcgaatcgaccgatgctgcgagaaagaggcactcaggtgaagctgcagcgcagccgcagtaccgccagcaccaggacggtcatcagcaacttgcgccgaaaccatcagctgctcaacctgcacggggacaagaagaagaggaagatgcaggggaaaaggcgccgagcccatctcgtcgcgctgagctccaagaacaacatctggggcccctgcggaagaagattctcaagacggtggatgagctcaaaggcgacctctcccaacttttcagcaagtccccagagctcaacgcgccacgcgcgcgcccacctcgtcttcccaagcaagaaggctacgtgtcccgcgcggcggcggcggcctcggtcctccctgccagagcgcgtcacgccgccgctgctaccgacggctacctggcagcgcagctcgtgcgctgaagccccgtcaagccgctgctcctcctccacgtggcttgccgtcccggcgctaccgccagtgcagagcgcacccgtgctgccatggcgtggagccgaggtcgtgccgtcacgggcacggctgctgccgccaccacggcaagccggagtgcagcagctgccgagggtactgctgcaggcccagagcgcagccgccggccgccaaggaccccaagcggcgcttggcgccccggaaccactgccggccggtgctcaagggcgcgccgttcatcgtctgctccagctgcttcaagctggtgcaggtgcccgccgacttcgccgtctcgtccaggacggtgcgcaagctccggtgcggctcctgctccaccgtcctctcctactcctacagggacccggccaggaagaaggcctaccaggactccgtcgaccggtgcagcacagtcggctccgagctgcacggcggcaaaggcgacgaagggccggacccgttcgcgccgttcatcgacggcttcgggctcagcagctactcgacggaggacgagcagcggctgcccgtctcgaggaacacgtcgttcgacaccctcgacgggaccaaaggcgtgggacgcctgcaccggctgatggggtacgggtcggctagcgagctgctgcgccactcccctgacctgtacgagagcttcagcgagcggacgacgcctgacgtgagacagcacgacaggaaagggaaagccgtttgcatcgacgatgacgacgacaactacgacgtcgatgactctgacgaggaagagtacattggcgcgctgaagcgatcagcggggaaagggtccggctggtcgctcccatggatgcccggcaaggggactccagcaacgggaggcattaggatcaggtaaataccaggaaaggattgtgtatattgcaggaagccaggaataggttcaggatttggaattcgaattggaattcctatagttgtagttttactattcattttcagtgcggtattggatttataggctgtttgtttgccatttttttcgagcgcgaaaatgctgtaaaatgaaatgtaattattcagc

SEQ ID NO: 2946 - DNA, 1665 bp, Zea mays
  Clone ID: 700237868_FLI
gaatcccgagcacaggccgccgctcgctcgctcgctgcagctacgcacgcacgcgcctgctcctccccttagcttccacaaggctcgactcggccggcggcgatggcgcggaagaagatccgggagtacgactccaagcgcctcctccgggagcacctcaagcgcctcgccggcatcgacctccagatcctctccgcgcaggtcacacagtcaacggatttcactgagcttgcaaaccaggagccgtggctctcatctatgaagttggttgtgaaacctgacatgctctttgggaaacgtgggaagagtgggcttgtggccctcaacctagatcttgcccaagttcgccaatttgtcaaggagcggttgggagttgaggtcgagatgggtggctgcaaagctccaattacaaccttcatagttgaaccatttgtgccacatgaccaagagtactacctttcgattgtatctgaaaggcttggcaacaccattagtttctcagaatgtggaggtattgagatcgaggagaactgggacaaggttaagactatctttcttcccacagagaagcaaatgacacctgacgcatgtgctccattgattgccaccctgccattggaggtccgcacaaagataggtggtttcattagagctgtattttctgttttccaagacttggatttctcatttcttgagatgaacccattcaccttggtaaatggtgaaccgtatcctctggatatgagaggagaactagatgacacagctgctttcaaaaacttcaataagtggggcaatattgtgtttcccctaccatttggaagagttctcagtccctccgaaagttttatccatgaactggatgagaagacaagtgcttctctgaaattcacggtactgaacccaaaaggacgcatctggacaatggttgcaggtggtggtgctagtgtcatatacgcagacactgttggtgatttgggatatgcttcggagctaggaaattatgcagagtacagtggagctcccaaggaggaggaggttctgcagtatgctagagtgcttttggattgcgctacctctgatcctgatggccgtaagagagcccttctaatcggaggaggaatcgctaacttcacagatgttgcttctacatttagtggcatcattcgggctttaagagagaaggagtccaaattaaaggctgcaaggatgaacatttatgtccggagaggtggtccgaactaccaaactggactcgccaaaatgcgcaccctaggcgccgaacttggcgttccaattgaggtctatggaccagaggcgaccatgactgggatctgcaaagaagccattgattgcatcatggccgcgtaaatcacaaatgtggttgttccatttgaagtcacatccgttttgtactagacgttccttgtacgtgattgctctggtaaaacagagaacgatcattgtcatgagtaaactcggcctttgtaacacagttacgcaagtaataattaagatcttggtttggtgctctgccacccttctagggtgggccggtgaggtgaatgtacaaataacaatgcactttgtgatccaccagattgcagtgctctggtatttctagggtcttgtactgcctgtgctgttttgtgttgtttgtttctc

SEQ ID NO: 2947 - DNA, 677 bp, Zea mays
  Clone ID: 700237873_FLI
gcctgtggcacttactcttgctggccttccgaggagagaggatgctgaggcctgtgccttctacatgaggtctggcacgtgcgggttcggtgcgcgctgcaagttcgaccaccctcctcgccaggacgatgtctaatacggtgtactccctccgtttcgttttagttgtcgctggatagtacaaaattgaactatccagcgacaacttaaaaaaaccggaggaagtatcctgtatcaggatgtggtaccatgcgaatcgcactgttaatgcttgatgctgtcactgccatggtgggagcctgacttgtaaagttcagtatcaccggaagtgtttgtcggcgcgtgctggtactaacggtgtaccttcggcggttggatggtgtcaagagtaaaaatacaccgcctgttctcaaactttgactggatgctaatctccaaaatgtgagaaccaagttaccgtaacttgagttaatccgcttgcatggttatgtgatgataaggcgttgggacgtggagtctacatgatggtagggatataggagatcgaatcgcatgttcgcctcacatgttgatgcaatgccaacgtgcaattagcttgtcaacagattaatttagcattattggcatattaaagagtttaggccttcaggtatcaggatatacattttggaattttg

SEQ ID NO: 2948 - DNA, 1360 bp, Zea mays
  Clone ID: 700237884_FLI
ggagagtcgttgcggtgaaacgcctgtacaagaacaactacaaacgggtggagcagttcataaacgaggtagacattttgtcccgcctcctccaccagaacctggtcatcctctatggctgcacatcccgtagcagccgcgacctcatgctcgtgtacgagttcatccccaacggaacagtcgcggaccatgtccacggatcccgtgcgtcggagcgcggcctcacgtggcctcgaaggatgagcatcgccatagaaacagctgaggcgctggcgtacctccacgcggtcgagatcatacaccgtgacgtgaagaccaacaacatactgctggacaacagcttccacgtgaaggtcgccgactttgggctgtcgcgcctgtaccctcctgaagtcacccacgtgtcgaccgtcccacagggcacgccgggctacgtcgacccggtgtaccaccagtgctacaagctgaccgagaagagcgacgtgtacagcttcggcgtcgtgctggtcgagctcgtgtcctctaagccagccgtcgacatgggcaggagccacagcgagatcaacctggccaacatggctctcaacagaatccagaaccacgaggtgggccagctggtcgaccctgagctcgggtacgagactgacggtgagacgaagagatccatagatctcgtcgctgagctggcgttccggtgcttgcagctagaaagggattcacggccgtcgatgaaggaagtggtggaggccctgaaccgtatcaggaacggggattcactggagaataacaagacggacaggagctcctcgtctcctaaggaagacgcacgcctgctgacgagtagcagcatacagtactctcctgactcggtaatccacagattccatagccaatcaaccacgcactcggcagcgtcaaatgctagcgggtgagtgagatagatacccggccttgtgtatatataccgaccgatcctgaagaaacgaagcccttaccagacgagtttgtgtacagtatagagatctgccaatgagctgattcatctgggtgagttgtttcttctctcttttgttgactggttcgtagtacaatgtacacagtcacgttggagccacagcaggagcttggcataaattaaggcattattaggcaaagtagtagactcagtgtcaggccaaaaattgtaatgtaggaactacttttttcgttttgacgaatgaagggggctctgccgatgacagaagtggagctacacgaaataggaaggaatacaagctgtatacttggtactctaattggctgacaggccagcatttggtccagtttgtcctgaacatgtactctgtggtctatttggcgc

SEQ ID NO: 2949 - DNA, 699 bp, Zea mays
  Clone ID: 700237896_FLI
agcttgcctcttcgctgatcgactcagagtcgctcctcgtgttcggaaggggttacaactacgccaccgcgctggagggcgccctgaaggtcaaggaggtggcgctgatgcacagcgagggcatgctcgctggcgagatgaagcacgggccgctggccctcgtggacgagaacctccccatcattgtcattgcgacccgcgacgcgtgcttcaggtaatgataaagaagcatgggcccagctttggttaccctttttggtagcaggaaaccaacctcttttcaaaacctcttgcagcaagcagcagtcggtgatccaacagctcctctcgcgcagggggcgcctgatagtgatgtgctctaggggagatgccgcggctgtgtgccctagcggtgggtcgtgcagagtcattgaagttccacaggttgcagactgtctccagccagtgatcaacataattccattacagttgctcgcgtaccatctgactgttctccggggattcgacgtggaccaaccaaggaatctggcgaagagcgtgaccacgcagtagggagaggtagatgagatgtttgtattgtagttaattgtccttgctcttgaggtggctagtacgtagcataaatattatggtgcgttaaacttgttgttttgtgaacgaaatgtacctctctttttttaattatggtatattggtgtc

SEQ ID NO: 2950 - DNA, 785 bp, Zea mays
  Clone ID: 700237916_FLI
aggaggtagcaagagtagcctgtacgcggcgctgggcgtggccagcgactgctccgacgccgagctgcgcagcgcctaccgcaagctcgccatgaaatggcacccggacaagtgcgccggcgcagggagctccggcggcggcgcggacgccgccaaggccaggttccagaagatccagggagcgtacgccgtcctgtcggaccccaacaagcggatcctgtatgacgtcggggcctacgacggcgaaggcgacgatgacggcgccggggagatcctcggagacattctcgaggccatgagccaggcaggccctgccgccgacaacggcaagggggagagcctggaggacctgcagcggcagttcgaggagctgttcctgaggccgtcgccgtcgtccttctcgccgaacgacgcagctgggaagtcggcttccaagagtaggcctgctgggaggaaatagacaggacactgcggcgaataggtcggtccagctactcctgttccagataagctacgacctacgaggtaccgatacctggccaggagcccaggacagcgacctgcgacggcgacgaggctgccagtgctgcacgctcaagtacatgctccgagttgtagctactactgtagatcggcacggcagtcgccagaatggtaccataaggcggccgtacgcacacacgcatgaacgctgtttttaccatctcaggttcgctgcaaaatttccagcgtgttctctgtaaaatccctgcatgattgctataaagaaattcttcgtgggtact

SEQ ID NO: 2951 - DNA, 1133 bp, Zea mays
  Clone ID: 700237918_FLI
cgcgctagctagctagctgttggcttgagatcgatccgtcgactaagctatagctagcagccatggggagggcgccgtgctgcgacaaggcgagcgtgaagaaggggccgtggtcgccggacgaggacgccaagctcaaggcctacatcgaggagcacggcaccggcggcaactggatcgcgctaccgcacaagattgggctgaagagatgcgggaaaagctgcaggctgagatggctcaattatctgaggcccaatattaagcatggtgacttcacagaagaagaggagcatatcatttgcagcctctacattagcattggaagcaggtggtccatcattgcagcgcagctgccggggcgaacggacaacgacatcaagaactactggaacaccaagctgaagaagaagctcctcggaaagcgcgcgccgtccaggcgcgcgaggacgaaccaggatccctgctacctcgccgcgggagccgccagcagcagcagcagcagcgccgcgacggccacgcaagccctaagcgcgtcggctctcgagcggatccagctccacatgcggctccaaggcatctacggcgcgttagcttgcaacgacgacagcaacgctgccttcgggtcggcggcggcggcgctgccgcagtggccgaagcttgaggcgctgtcgcaggccaacaggctgctcccggggtcgctgccggcggacgccatggccacaaccgtgagcgtgcagccgcacccacagcatctggtcgaggtcgaccaccaccagagcctcgccgccgccgcactcgagggcgagcaacagctcagctctgccggtgaaggaggctttttcgagcggcccaaggtagatttttactctccatcagccgaggtcgccgccgccgccgccgccagcgtagagatgaactcggtcgccccgatggttgttggcggctacgcgggcgccgccggattcgggcctcagcaccatcacgacgagctctacgactttctgtacagcaagtacggatcagtgggcgggctggcgcacgacggcgggcatgttccaacgttgccggagctgcagtgcccggacggcgctgccgccgtcgtcggagccgacgagaagttctcggcgtggacc

SEQ ID NO: 2952 - DNA, 1075 bp, Zea mays
  Clone ID: 700237947_FLI
gccggggttgataatccaaacatgactccattggggcactgcgtgctcatgctgatcacacacctacagtgcaagatcaatgagaaatcgaggctgtatgaggatgaagcgttgcagaacatatttttgatgaataatctgctgtatattgtgcagaaggtgaaagattcagagctcaagacattgcttggtgataactggattcgcaagcgtcgtggtcagattaggcaatactctacagggtatcttcgatcatcatggactagggtgttagcttgcctgagagatgatgggcttccgcacacgatgggttcatcaagcacactcaaagccgcattgaaggatagattcaaaaactttaacttggccttcgaggagttgcacaggacacagacatcatggagggttgtggatcctcagttaagagaagagctgaagatctcaatctccgagaaggttcttccagcataccgttcatttgttggaagatttcggggacaactagagggagggaggggttctgcaagatatataaagtacaaccctgatgatttggagaaccatgtctcagaattttttgaagggagaaagtcaaatgcttgatggtcaaggcatgttcatatcaactatgcagcctgaagacccgtgcaaattttgatgatgctagttccaagtccccttccaaatttcttggcactatacagggaacttgaccttcaaacatcttttgaaggtctgaagatggaaatataatcttctcctgaactgacagaaactttgtgaattgcaaagcaacccgaattgaatggtttagcttgtcattcttgatcctgtcacagcgagtggtgacgtcattgaggcttgcccatggaattatgacaactgcatctgccatgagctgtgtaattgcaattcttacattttacctgtcttttgtcaatggtaacatctcgtgactcttgtttgactaaaatggaatttcggtccctggaatttttatgtacaatcctaccaggagttatgttcacatttaccttgttgcatccttttttatagtgtgttgcagccttctgtt

SEQ ID NO: 2953 - DNA, 385 bp, Zea mays
  Clone ID: 700237985_FLI
gataaattggcagctgcaaataagttctttagacaaaaaagaaatgcagctggtgtgttgggattctccagtagacaaaagtgtactgtggctttgcggatgttggcttatggaggtccagcagattttctagatgaaggtctgcgtatgggagaaagcacagtccttcaaactatcaaggagtttgctaaaacagtccttcaaacatttttctgcttagcttgtttcttccctcctctggatggcagtagtgattcctcagacgtcaaatgaaattgggaagacctagctgatgtatccccttcatccatgttgtactgcacacacacaacagcagtagtaatttgtaacatatgcaacatcagggtagcaaggttaatttgct

SEQ ID NO: 2954 - DNA, 1266 bp, Zea mays
  Clone ID: 700238044_FLI
ggcttcagagtcaagctataatgacaggggctaaggctcagaagaatatactccagatggtcaggacagtttgggcttctgatggtctaagaggtttttacagaggaatcagcccaggtgttactggatctcttgcgactggcgctacatattttggtattattgaatcaaccaaggcatggttggagattgctaatcctaatctaagtggacactggtcacattttatcgctggagcgattggtgatacacttggatcctttgtctatgtgccttgcgaagtcatgaaacaaagaatgcaaatccaaggcacccaaaaatcttgggcatcagctgtagccaaaggaaatatttctcaaactcatgggatagagatgtatgggtactacaatggaatgttccatgctggctgttctatctggagggaccatggcttgaaggggctttatgcaggatactggtctacgcttgccagagatgtcccttttgctggtctaatggtcactttctatgaagcaatgaaaaagatgtctgagtatgggaaaacaaagtatttgccacacagtgatttgcatgttagcaactcctttgaaggacttgttctaggaggattggcaggcggctgtagtgcatacttgacaacccctttggatgtgatcaagacaagactgcaagtacaaggatcaatgtctaggtacaatggatggctggatgctataacaaagacgtggacttccgagggggtgcgcggcttgttcaagggaagtgttccgagaataatatggtatgttccggcatcagcattcacattcatggcagtggaatttctaagggaccatttcaacgacaaggttgatgcggatgcccatgaagtaacatccctgtcaatcgacacaaaatcagaagttgagaaatcagcttagcgttccttttcctatgatatatgaagcgtattggtatctgtatccctccccggtggaaattatccggtgggatctttctgtcttgggcaacaaactatgtttaggtcatgtaaatgcggaggacattcattggcagctgggcggagacattgttgtgcaccagaaagaaagtaattgacaacaacatgatcatattgtggtagcaattttcttagatagatagatattggtgagtggatggactgagagaagtgaacatgtaacgtttctggaacaaaagaccaatgccaccggtgtattagagcttctgaatctctgttgctgatgttattgccattcttgc

SEQ ID NO: 2955 - DNA, 1438 bp, Zea mays
  Clone ID: 700238067_FLI
cgctgggcaaacagcgtacctcatcaacaacgtcaacgacttcagtgacggattctacaagtttgttcctcgccctgtttactggcccatgttcatcatcgcgacgctggcggcgatcgtcgcaagccaatccttgatatccgcgacgttctcagtcatcaagcaatccgttgtcctggactacttcccgcgcgttaaggtggtgcacacgtcgcagcacaaggaaggggaggtttactccccagaaaccaattacatcctcatggtgctttgcgttagcgtcgtactaggcttcggagctgggaatgcgatcgggaacgcattcggtgttgtggtcatcatggtcatgctcataaccacagtcatgctcaccctggtgatgatcattatatggagaaccccgcctgtccttgtggcgctctacttcgtgcctttcgtcatcatggaagggtcttatgtcagtgcagtcttcaccaagatccccgaaggcggctggctcccctttgcggtgtccatcatcctggcgctggtcatgttcggctggtactacggcaggcagcggaagacggagtacgagatagcgaacaaggtgaccgtggagcgcctcggcgagctcctggcgaagccggaggtgcagagggtccccgggctgtgcttcttctacagcaacatccaggacgggctcacgcccatcgtcggccactacatcaagaacatgagctcgctgcacgcggtcacggtcttcgtcaccctccggtacctgctggtggccaaggtggacgagcgggagagggtcctcgtcgagaggttgggaccggacggggtgtacggctgcactgtccagtacgggtacgcggacagcctcagcggcggcgacctcaccgcgcaggtcacgggctccctgcgccggcactttgggacgtcggaggccggggcggaagaggccgcgcgcctggaggcggcgaggaccaacggcgtcgtgcacgttcggggtaagatgaggttctacgtgggcgaggacgccgggtggttcgacaaggtcatgctcgggttctacgagttcctgcacggcatctgtcgctccgcgctgccggcgctggggacgccgctgcaacagcgagtcgagatcggcatgctgtacaaggtttgatcgatcaaggttatcagtgcccaacgatcaaatgcgcacataaccaatatacgcaacatcaaaataagtcaatgagtatacccgtggcgtgtcatagagtgattgtgtacaagaaattcacgtgcatgaacagaacctagtaaaaagctgcgaatgaagctgcacaaattttgttttgccggtttgtatggcatgacatggttactggcaaggacctttgtttcactttttcagttctgcagcagtgcttttcggttgccttattcaaaatagaacagtttgcatgcc

SEQ ID NO: 2956 - DNA, 1280 bp, Zea mays
  Clone ID: 700238075_FLI
cgtccctcagccgcgtcgcaccgcatcgcattctacgattcgaagctctctctgctcgcagccatggcgaagaattacccaaccgtgagcgccgagtacagcgaggccgtcgagaaggccaggcgcaagctccgcgccctcatcgccgagaagagctgcgcgcccctcatgctccgcctcgcgtggcactccgcggggacgttcgacgtgtcgtcgaggaccggcggtcccttcggtactatgaagtgcccggcggaactggctcacggcgccaacgcggggctggacatcgcggtgcggctgctcgagcccatcaaggaggagttccccaccctctcctatgccgatttctaccagcttgccggagttgtggccgtcgaggtcaccggtgggcctgagatccccttccaccccggcagggaggacaagcctcagccgccacctgagggccgtcttcctgatgccaccaagggttctgaccacctgaggcaagtctttggcaagcagatgggtttgagtgatcaggacattgttgccctctctggtggccacaccttgggaaggtgccacaaagagcggtctggttttgagggggcctggactacgaaccctttggtctttgacaactcttacttcaaggaacttctgagtggcgacaaggagggtcttcttcagctcccaagtgacaaagccctgctgagcgaccctgtcttccgccctcttgtggagaaatatgctgcagatgagaaggcattctttgatgactacaaagaggcccacctcaagctctccgaactggggtatgctgatgcttaaatgtccatatcctggagcgggacacaaactgctgcctgtatggactcgtgcgattcagggtgaaccatcagattgtctagtgtcttctttgtaataaatttatctgttcttggtactttgtctatggttgaatcggaacccattttccgtttgcctagattctaatttctggtgctgtatccagctgaaactagtagatctatgatcttgtggctgcagcatgttcttgtcacttttatctggtctccgttggttcggttcacaggttgtgtgctttaaaaggctgtgcttaagtcctgcaattcgagtccaccaaactgtagggtgcaagtcgagattttattagtgatgcaagttgctggtattggtgcattatcgggctaatacgcttgcgttgccttctgattttataagtgatgtaaattgctggttttaacgtgcattacctggtgggctggttctat

SEQ ID NO: 2957 - DNA, 949 bp, Zea mays
  Clone ID: 700238129_FLI
ctgttggcttgctctctaccatgaaccacaacattgcttacaatttgacatggagaaaatttactgatccaacacgcatgacatccaattccgtacaagaggaattaggacatagccttttgtcctctattaagtacgcgtacaaggttgaccaaagggactcaagtataagacctacacgagggtacgcttttatgtcgacttctcaagttggaggccttgcaccagagagcaaatattcacgatttcttaggcaggaatttgatcttcgagtggctttgcccctgggtgtgctgaatggtgctctcaatgccggagtggctgcgggagtcatccatccattggaaaggggatccacaggatctgtctcaccacttgtagaaaggtttaacttgggtggtaataggcctctcgtgtgccgcttgggtggatcatcttcactgttaggcttcaaaacaagaggactgcgggcaacagaatccagaacacatgaccttgataattctgacagtggcacttcgccgaatggtgacgtagcagtgacagccttcgccgacctctcatttgatctgcctctgaagccgctcagagagctgggaattcatggccacgcttttgtttgtgctggaaatctcggtaaactaacggagtgtgatctagggaagttccctgttaccgacttcctacagacgttcagaagttctgcaggattcggcgtagttgtgccgaccagactgttccgcatagagatgaattattgctgcatcctaaaacagcttgatcatgacagggcgaagacaggcgtacagtttaacttctcgtcgtcctagtttctaagatgaatattcctattttttcccctcctcctcactgttgtcttttcatggaggagcctgtcaagaacttctacatttatgtagaaaaagaaagccgatgacgctgaagtgat

SEQ ID NO: 2958 - DNA, 1248 bp, Zea mays
  Clone ID: 700238143_FLI
gagcgccggctgtgggtcaaggaccggtcgcgcgcgtggtgggaccggtgcaacagcgccgactacccggaggaggagttccggcgcgcgttccggatggggcgcgggaccttcgacatgatctgcgacgcgctgggctcctcggtggccaaggaggacaccatgctccgcgccgccatccccgtccgccagcgcgtcgccgtctgcgtctggcgcctcgccacgggggagccgctccgcctcgtttccaagcgcttcggcctcggcatctccacctgccacaagctcgtcctggaggtgtgcgccgccatcaagtccgtgctcatgccgcgcttcctgcagtggcccgacgccgacgccgcggcgcgcttcaaggagggcttcgagcgcgcctcgggcgtgccgggcgtcatcggcgccatgtacaccacccacatccccatcatcgcgcccaagatctcggtggcggcctacttcaaccgccgccacacggagcgcaaccagaagacgtcctactccatcactctccagggcgtcgtcggccccgacggcgccttcaccgacgtctgcatcggctggcccggctccatgcccgacgaccaggtcctggagaagtccatgctccaccagcgcgccgcggcggggatgatgcacgactcgtggctggtggctggcgccagctacccgctcatggactgggtgctggtgccgtacacgcaccccaacctgacgtggacgcagcacgcgttcaacgagaaggtggccgagctccggcgcgtcgcggtggaggcgttcgcgcgcctcaaggcgcgctgggcgtgcctgcagaagcgcaccgaggtcaagctgcaggacctccccgtcgtgctgggcgcctgctgcgtgctccacaacatctgcgagattcggggcgaggaggtggacccagccatccgctgcgaactggtggacgacgagaccacgccggagaaccccgtgcgctccgagacggccagtcgcgccagggacaacatcgcgcacaacctgctccaccgtggcttgggcggcaacacattcttctgatctcatccgtcaccttcttcttttttatgctttgctagtacagtagtacagaattgggctggaacaagaaagaaataggcattcttttcttttaattacactagaagatgattttggtaggattcttatagaatctatctatctatctatcaccgagcgtttttaaccttttcacgctcgattttc

SEQ ID NO: 2959 - DNA, 1297 bp, Zea mays
  Clone ID: 700238151_FLI
ccatcctctcctgtgggcgctccctctccccggcccccaaatcaccgcgcctccctcgccacgcctcacagggccggttgcgtaggagaaaggagaaaggaaggaggggaggcggtcgtcgggcgagatgagcgactccttctgccccgactgcaagaagcatacggaggtggcgttcgaccactcggcgggggacatggtgtgcaccgagtgcggcctcgtcctcgaggcgcactccgtcgacgagacctccgagtggcgcaccttcgcgaacgagtccaacgacaacgaccccgtccgtgtcggtggccccaccaacccgctcctcaccgatggcggcctctccaccgtcatcgccaagcccaacggtgcgcagggcgacttcctatcctcctccctcggcaggtggcagaaccgcggctccaaccccgaccgatccctcatcctcgccttccgcaccatcgccaacatggctgaccggctaggtcttgtggctactattaagttctgcgttccacattcctaggttccaaacataccctaatggtgtgtttggtttgtggagtcaccatatgcttcatgaggaccgagcaaatgaaatctacaagaaagttgaagatctcaaatctatcaggggaagaaatcaagatgccatattagctgcatgcctatatattgcttgtagacaagaagatcggcctagaactgtgaaagaaatatgttcagttgctaatggggccacaaagaaagaaattggcagagcaaaagaatttatagtgaaacaactggaagttgagatggggcaatctatggagatgggaaccattcacgctggaaattttctgagacgtttctgctcaactcttgggatgaacaatcaagctgttagggcagcccaggatgcagttaagcactcggaggagcttgatataaggaggagccctatctcaattgcagccgctgtcatttatatgataacccaactctcagaggacaagaagccacttaaagatatatccttggctactggtgtagcagaaggcaccatcagaaattcgtacaaggatctgtatccttatgcctcaaggctcatcccgaatacctacgccaaggaagaagacctgaagaatctctgcacaccttaggaggcttacttttttccccctttctgttactacataattcggaattagatttgtcaaagaggagtgagtgaagttgttcctcgttgtgactgtaccgggcaaggtgtcgtccccgccgtgcttaactttatgatggaatttcttttcagagc

SEQ ID NO: 2960 - DNA, 1115 bp, Zea mays
  Clone ID: 700238237_FLI
taaaaatgcccaagacgaaggtgcaccccaacgccgccgccgccgagccagtgctcacggtgagcaccgcctgcgcgcgtgcagaccccggcgaggaggagccgcccacggtgctgacggtgtggcgcaagtcgctgctcttcaactgcgacggcttcaccgtgtacgacgccaggggcgacctcgccttccgcgtcgactcctacgactccacgggccggcggcgcgccgaggtggtgctgatggacggcgcgggcaccccgctcctgaccgtgcgccgcaagaggaggctcggagtgctggccgagcactgggtcatctacgacggcgacgccgcagcggaggcgaaggagacgcccagcagccgcatcagcaggccgctgctctccgtgcgccgccacagggcgtcgtcgtcgtcgtcgaaggccaaggccaaggcactagcccacgtgacgcccctgccagcctcctcttcgtctttatcaggctatcaccgcgcctccgccgaggcgtcgtacgtgatggaggggtcgtacgggcggcgggcctgcgttgtgcgggaccgcgcgcacggggatgccgtggtggccgaggtcagccggaaggaggccgcggtgggggacgacgtgttccgcttggtggcggacccgcgcctcggcgccacgctggccatgggcctcgtcgtcgccctcgacgagatgttcgcgaggggccgctcgaccaactaattaagcgctaccatctcttcatatcaataaccacaccatgcaagtgttactcattcacctatcctcccggcagcgagtgcataaattgttttttcaagtaaagtacactagggggtccacaaacttgctacgcggtgccacttaaccctcaaacacaaaaaaccaagaaaacgggttctcaaactttgtcgatccatgcaaaaccattcaaagtcgagtttgtaaaactggatgccgacgtagtatgtcacgttggagcaacttgtggtctccaatttgaccaagttgttggcttggctttaatccaaaatggcttgtactatgtttctacaatgttttgtctctatgcattacagctgcatcagtccaaatagctggctttgatcc

SEQ ID NO: 2961 - DNA, 1872 bp, Zea mays
  Clone ID: 700238245_FLI
cgcgtctacttcggagacatctagtaaaagcatcttccgctactccgccctccgcctcccccgtctgcttcgcaatccgatccggcgaccggcggccatggatcctgcgccgcagacgcacccgatcctctcttacgtgctctcccgcatccccaacctctccatgaccaagacccccaccgccgagttcgacatcgagcagccgcctgtgcacaccccgtccccgcggacgccgtcctccgcgggagagttcgagctcgtcgagcgcatgccggggctgcgccacccgtccgtgctccgcgccatgacccgcgccgtcgccgacgtctccgccgcgcgctccgcgctgcaggtgctcggcccgcgccccgaccacgagctcgtcgactcctcccgcgccatagtggccgccgccgaggccggggattcgcggatccccgcgggcgacgtcgaggcgtgccgcgcggtggtgcgcctcgatgagacccacgacgcctacgaggccctgctgcacgaggccgagtccaggctcgagagggtgtaccgctccgcgatggaggggacggacctggatgacgaggcggcggagagcgtcaaggatcaagggccggtcgcggggcctgagggcggggacgcggcggtgggggaggaggtggtggcggtgctcaagcaggccgaggagggcaagccggtggagagcgtgcgcctcgtggatcgccagcttcgccatctgcccgaggcgttcgggaggatcctggggctccgtgtgctcgacgtctcccgcaaccagcttgaggttattccagatgctataggaggacttggtcatcttgaagagctttttcttactgccaatgatttggtatctctacctgataccattggactgctatccaatctgaagattttgaatgtatcaagtaataggcttagggcactgccagatagcatctccaagtgcaggtcgctagttgagcttaatgtgagctataatggtcttacttatctgccaaccaacattggttatgacttggtaaatctgcgaaaactctggattcatatgaacaaattgcgttctcttccatcatctgtctgtgagatgagatcgttgtatctcctggatgcccattttaatgaactatgcggtctaccatctctcttcgggaaacttagcggccttgaaattctcaaccttagcagcaacttcagtgatttgaaagagcttcctccctcgtttggtgacttgctaaatctgcgtgagcttgacctaagcaacaaccagattcatgctctccctgacacttttggtcggctggataaactggagaagcttaacctagagcagaaccctctagtcatgccaccagaggacattgtgaacaagggcgtggatgcagtaaaagagtacatgtcaaagaggtggctggacatattgctcgaggaagaacaaaggcgcattgcggcagagaccccagaaatgtcatcgactcctaaagcttggctgactcgcagcgtctcctgggtcacggacgtttctgagagtttggcagggtacctaggtgggaacaagtcagagaaagatgcatatctggaccagcagttttgatactttatgtttcttttgcctaatgtgcattcgccccatgtatacacaaataacgtttaccaaaaatcttcattacagatgtgttcctggtgagtataccgtacggttttgcttaggaaatggatgtgttcctaatgggtctgtcgtacggttttaccgtggtccattgaataatagtatctcacagcacttgagagtacactcaagataaacattgttcagagatcgacctgtcttctggtatttggctttcgcccttcgctgtg

SEQ ID NO: 2962 - DNA, 507 bp, Zea mays
  Clone ID: 700238283_FLI
cgacgttccacgggctccggcggcggcaggaacgcctcccgatttcgacggcagaactagagagcgatggcgctgactaacttcatcgtgacggtggccgtggttggcgcgggggtgcttctctttaccaccgacatccgcaggtctggcgccctcttccgccgcaacgcgcgccagctccggctgtggctcgaggaggacacggcctccgccgcgtccaagtctgcaaaagaagcagctccaaagaaactcgactcgacggtccccaaggagaagccaaaggaagatagccactgattggagctgtttatacgaacggtataacccctatttgaagtcgttcaagttctgttttctacagttgctgcgatagaaacttgtagctctcaagtaggtgcacggcaagtcggcaagattatgtttccgtttgaacatcggcctctgtggaacagctagctgaatgttggtattatgtcgtgtgcttatatggatccgaagcacttcgct

SEQ ID NO: 2963 - DNA, 1056 bp, Zea mays
  Clone ID: 700238292_FLI
gagatctcttcttacccgcctcttcacctcaactcacattgtcatggcctcgtcttccttctcttcctctccatctcggcggttggtccacctcacacgccatctcgtctcctcttcttccggcgagctttcctcagtcggcgcccccgccgctgccgcctcagatgccgaccccgtgaaaagcccacgctccactgcctccagggttcacgccgcggtgctggtctgcctcttcgaggaccctagcagtgggccacgggtcctgcttacaaagcgcgcttcctccctctcctcccactccggggaggtgtcgttacccggagggaaggtggacgatggagacgcagatccgaaggccacagctctacgggaggcgaaggaggagattggactggatccggcgcttgtttctgttgttacagttcttgagcctttcctatcaaagaatggcctcactgttgttcctgtcattggtatggtcccagataaagccttatacaagcctgtcttgaataaagctgaagtggaggacatctttgacgcacctctggagatgtttctaaaggacgaccaccggaggacaagacagatgaactggatgggcatagatatccccgtccagtttttcgactacgaggcagatggcaagaagttcgtgatttggggcttgactgcgcacatcctgacacgcgcagcggcagtcattttcgggaggaaaccatcattcgtcgagcttcccagacccaaatatgcaggtgcacctgttgctggcactggcaagtcgaatctctgatggagcataagctggatgtaaggggcctctttgggtttggaacttggtgcatgaaccttgtgattgtagaattatatatgtttctcactatgtgatggctggggaaggtaccgaaaattgcttggtatatttatctacagaatataagatacatgctcaactgtattttgagtgtagcacagcagacaatattggcacacttggtggatggtgctttgtaaaaaagaatgtatacaatgaactccagaaagtatactgtcttg

SEQ ID NO: 2964 - DNA, 1308 bp, Zea mays
  Clone ID: 700238302_FLI
gtccggcatcacctcctcgccaagcctaacctcttcaccgaggcctcagcctcagcctccgttgcctccttccagcgccccgtgctctgcctcttcgacaggaatttggacctctctgtgggaatacagcacgattggagctaccgccccttggtccatgacgtcctcggcctcaagctcaacaagctcaagatgcccgcggacaagtctggcccggccaaggcctacgatctcgatgattccgatgccttctgggtagcaaacagctggtcgccgttccccagggtggctgaggagatcgagtcgcagctcgccaagtacaagcaggatgtggacgaggtgaaccagcgcaccggtggcaacaaggatggcatcgagttcgatggcacagacctcattggcaacacccagcacctgatgaatgccgttaactcgctcccggagctcacagaacgcaagaagatgatcgacaagcacacgaatatcgcgacagcgttgcttgggcacatcaaggagagatcgctggatggatactgtgactgcgggaacgacatgctcacgaagggcaccgtggacaggagcacgctactgggccttctccgagggaagggcaccaaggcggacaagcttcgtctggctgtgacctacctcctctgtttcgagacgccagagctagagcaggtcgaggcggcgctgcgtgagtcagaagtggacatgtcagcgtttcagtatgtgaagaggatcaaatcgctgaacacgcagtttagtgcctcgtcgtcaagcagtgcaacgaggagcaacattgttgattgggcagagaagctgtatgggcagtccattagcgcagtgacagcaggggtgaagaatctcttgtccagtgggaggcagcttgcattgacgaggacggtcgaagctctcatggaagggaagccgaatccggaggtggacaactatctgctgtttgacccacgtgcccctagatcaggaagcggtgggcagttcaaagggccattcagagaagcaattgtgttcatgattggtggtgggaattacattgagtacaggagcttgatggagctggcagaatgctcgcagccgccttcttccaagcatgtcatatacggagcaactgagattgtcaacggggtggagttcatcgagcaacttgcagaactggggcagaaagcggggctgggtctgggtggtggaaacaaccctccactacagtaattactaataaataagggggggttctttcacatcgtttgaacattgtcagatatgatatgatcatttgcttccttttgt

SEQ ID NO: 2965 - DNA, 915 bp, Zea mays
  Clone ID: 700238322_FLI
gatttcccatctctctctgcgccgtcccgtgctccctccgctagttctcccaattccttccccacctcctcggtcgtcgcttcccccagagagcaggagccgcctcgtccctgccggtcccgaccccgacccccatcccgtccgcgtccaacgccatgaatcccgagtacgactacctcttcaagctgctcctcatcggggactccggtgttgggaagtcttgcctgctgctgaggtttgcggatgattcatatctggagagctatatcagtactattggagttgattttaaaatccgcaccgttgagcaagatgggaagacaataaagctacagatttgggatactgctggccaagaacgctttaggaccatcacaagcagctactaccgtggagctcatggcattattgttgtgtatgatgtaactgaccaggagagctttaacaatgtcaagcagtggctgaatgaaattgataggtatgccagtgaaaatgtgaacaagcttttggtggggaacaagtgtgacctggctgagaacagagtagtttcttacgaggctggcaaggcccttgctgatgacatcggaataccattccttgagactagtgccaaggatgcaacaaatgtggagaaggcattcatgaccatggcaggggagataaagaacaggatggcaagtcaaccagctgcaagtggtgctagtaggcctgcaactgtgcaaatgcggggtcagcctgtttctcagcaaagcagctgctgctcttgatcgtctgtctagatcacagtagtgtgattgtgcagcaagcgaaacttaaattggttgctccgtgtacattaagcctattactgtcccaaagaactcgatgttatctatcggatactggaagtctgtctatcgactgcaacgcttaagc

SEQ ID NO: 2966 - DNA, 328 bp, Zea mays
  Clone ID: 700238343_FLI
caggctcttctcccaccggctgaggaaggagctctcgcacccgcaggccgacctactccggtgacccaccggaccggcggcaacccacgaatcacgagcgaattgtacataggtagttgaggtagatgtgtgctttattagcgtgcgtttgtttgctggagtagttcggttccgctgatcggctagttgatggtggtcgcctttttttttcgtgagcgctgagttcctgagtgcggtgtggtgtgatttttttggctggttgcttcgctttagccatatgtagggtggttcttttttggatctccgtaacttaaggcaatttgtgatc

SEQ ID NO: 2967 - DNA, 2062 bp, Zea mays
  Clone ID: 700238346_FLI
agcctacacacacggtcgctcactttctctcgcctcctgtcccccccgcgtgcgcgcagcgctctctctctctccctcactctcttttgaggagtgaggacgactggggcgaacgtcgccgccgccgccctacatcaggtgcccaggtcgttgttcggcccttcgccagctctttttcgggcacttcgccggcgacgaacacccaccagttgctgatgcaaggctttcaaaagattaacagtctcaattgatgcaaaagcaacacaatcacactaaaggtttggattagacatttcagagcatgggttcgcggtttccatcccaccagctaagcaatggcttgtatgtctcgggccgacctgagcaacctaaagagaagtctccagtcatttgctcctcggctatgccgtacactggtggggacataaagaaatctggggagcttggaaagatgtttgatctccatagaaaatctggtccattgggtaatcaaacttcaaggaatacttcctttggtggtgctgcctccaactctggaccagtttctaatgctgtcggtcgctccaactactctggttctatttcgtctgcaattcctaacactggaggatcttctaggacaaaaactaattctggacctctcaataagcatggagaaccaacaaagaggtcatctggcccccaatctggtggagtaaccccgatggcccgtcagaactctggccctctgcctcctgtacttcctacaactgggctaatcacatcaggtcctatcacctctggtcagttaaattcatctggtgctcaacgcaaagtatcagggcctcttgattctagtgtatcaatgaagatgcgtaccacatcttttgcacacaacccagctgtcacaaatctcaatgtgggagatggttactcgattaagggcagcattccgaccacaataatctggttggtcgcgttgctctttttggttgggtttgtagctggtggcttcattctcgctgctattcataatcctatcttgcttatagtcgtggtggtgatatttggctttgttgctgcacttgtgacctggaacatctgctggggaacaagaggtgtgattgattttatcggtcgctattctgatgtagaccttagaactgcaaaagatggagagtatgttaaggttactggggttgttacttgtggaaatttgccccttgagtcctcattccaacgggtgccacgatgtgtgtacacttcaacttgcttgtacgagtacaggggttgggactcgaaagccgcaaacgccacacaccgacggtttacttggggtctcaggtcaatggaacggcacgcggtggacttctacatctccgatttccagtccgggctgcgagcactggtcagggcaggatccggcgcgcgcgtgaccccatacgtggacgagtccgtcgctatcgacgtaaacccagacaacaaggacatgtcgcctgagttcctccggtggctccgcggaaggaatctgtcgagcgacgaccggactatgcgcctcaaagaaggatacatcaaggagggcagcaccgtgagcgtgatgggcgtcgttcagaggaacgagaacgtgctgatgatcgttcctccagccgagcccatctccactggctgccagtggggcaagtgtgtcctcccgaccagcctcgagggccttgtcctgagatgcgaggacacgtctggcctggacgtgataccggtctagctagagaggttggttctggcgaatcctctggcgcggaaagggagtagaaaaaaaaagatgccttgacgtttggtttggtctccgtgggttgttagggttggaaggatgtgcaaatgcagggtgtgattattgggctaagtaagtaagtacaatatgagtggtcggtcggttacctggagcttgatcgtgatagtatatggtatgtaatttcctcttctcttcttttggctgagccatggatggtgtgcttgtaacaaggatggcttgatgtcagtatactaccctaccataccatggagcatgtttggagattcagtgggttcc

SEQ ID NO: 2968 - DNA, 613 bp, Zea mays
  Clone ID: 700238357_FLI
gattccgatatgttatcttcaaaatcgaagaaaagcaaaagcaggtagttgtggagaagacaggggccactactgaaagctatgatgattttctggcctctctcccagagaatgactgccgatatgcgctgtatgattttgattttgtcaccggggagaatgtgcagaaaagcaagattttcttcattgcctggtccccgtcgacatcccgcatccgtgccaagatgctttactccacctcgaaggaccgcatcaagtatgagctcgacgggttccactacgagatccaggcgaccgacccatccgaggcggacattgaggttctgcgggagcgggctcactgaagctggttcgccttcgaagaagaagggacctgtggagggctgtgaaccttttggtcagatgcaaattctattaccaatgatgaaagctcccgccttggtatttgttattaagttcctgtaagcatgtcgtttaggcgcgatgcgtgactctagctggtgaagcgttatcaaagctgtatctgtaagagttttggttgtcgagcctgtaaacgaagcaaggtttgcgaacttgttatattgtggtattgatggtactggattacttccat

SEQ ID NO: 2969 - DNA, 1152 bp, Zea mays
  Clone ID: 700238371_FLI
ccagcgtccgcgctgcttcgccaggtacccgctcaagctcatcgccccgtccagggtgggcccctcctcctgtgacgccgtctggctctacgccctcacctacggcggcggcatcgtctccggggacaccgtgtcgtgcacggtcagcgtcggcgacggctgtacggcggcgatcaccacgcaggcctcgaccaaggtgtacaaggctgtgggttcaaaatgttctgaacagttgctagaggccagagttggggaagacgccctgctggctgttattccagaccctgtaacctgcttctcaaccgctcggtaccaccaaaagcaagttttccatgtttctgtcaattcaaacctggtacttgtagattggtttacaagtggccgatacgagagcggagaaagatgggattttagcttctacaaaagtgtcaaccatattttcttgggagaccagccactctttattgactcgactttgttggaacaaagctcgagttatagcattgctgaacggatgcgggagtacaatgtggttgcgatggttgtgttactggggccaaagctgagggacatccaagacaagatgcaagacgaagtgaggaagctaatgtcggggcagctgcgccctcccactgccggcggaagcctctacactacgagatcacagcgtccccgaaggccaccactcgtggcctcttgcagcccgttcggccgcacgggaacaggcatggttgctcgggtagccgcggtgagcacggagctggcgtacatcttcctgaggcaccatctggccgcgctggagccattccttggcgctcccccctacgcggcgtcatgaagctggcggacagactgagggaagcgctggtgaacgctggtgctgaaagagggatccttggtccctcgagtttgcattgggggggggggggagtgaaaagctgcaaaatggttgggtgtagtcagctggccattcgatgaaagaattttgagggtgattggagtttctggttttggttggctaaattccacggttggagtgaacgtgttgcaattcgttgggtggtatagtgttgcctcgacctgacagtgacagtgtgaagcagacgcgtttcatttgccacactatgatggtaataaaataataataataac

SEQ ID NO: 2970 - DNA, 1225 bp, Zea mays
  Clone ID: 700238510_FLI
gtgcagtctagccagtcacaggacaacattttcgaactgaaacgaagacggcaagtcctcctggaaggtctagctgcatcattgcagtttgttgatcctctcggacccagcaaatctggtcattcatctgggtcagccctgaaggacgatgttatttttctgcgcattgtttctctgcccaaaggacgtaagtttttagcacgttaccttcggcttcttgtccctggcagcgagttgacccggatagtatgcatggctatttttcgccatttgaggttcttgtttgggggtttgccatcagactctagtgcagcagaaactacagttgctcttgcgaagactgtttcatcttgtgtgcatcacatggaacttggtgctcttagtgcctgccttgctgctgttgtttgttcgtctgaacagccacctctgcgccctcttggtagctctgctggtgatggggcttctcttgttattaaatcagtactggaccgagcaactgagttactgactgatcgccatgctgcagccagctacactgtgccaaaccgtgctctctggcaggcatcatttgatgctttctttgggcttctaacaaaatactgtgtcagtaagtttgaaagtatccaacagatgtttgtcacacagacaccgagctcaggaatcggacctgaggcttccaaagctactagtaaggagatgcctgttgagctacttcgtgcaagccttcctcatacaaacgagcagcagcgccagcggcttcttgattttgctcagagatccatgccagtaacaggtttcaatccctcaggtgctagaggtgggcacatcacttcagaatctgttcctggatgatgtaactgaaggagacacacaagggcaaagagtcaatgcttttaaacattgatgagatggtcttcagctgataattgttgtatctgaagacatgcatgccccattataagttgtgagcgagcttggagaagttccgattgctcaggaaagtagccttcacttcaggttgtgacgtaagtttaggtttcagagtaatcgaatagaccagtgaaatgttccttatgtgggtcatttaatatagtacccacctgatgttatcataatactggaacaggaaatgtaccccttcacatttctactagagtcgatgttcttcgtaggccattgtggactggtttgcacatttactgggcatgtatttgtttatattctg

SEQ ID NO: 2971 - DNA, 3146 bp, Zea mays
  Clone ID: 700238529_FLI
gcgtcgaggttaccagcgctcacgatctcctcccgaaagagcagggcacggcgaaccctttcgtggaggtcgagttcgacggccagaagtcccgcacggccatcagggacagggacctcaaccctgtctggaacgagcagctctacttcaacgtgtctgacccgtcccgcctcccggagctgcacctcgaggcctacgtgtaccacgcgaaccgtgccgacaactccaagtcctgcctgggcaaggttcgcatatcgggcacgtccttcgtcagccagcctgatgccgaggccctgcactaccccctggagaagcgcacgatcttgtcgcgcgcgcgcggcgagcttgggctaagagtcttcctcacggacgatccatcagtgagcgtgtctgctgctaccccaggaggtcaccaccaccaggagttcgacatgctaagcacgcctaccactgctgcacaggagcagcaggcagcagcagcagccagctccgttccaaaccctttccaagagaccagagcaaacccagtgagacaggtgcagcacttgccaagggaacagcagcgtcctgcacagccatacccataccacgccgccgatggaggttcgtactacggagaccagcagcagagaagcttctccgcggtcgcgaacaaagccgcagccccagcgcctcaggttcaggtatcaaggatgtacgctccaggtccacagcagcagcccatagacttccagctgaaggagacaagcccgacgctgggtggtggccgtgttatcggcggccgggtgtaccccggcgagaaggccggggcgtacgaccttgtggagaagatgcagtacctcttcgtgcgcgtggtcaaggcccgcgacctgcccaacatggacatcaccggaagcctggatccttacgtggaggtgcgccatgggaactacaagatgaaaaccaagtacttcgagaagaaccagaggcccgagtgggacgaggtcttcgcgttccccaaggaggtcatgcagtcggcgacgctcgaggtcgtcgtcaaggacaaggacgtcatccgggacgactacgtcggccgagtgagcgttgacctgagcgaggtccccctgagggtgcccccggacagtccgctggcaccggagtggtaccgtctcgtgggcaaggacggcatgagggacagaggggagctgatgctcgcggtctggtacggcacccaggcagacgagtgcttcccgagcgccatccatgcggggtcaacgtgctagaggcgcacgacgtatacccgatggcggagaaccgcgtacctgatgtgctggtcaaggtgaggctgggccatcagctgctcaggacgaggcaggttcgctcgccgacaagaaacttcatgtggaacgaggagctcatgttcgtcgcggcagagcctttcgaggacgacctggtcgtgtcggtacaagactgtgtggcacagaacaaagacgaggtgatcggtgaagctgtcataccactcgccaggcttccgaggcgggctgaccacaagccggtgccgccgcagtgggttgatctcaggaggccaggactgatcgacgatgtggaccagctgctcaagaaggaagacaagttctatgcgaaggtaagcctccgtgtctgcctcgaaggcggctaccatgtgctcgacgagtccacacagtactgcagtgatctccgtccgacgatgaagcagctgtggaagccacccatcggcatgcttgaggttggcattttaagcgccaacggccttaacccaacgaaacccagaaacgaccgtgggtcctgtgatgcgtactgtgttgccaagtatggttcaaaatgggtccggacgcgcacgatagttgacagcctgagccctcggttcaatgagcagtacacgtgggaagtcttcgatcacggaaccgtgctcaccattggtctgtttgacaactgtcacataagtggagacaacggctcctctgcaggccacatggataaacccatcgggaaagtcaggatccggctttcgacgcttgagacggggcgtgtgtacacgcactcgtatccgttgctcgtcctcggcccgtcaggagtcaagaagatgggcgagctccatctcgccatcaggttcacagccgcgtcccttatcaatgtgctcttcacatactctaggcccctcttgcccaagatgcattacgcgcagccgctgtcgatagttcagcaggagatgctgcgccaccaggctgtgcagcttgtcgcgcagcgcctggggcgcatggagccaccagttcgcaaggaggtcgttgagttcatgtcagatgctcgctcccacctgtggagcatgcggcggagcaaggctaacttcttccgtctcatgcaagtcttctcaggggtcatcgctgcgggcaagtggtttggggatgtttgccagtggaagaaccctgtcaccacagtgctggtccatgtgctctttgtcatgcttgtgttctatccagaccttatcctgccaacagtcttcctctacatgttcttgatagggctgtggaactaccggttccggccacgcttcccaccacacatgaacacaaggatctcttacgctgatgttgcaaacccagatgagcttgatgaggaattcgacacattcccaacctccaagagcccagatctcattcggatgaggtacgacaggttacggcatgttgctgggaggatacagacagttgttggggacattgccactcagggagagaggctacagtcattgctcagctggagggacccaagggcaacagctatgttcctaatattttgcttgattactgccattatactatatgtgacaccattccaagcgatcgcactctgccttgggttcttctcgatgaggcatcctcggtttcgccacaaggtgccatcagcaccagcaaacttcttcaggaggctacctgcaaagacggattctttgctgtaaagttccttggaagacagctgttaacaatgtctaatgtacctctttgttgtacctgtttctgtcactcatatatcgttgtataatagccttatactttcgtttcctgctttcagaaattaagaagacattgaaacttctgtatggcatgaaatgtatgtaaggtgcttgcttc

SEQ ID NO: 2972 - DNA, 827 bp, Zea mays
  Clone ID: 700238568_FLI
cagaagcggcggcggcggagcaaacgcaggcgaaggcgagggtgtgagggaaggagcaccagccatggtgcacgtcaacttctaccgcaactatggtaagacgttcaagaaaccaaggcgtccttatgagaaggagcgtcttgatgctgaactgaagctggtcggtgagtatgggctgaggtgcaagcgtgagctttggagggtccagtatgcactgagcaggatccgtaatgctgcaaggcacttgctcacccttgacgagaagaacccccgtcgtatctttgagggtgaggcgcttcttcgccgcatgaaccgctatgggctgcttgctgagggtcagaacaagcttgattatgttcttgccctcaccgctgagaacttcctcgcaaggcggcttcaaacacttgtcttcaaggctggcatggccaagtccattcaccatgctcgtgtcttgatcaagcagcgtcacatcagggttggcaggcaaattgtcaacgtcccatcattcatggtgagggtggagtctgagaagcacattgacttttcactgtcaagcccattcggtggaggccccgcaggaagggtgaagagaaagaatcagaagaaggcaagcggtggcggcgatgctggcgatgaggatgaggagtgaggatggacaagtagcgttacccaatataataatattatctagttttcttgaacttgttcgaatgatgagtgcttagctgtgtgatctgacgcagagttccctgtgctgactctgtgtcatggatggtccattttatcttgtggtattatcagcctttacataactgctatgtttggat

SEQ ID NO: 2973 - DNA, 1186 bp, Zea mays
  Clone ID: 700238572_FLI
gaaaattcggacagtagagcaagatgggaagaccataaaacttcaaattgtaagattactatgctgtattttcttttatttgtcatatgtatggttcgatgccttgtgatgtcatatttgacatgtgttccctaggtaaactggaaagtaaaaaaataagagttagccttttcatgatagtcaatagagaatctggaacattgatatctgctgactaattgtgtaggcaataagtttgaacctaaagtaacatatgttcccactatttagcagatggacccattgttctctaaatgtggaaatgatatttggcatcaagtggtcgaattatagctacaagcctacaatatcataatctagtgtattcattgatgaaccaagggaaatgcagtccatagtaataaacaatggctcaaattcgaaaaacacaactatgtttatgatataactattgtgtattccttcagctgacatagttttgtaattcctgcagtgggatactgctgggcaagagcgcttcaggaccatcactagcagctactaccgtggagctcatggaatcattattgtatatgacgtgacagaccaagaaagcttcaataatgtgaagcaatggttaaatgaaattgatcgttatgcaagtgacaatgttaacaagctccttgttgggaacaagagcgacctaactgccaacaaagttgtggcaactgagacagcaaaggcatttgctgatgagatgggcatcccgttcatggagacgagtgccaaaaacgccaccaacgtggagcaggccttcatggctatggctgcatccatcaaggacaggatggccagccaaccagccgcggccaacgcaaggccagcgacggtgcagatccgcgggcaacccgtcaaccagaagacgtcttgctgctcgtcttaagcttgcctgatttctctggttccttgtgactattactaccgtttgtgcgagcatgcaaatgtatttgttgcattattgctgatagcatctgttcgttggccagatgagtagagagctgaaaaaatgttaagaacaccatagagagaagtctatccgtgctctctcaacttaaggagcaaacagcaagacttcattttttttctactttactgtttattagtcgcgttacatttgtgaacagttattgtaatgtctttttttttt

SEQ ID NO: 2974 - DNA, 601 bp, Zea mays
  Clone ID: 700238613_FLI
acgacttgtttcattgattcttgaagagatcgagcttcttttgcaccacaaggtcgaggatgtcttgcaactgcggatcaagctgcggctgcggctcaagctgcaagtgcggcaagaagtaccctgacctggaggagacgagcaccgccgcgcaggccaccgtcgtcctcggcgtggccccggagaagaaggccgcgcccgagttcgtcgaggccgcggcggagtccggcgaggccgcccacggctgcagctgcggtggcaactgcaagtgcgacccctgcaactgctgatcacatcgatcgacgaccatggatatgattattatctatctagcttgtggtggtggttgaacaataataagcgaggccgagctggctgccatacataggtattgtgtggtgtgtgtgagagagagagaaacagagttcttcagtttgctatctctctctgcatgtttggcgtcagtctttgtgctcatgtacgtacgtgtgtctacctgcatgttggttgatccgattgcatctgctgtaaccatatattaattggtccacgatgatatgatttgatactatatatatactaaaaccggacttcttattat

SEQ ID NO: 2975 - DNA, 1614 bp, Zea mays
  Clone ID: 700238628_FLI
tctccttgaccaacgtgctccccccttcttctacctgtaattcccatcctgcttgtgcggcaagggcctctcccgcacgatggggaagcacgagttcctgacgccgaaggcgatcgcaaaccggatcaaggcgaaggggctgcagaagctgcggtggtactgtcagatgtgtcagaagcagtgccgcgacgagaacgggttcaagtgccactgcatgtcggagtcgcaccagaggcagatgcaggtgttcggcatggcccccgaccgcgtcgtcgagggcttctccgaggagttcctcgagtccttcctctccctcatccgccgcgcgcaccgccactcccgcgtcgccgccaccgtcgtctacaacgagtacatcgccgaccggcaccacgtccacatgaactccacgcggtgggccacgctcaccgagttcgtcaagttcctggggcgcgaggggtactgtaaggtcgaggacacgcccaaggggtggttcatgacctacatcgaccgtgactcggagcaggccgtcaaggaacgcctcaagcgcaagaggatcaagtcagacatggctgacgacgagcgccaggagcgcatgattgcccgccagattgagcgtgcgcacaagtccttagctaaacccaatggtggtggtgctgccgagggcgagcctgagtctggcagtgaaggagagtattcaggttcggatgatgatgagcaggagccggaggatgactcgaaagaggcagataaggcaacaggtaagattgcgattgcgcttcagaaggctgtgccggggcccaaggttaatccttttgacgataagccgaagatgaaatttggttttgatgaggaggatggctcaggcacccgagaccaggagaagaatgagttgaccaagaagatgggaaaggatgtgaaggcagcagaggcaaagaggtcagcattggacgagctgatgaaggaggaggagaaggccaaggagaggagcaataggaaggactactggctgtgccctgggattgtggtcaaagtgatgagcaagtcattggcagagaaggggtactacaagcagaaaggggtggtgaagaaagttattgataaatatgttggggagattgagatgttggagagcaagcatgttctcagggtcgaccaagatgagcttgagaccgtgatccctcagattggtggacttgtgcggattgtcaatggggcttatcgggggtcaaatgccaggttgctttcagtggacactgagaaattctgtgcaaaagtgcaggttgagaaaggcctctatgatgggaaggttctcagggctgtcgaatacgaggacatttgcaagatatcctcatgatatacaacgtgattcattccattttcctggatcatcactgaagcaaacaagctatacgatctagtgtactagctctgtcgattagattcttaatagtttctgtgcttgttattgtttgtgctggaatatcttctgttgaagcagtgtttgatatcttgatgtttctagttcgcggtaactgctgaaaggctatctgtgagaaaatgctctcatttatgtttgcttgttactagaccagaataaccgtattgatgagtttc

SEQ ID NO: 2976 - DNA, 953 bp, Zea mays
  Clone ID: 700238683_FLI
aagaccttctacgaccccgtgctccgccgccgggtgctctggggctgggtcggcgagaccgacagcgagcgcgccgacgtcctcaagggctgggcatccgtgcagtcgatccccaggacggtgctcctggacacgaagacgggcagcaacctgctgcagtggccggtggtggaggtggagaacctccggatgagcggcaagagctacgacggcgtcgcgctggaccgcggatccgtcgtgcccctcgacgtcggcaaggcgacacagctggacatcgaggctgtgttcgaggtggacgcggagggcgtgggcgtggcggaggaggccgacgtgacgttcaactgcagcaccagcgcaggcgcggcgagccggggcctgctcggcccgttcggcctgctcgtgctggcggacgaggacttgtccgagcgcaccgccgtgtacttctacctcgtcaaggccacggacggcagcctcaaaactttcttctgccaagacgagctcaggtcatccaaggcaaacgatctggttaagcgagtatacggaagcttggtccctgtgctagatggggagaatctctcggtcagaatactggttgaccactccatcgtggagagctttgcccagggcggacggacgtgcatcacgtcgcgcgtgtacccgacgcgggccatcaacgactccgcccgcgtgttcctcttcaacaatgccacgggtgtccacgtcaaggcgaaatccgtcaagatctggcagctcaactccgcctacatccgcccatacccagcaagttctctatgagctagcaaagtgaccgtaaccgacaaataggcagcagtattattgcatgcttgttaattacatgcatgggctcatttgtagaatagtgattgattaatttattcgttggctcttgtttgtatatcggtcatctatctagagtattacttgagcgattt

SEQ ID NO: 2977 - DNA, 680 bp, Zea mays
  Clone ID: 700238701_FLI
catcgcctcctaattcctaaagcagcatcggctactaccactgtctcttgctcacacagctcgtctgtgcagcacatagctagtgaacgagaacgaccatggcgtcccaggccatcgagagccaccgtgccggcgctgaggtcgtcaccggaggagacgccatctgcaggaagaagtcaatcgaactgctggaggagctcggcctccccaagggcttcctgcccctcgtggacatccaggagttcgggtacaaccgcgagacagggttcatgtggctggtgcaggggaagaagaaggtggagcacaccttcaaaaagatcaagcagactgtgtcgtacgccactgaggtgacggcattcgccgagaagggcaagctgaggaagatcaccggcgtgaagacaaaggagctgatgctctggctcagcgtcgtggaggtctacgtgcccgaggcctcaccggagaaggttaccttcaagactggcactggcctatccgacaccttcgatgcctctgcctttgcgctgggagagtaattaccagccacaaaaatggttggcttcataagacatgtataatctatcttttgtattttaaacttccatatatcttgtgatgagtttatgacccatactcaagggtcgtgcccattgcaaacatttctatgtaattccttgtttatc

SEQ ID NO: 2978 - DNA, 2876 bp, Zea mays
  Clone ID: 700238706_FLI
gaactcgggaagatgataacaagcttggatcctggggactctatcgtgattgctaagtctttctcgcacatgcttaacttggccaacttggctgaggaagtccagatagcctacaggaggagaatcaagctcaagaagggagactttgctgatgagaactcggcaatcacagaatctgacattgaggaaacacttaagaggcttgttgttgacctgaagaagtcacctgctgaggtatttgatgccctcaagagccagactgttgatctggttttgactgcacatccaacacagtctgtgaggaggtcactgctccagaaacactcgaggatacgcaactgtttggttcaactctactcaaaagatatcactccggatgataagcaggaacttgatgaggctctgcaaagagagatccaagctgcctttagaactgatgagatccgaagaacacagcccactccccaagatgaaatgcgtgctggtatgagctacttccacgaaacaatttggaagggtgttccaaagttcttgcgccgggttgatactgcattgaagaacattgggattaacgagcgtgttccttacaatgcacctcttattcaattctcttcttggatggggggagatcgtgatggaaatccaagagtgacaccagaggttaccagggatgtctgcttgcttgccagaatgatggcatcaaacttgtactgctctcagattgaggatctcatgtttgagttgtctatgtggcgatgcagtgatgaactgcgcatgcgagctgatgtgctgcatctctccactaagaaggatgccaaacattacatagagttttggaagaaggttcctccaaatgagccatatcgggtgatactgagtgatgtcagggataaactgtacaacactcgtgaacggtcacgagagcttttatccagtgggcattctgatattcctgaggaagctacattgacaaatgttgagcagctgttggagcccttggaactatgttacagatcactctgtgcttgtggtgactctgtaattgctgatggaacccttctggatttcttgcgtcaagtgtccacctttggactctcccttgtgaggcttgacattaggcaagagtcagataggcatactgatgtccttgatgccatcactacatacctggggataggatcttaccgtgaatggactgaagaacgccgccaagaatggttactgtctgaacttaatggcaagcgccctctgtttggctcagaccttcccaagactgaggaaatttctgatgttctagacacattccatgttattgctgagcttccctctgacaattttggtgcgtatatcatttccatggcgacagctccgtcggacgtccttgctgttgaactcctccaacgtgagtgtcatgtgaaaacaccacttagagtagtcccgctgtttgagaagttggccgatcttgaggctgccccggctgcattggccagactgttctcaatagattggtacagacagaggatcaatggcaagcaggaggtcatgattgggtattcagactcgggcaaagatgctggtcgcctctcagcagcttggcagctatacaaagctcaggaggagctcatcaaggttgctaaggactttggtgtgaagttaacgatgttccatggacgtggtgggactgttggaaggggtggtggtcccactcaccttgccatcttgtcccagccaccagacacgatccacggatcactcagggtcactgtgcaaggtgaagtcattgaacagtcatttggtgaggagcacttgtgctttaggacactgcaacgtttcacggctgctaccctggagcatggcatgcacccaccaaatgcaccaaagccagaatggcgagcccttcttgatgagatggcagttgtggcaactgaggaatatcggtccattgtcttcaaagagccacgctttgtcgagtatttccgccttgcaacccctgaaacagagtatggtaggatgaacataggaagcaggccatccaagagaaagccgagcggaggtatcgactcactccgagcaatcccatggatctttgcttggacacaaacgcggttccacctcccggtctggctaggatttggagccgcattcaagaatgtcctccagaaggacatcaggaacctccacatgctccaggaaatgtacaatgagtggccatttttcagggtgactattgatctggtggagatggtgttcgccaagggtaatcctggcattgccgcactgtatgacaaactcctcgtttcagaggaactgcatccattgggtgagaagctgagggccaactatgaggaaacccagaagcttctacttcaggttgctgggcacagggatcttctggaaggtgacctctacctgaagcagcggctccgcctgcgtgatgcgtacatcaccaccctgaacgtctgccaggcctacaccctgaagcggatccgtgacccggactaccatgtcgcgctgcgcccccacctctccaaggagatcatggactcgaccaaggctgcggcggagctggtgaagctgaaccctggcagcgaatacgcaccggggctggaggacaccctcatcctgaccatgaagggcatagcagccggcctccagaacaccggttaaaccacgaagaggggatcttttttctcctcctgatcattggctctaggtccttcgtattttcgcggattgtaacttcggccacctctctacaccgtgaggaaataatggtggtttctgcaaaagtggtggtaaataaaagggcgacaactatcttgtttttcatagtaacttataactttacgatgcgataatggaacatggcttgcgtt

SEQ ID NO: 2979 - DNA, 1160 bp, Zea mays
  Clone ID: 700238717_FLI
ctctacgaggccgagggagagaacgaccccttcgacgtgatccactccgagagcgtggccgtgttccaccgctgggcgctcggcgtggacaagctggtagtgtcatggcacggcatctcgctggaggccctgcactcgggcatcttccaggacctggcccgcggcgacgaggagcccaggtcgccggcgctgaaccagagcctgggccagtccgtgtaccgcgtgctctccgaggtgcgcttcttccggagctacgcgcaccaggtggccatcagcgactcgacgggggagatgctccgcgacgtgtaccagatcccctcccgccgcgtgcacgtcatcctgaacggcgtggacgaggcgcagttcgagccggaccccccgctcgggcgcgcgttccgggaggaggtcggggtgcccaagggcgccgacctcgtgctgggcgtgtcgggccggctggtcaaggacaagggccacccgctgctgtacgaggccttctccaagctggcgctgcgccacccgaacgtgtacctcctcatcgccgggaaggggccctgggagaaccggtacatggacctgggccgcaacgccaaggtgctcggcgccgtgccgccggggaagctgaaggcgttctacaacgcgctggacgtgttcgtggacccgacgctgcggccccaggggctggacctgacgctgatggaggcgatgcagtgcgggaagccggtggtggcgacgcggttcccgagcatcaagggcagcatcgtggtggacgaggggttcgggtacatgttcgcgcccaacgtggagtcgctgctggagagcctggaggccgtggtggcggagggcgcccggcgcgccgcgcagcgcgggcgcgcgtgccgggagtacgccaagtccatgttcgcggccaccaagatggcgctcgcgtacgagaggctcttcctctgcgtcaagaacgacaccttctgcgggtacccagccgagttcgattgagcagctcctgcatgcatgtgcgttttgctaataattatacaagtgctgtacggtgctttttccgtcgcgtttttacgttgaactaccaggcatatagatatttaacttggagtccgtttttatgaatacaaacaaatgaacaaaaatctacgaattgctcttttttacgc

SEQ ID NO: 2980 - DNA, 1361 bp, Zea mays
  Clone ID: 700238760_FLI
ggcgccgcggcgctctacggcggcgccgtcggggaggccctggtccgcgacgtcagggcggcgggcggggtcatgacgatggacgacctcagagggtacagggtggacgtgggcgccgccttgcgagccgacgccatggggttcaccttcctcggcatgccgccgccgtccagcggcaccctcgggatggcgctgatcctgaacatcctgcaagggtacagctcgctcgagttcttgaaggagctccttggcatccaccgggtcatcgagtccatcaagcacatgctagccatccgtatggacctcggcgaccccgacttcgtggacgtgaccggcgacgtcgccgagatgctgtccacgacattcgccgacaaagtccggcagaggatcgtggacaacacgacgttccctcccggctactacttccccaagtggagccagctggacgaccacggcaccagccacctgtgcgtggtggacggcgaccggaacgcggtggcgatgacgacgaccgtcaacgcatacttcggcgccaaggtgctgtcgccgtcgacgggcatcgtgctgaacgacgagatggacgacttctccgtccccgcgaagcgcacgccggaccgcctcccgcccgcgccggccaacttcatagcgcccgggaagcggcccctgtcctccatgacgccgctgatcatactcaaggacggtgagctcgccggcgtcctcggaggcagcgggggcacgaacatcatcgccacggtggtccaggtgttcgtgaaccacttcatcgtcggcatggaccctctggcggccgtccagcatcccagggtgtaccacaagctgatcccgaacgtcgtgacgtacgagaaccagacggtgggcgacggcgaggtgatcgcgctgggcggcgcggcgagggcgttcctggaggagaggggccaccggctgcgcagcacggactcgggcgccgtgtgccagttcatcgtgcacgagctggcggagccgccggccgcgcccggacacggcgtcttccgcgggaggctcaccgccgtgagcgaccccaggaagggcggcagccctgcagggctgtgattgtgaattgtgatggaggctggtgcgcgtggatagttgcgccttccgatccaactttcgtgcgtggatctcatctcctccctgtagatagatagaaagattcatagacatcatgcattgtttatatatatattgcctagatgggaatccatcaaactgctttcgcgaactagtggacaggcacgaccagtgaaagtttcgagaaacaatagtgaacatttgagagaatttatatgtaacaggtgacaagatttaatataatgtgtatttgcaac

SEQ ID NO: 2981 - DNA, 969 bp, Zea mays
  Clone ID: 700238777_FLI
gggtttgcttggtccatttattttggttgtctgtagggaagagacgacgacatggatgtagattccattctttgtgtgagcactaccgccatatagttgacaacgatgaccgacactgtagattccattctttgtgtgtacaccaaggtatcggtgtctacgttgatctggcgatgcgcttttcacggttactgcgaccgtgatgggcatctaggtgctcaaaccattagttggactgaggaacacggagcagcagcaacaatatcgtaaggagagtgcagaagttggacaaatggtatgccatatcttcagttctcttatgatgcttcagcgctacatcttcagttttctcggctaaaaagagatcatagtcaatagtatacctatgtgtgaaagcgctatgctatttgcttgtttgctgggagaaagaaaagatagatgaaggagttaaagtgcacatacctaatcaagtctgtgggtctccaattctgaaatagaaagataatttatgttctcatctttctgaaatgaacaagatgactggcttctgggttaaggttttttatagagcaccatgacttatcagttttgtgaacaaccctaacttatgtggtcctgacaccacaaaaccttgtcctgatgctcctcccttttctccacctcctccatacaaccctacaaccccgatgcaatcaccaggaagtagctcttccactactggagcaattgctggtggagtggttgctggcgcagccttgctatttgctgttcctgctatcagttttgcctattggcggcacaggaaaccacaagagcattttttcaatgtatatggcttcaaagttagtctttgattattatctttcttgcaacataagggcaaacaacgtttatatgtagcaaacaaatacagtttgcaaacgttttaggaacatgtttttacaataaagatatacttatagtttcacc

SEQ ID NO: 2982 - DNA, 578 bp, Zea mays
  Clone ID: 700238810_FLI
cccatcccgaagtctccggtcacctgtcactctacgcaaccatgtcaaggaggaagaccagggagcctaaggaggagaatgtgacccttggccccactgtccgtgaaggagagtatgtctttggtgttgctcacatctttgcatccttcaacgacactttcattgtgcgatgaaggtcaaggctgatcgtgatgagtcgttaccttatgctgctatgcttgctgctcaagatgctgcacagcgttgcaaggagcttggtattactgcactgaacattaagcttcgtgccattggaggcaacaagatcaagacccctggacctggtgctcagtctgctctcagggctcttgctcgttctgggatgaaaattggacgcattgagaacgttacccctgttcccactgacagcatccgcagaaagggtggtaggaaggggaaggaggctgtaggcgtatttgacatctcttggaggtggccatcaagcagctagtcctctctggatagtgttgctgtttctatgcttgtcaagaggagctttgattttgctatatgttgatgaccatttaccgtggttgagg

SEQ ID NO: 2983 - DNA, 1299 bp, Zea mays
  Clone ID: 700238841_FLI
gggagagaattagctatagccagccgtgtgtcgaacacgacacgcgataatggcactcatgcaggagagcagccaggacttgctcgaagcgcacgacgagctcttccaccactgcctgtgcttcgccaaatcgctcgcgctcgccgtggcgcaggacctccgcatccccgacgcgatccaccaccacggaggcggcgccaccctccaccagatcctcgccgaggccgcgctccacccaagcaagcttcgcgccctacgccgcctgatgcgcgtgctcaccgtctcgggcgtcttcaccgtccagtattcttcaaccgtcgacgcgtcggacggagctgatgtcgtctacaggctgacggcagcctcccgcttcctcgtcagcgatagcgacgaggcgggcacggcgtccttggctccctttgcgaacctggcgctccaccctatcgccatctccccgcacgccgtgggcatctgcgcgtggttccggcaggagcagcacgacccgtccccgtacggcctggcgttccgccagatcccgaccatctgggagcatgctgacaacgtaaacgccctactgaacaaaggcttgctcgcggaaagccgcttcttgatgccaatcgtactcagggagtgcggagacgaggtgttccgtgggatcgactcgttggtcgacgtcggcggtgggcacggtggcgccgccgccaccatcgccgccgcattcccgcacgtcaagtgcagcgtgcttgacctcccgcacgttgtcgccggtgctccatccgatgcctgcgtgcagttcgttgcgggcaatatgttccacagtattccacctgcaaccgccgttttcttcaagacaactctatgtgactggggtgacgacgagtgcatcaagatattgaagaattgcaagcaagccatatctccacgggatgagggtgggaaggtgataatcatggacgtggtagtcgggtatgggcagtcaaacatgaagcgcctagagacacaagttatgtttgatttggttatgatggcggtcaatggagtcgagcgcgacgagcaagagtggaaggagatgttcattgaagctggattcaaagactacaaaatccgaccagtagctggcctcatgtcggtcatcgaggtctatccatgaattctttgtgaacaaaaggccggctgccataatataaactgaagaccacgacgtcgtcatggagctgagcgtgttgttttttagactactaggcacttgagcctctgagaatttgtaataataaataagctgagcaacagcgttctgtt

SEQ ID NO: 2984 - DNA, 3208 bp, Zea mays
  Clone ID: 700238856_FLI
cttcctgcttggtttttgctttcagctcttgaaccgaatccactgccgcggcgcttagcattggggactagggggccgacatggctgccttaggggcgaagatggagcgtctgtcgtcgatcgacgcgcagctgcggatgctggtgccggggaaggtttcggaggacgataagctcatcgagtacgacgctctcctcctcgatcggttcctcgacatccttcaggacctccatggcgacgacctcaaggagatggttcaagaatgctatgaggtagctgctgagtatgaaacaaaacatgacttgcaaaagcttgatgaactcgggaagatgataacaagcttggatcctggggactctattgtgattgctaagtctttctcgcacatgcttaacttggccaacttggccgaggaagtccagatagcctacaggaggagaatcaagctcaagaagggagactttgctgatgagaactcggcaatcacagaatctgacattgaggaaacacttaagaggcttgttgttgacctgaagaagtcacctgctgaggtatttgatgccctcaagagccagactgttgatctggttttgaccgcacatccaacacagtctgtgaggaggtcactgctccagaaacactcgaggatacgcaactgtttggttcaactctactcaaaagatatcactccggatgataagcaggaacttgatgaggctctgcaaagagagatccaagctgcctttagaactgatgagatccgaagaacacagcccactccccaagatgaaatgcgtgctggtatgagctacttccacgaaacaatttggaagggtgttccaaagttcttgcgccgggttgatactgcattgaagaacattgggattaacgagcgtgttccttacaatgcacctcttattcaattctcttcttggatggggggagatcgtgatggaaatccaagagtgacaccagaggttaccagggatgtctgcttgcttgccagaatgatggcatcaaacttgtactgctctcagattgaggatctcatgtttgagttgtctatgtggcgatgcagtgatgaactgcgcatgcgagctgatgtgctgcatctctccactaagaaggatgccaaacattacatagagttttggaagaaggttcctccaaatgagccatatcgggtgatactgagtgatgtcagggataaactctacaacactcgtgaacgctcacgagagcttttatccagtgggcattctgatattcctgaggaagctacattgacaaatgttgagcagctgttggagcccttggaactatgttacagatcactctgtgcttgtggtgactctgtaattgctgatggaacccttctggatttcttgcgtcaagtgtccacctttggactctcccttgtgaggcttgacattaggcaagagtcagataggcatactgatgtccttgatgccatcactacatacctggggataggatcttaccgtgaatggactgaagaacgccgccaagaatggttactgtctgaacttaatggcaagcgccctctgtttggctcagaccttcccaagactgaggaaattgctgatgttctagacacattccatgttattgctgagcttccctctgacaattttggtgcatatatcatttccatggcgacagctccgtcggacgtccttgctgttgaactcctccaacgtgagtgtcatgtgaaaacaccacttagagtagtcccgctgtttgagaagttggccgatcttgaggctgccccggctgcattggccagactgttctcaatagattggtacagacagaggatcaatggcaagcaggaggtcatgattgggtattcagactcgggcaaagatgctggtcgcctctcagcagcttggcagctatacaaagctcaggaggagctcatcaaggttgctaaggactttggtgtgaagttaacgatgttccatggacgtggtgggactgttggaaggggtggtggtcccactcaccttgccatcttgtcccagccaccagacacgatccacggatcactcagggtcactgtgcaaggtgaagtcattgaacagtcatttggtgaggagcacttgtgctttaggacactgcaacgtttcacggctgctaccctggagcatggcatgcacccaccaaatgcaccaaagccagaatggcgagcccttcttgatgagatggcagttgtggcaactgaggaatatcggtccattgtcttcaaagagccacgctttgtcgagtatttccgccttgcaacccctgaaacagagtatggtaggatgaacataggaagcaggccatccaagagaaagccgagcggaggtatcgactcactccgagcaatcccatggatctttgcttggacacagacgcggttccacctcccggtctggctaggatttggagccgcattcaagcatgtcctccagaaggacatcaggaacctccacatgctccaggaaatgtacaatgagtggccatttttcagggtgactattgatctggtggagatggtgttcgccaagggtaatcctggcattgccgcactgtatgacaaactcctcgtttcagaggaactgcatccattgggtgagaagctgagggccaactatgaggaaacccagaagcttctacttcaggttgctgggcacagggatcttctggaaggtgacctctacctgaagcagcggctccgcctgcgtgatgcgtacatcaccaccctgaacgtctgccaggcctacaccctgaagcggatccgtgacccggactaccatgtcgcgctgcgcccccacctctccaaggagatcatggactcgaccaaggctgcggcggagctggtgaagctgaaccctggcagcgaatacgcaccggggctggaggacaccctcatcctgaccatgaagggcatagcagccggcctccagaacaccggttaaaccacgaagaggggatcttttttctcctcctgatcattggctctaggttcttcgtattttcgcggattgtaacttcggccacctctctacaccgtgaggaaataatggtggtttctgcaaaagtggtggtaaataaaagggcgacaagccgacaactatcttgtttttcttagtaacttgtaactttacgatgcgataatggaacatggcctgcgttatctgtt

SEQ ID NO: 2985 - DNA, 496 bp, Zea mays
  Clone ID: 700238875_FLI
accccaaggtgaacgaggacttctacaagtggacgctctttggcggcatcgtcacgctcgtcgccgccgtcgtcatgttgcttctcttcatctccgagaccaggtcatatttttattcagcaacagagactaagttagttgtggacacatcaagaagagaaaggctacgagtaaatgttagtactttttaaacgaaataaactgtctgtaggctattggctgatcttggtgtttcttggggaaaagagtacgagcactctcaataatgtaactcagcaaatgtcatttgtacatatatattagacacctccagctaccttgccaacgcaagaacgagaagacgagttagactttgtcaaaaccctcttcactagtggaggtatcgactatcactcgtcactgtaacccgatggtgatcggcaaccatgagcttccatgttattgtgttctgatacttgagacgtttattatgattatgtatgagatattgtctctt

SEQ ID NO: 2986 - DNA, 1140 bp, Zea mays
  Clone ID: 700238884_FLI
gttctaccccccaggaagcagatcgtgaagagcatgctaaggaaaaatccagaacataggcctactgctggggagctgctgaggcatccacatctgcaaccatatctttctgaatcgtccaactgttcaccgatctatcttccggtgaaacccaccaaaggtaacctggtagacaagcagtcaaagaagccaagcagtggcagaaagcgagctgtcaaagccaatggatccaatggaacattagaaactgcagcagagcacgctgtggaagcaagagacagctccacaaacttctcagatgtatcaactataggtacccaggaagccttgatattgcaaatgccggtggatcctgatgccggaagcaaagaagagcagaacgttgatgttgtaccgtttcagcatgcggcagagaatctgatggcgacaaccgatagacaggtcgatgcgaccatacgtcttaaagccataagaaccagtaacgcaaaagaggcggccccggtcacagttgcagaccaaaagttcaacgaggcgccaataccaaatgaggaactgacaatcggggtagtgcaggaacaaaggaaggacgtgaagccacgctcttaccaggcaggaaaaccagagatgtgtgacacaaccgtaacggaggaatcgtcgcccatcagcacgctaaagctggcgcacacggagagcgcgcccgcggagtgggaccacctgaacatagtccagcagagggccgacgcgctggagtcgctcctggagctctgcgcgaagctcctggagcaggagaggctcgacgagctcgcgggcgttctccggccgttcggcgagggcgccgtgtcgtctagggagacggcgatctggctgaccaagagcctgatgacccccccacccaagttcggagagtccccgacgaagcttttgtaaaacagtgattcgtttgagagtttttgtttttttttcgagtgccattttcgagagtgtacatagcatcaacagaatttgagttcaagattgctgtgcttacctaggcctgagctttatttatcttggatgtatatggtttgcatggcaccgactgttgtgagcgatgactggttatttaccagccgccttgttttatttattgtgctggaaatc

SEQ ID NO: 2987 - DNA, 687 bp, Zea mays
  Clone ID: 700238913_FLI
ctcaagttctcgcgcccagagccaaatttttctccactcaatcactgcagccatggacgccagcggagccggtagcaaggcgaagaagggggcggctgggcgcaaggctggcggccccaggaagaagtcggtgtcgcggtccgtcaaggccgggctgcagttccccgtcggccggatcgggcgctacctcaagaagggccggtacgcgcagcgcgtgggcaccggcgcccccgtctatctcgccgccgtgcttgagtacctcgccgccgaggtgctggagctggccggcaacgcggcgaaggacaacaagaagacgcgcatcgtcccgcgccacgtgctcctggcgatccgcaacgacgttgagctcggcaagctgctggctggcgtcaccatcgcgcacggcggtgtcctccccaacatcaacccggttctcctgcccaagaaggtggcggagaaggcgtctagcggcggcagcaaggagagcaagtcccctaagaaggccgccaagtccccaaagaaggcagccaagtccccgaagaaggcttagaaattagtcactccactagcgctctgctgtagcatgttcgtgtttagatctgtggatgttatgtgttccggcctaatttcctctttgccttgtggcttctgatatgttcatcggcatgtttgccgtgttgtgtttccttg

SEQ ID NO: 2988 - DNA, 1236 bp, Zea mays
  Clone ID: 700239011_FLI
gatggaggagaggtacgaggcgctgaaggagctgggggccggcaacttcggcgtggcgaggctggtcagggacaagcggaccaaggagctggtagccgtcaagtacatcgagaggggcaagaagattgatgagaacgtgcagagggagatcatcaatcaccagtcgctccggcaccctaacatcgtacggttcaaggaggtttgtctaacacccacacatcttgctattgtcatggaatatgctgctggtggagagctatttgagaaaatctgctcagcagggcgattcagtgaagatgagtccaggtatttcttccaacagctgatatcaggggtcagctactgccattctatggaaatttgtcaccgtgatcttaaacttgagaacaccctccttgatgggagtccaacacctcgtgtgaaaatttgcgactttggttactcaaagtctgctttgctgcattccaaaccaaaatcaacagttggaactccagcatacatagcccccgaggttctttccagaaaagagtatgatggaaaggtagcagacgtttggtcctgtggtgtcacgctgtacgtgatgctcgtgggatcatatccatttgaagatcctgaggatccaaggaacttccggaaaacgatcagcagaattcttggcgtgcaatactccatcccggattatgtgagagtgtcttcagactgcagacgccttctgtctcagatattcgttgccgatccttcaaagaggatcacgatcccggagataaagcatcacccgtggttcttgaagaacctcccgagggagatctcggagagggagaaggccaactacaaggacgcggatgccgccgagccggcgcaggccgtggacgagatcatgcggattgttgaggaggccaagacccccggtgacatgtccaaggtggttgacccggcgctgctggccgagatggcagagctggagagcgacgaggaagaggcagacgccgatgacacctactgatcgctcctgcatgcagctcagcagctgctcagtcatggtgtccagtcctttgtgctgcagacatggcgccgccgagcgcccgagcttaacccgtgcgtgtgatgacggatgttgtattgcactctttacgctgtttgtataataaaagtctgtacaacgctgtacaattgcagattgccttgtacagatgaactagcgtgcagtgatatactcagtcccaaattctatgttcc

SEQ ID NO: 2989 - DNA, 926 bp, Zea mays
  Clone ID: 700239016_FLI
cacagagctgcaacagcatcagctgccacctccttccttccttcctgcataggttgctacacgtatatattctgaagaagagatcgagatgaccagcgtgtggaagaccaaggttctgcctggcctcaacaagatctttgacaaggatggcaagaaggctgcagctgcaggcttcttgaagtccttcaacaaggaggagattgacaaggagattgaggacaagaagacagagctggagcccaaggtcgtggaggcctacgaagcatctcctcctgaggtcaaggctctgttcaaggataagaagccagtcaaggtcagcaagaagaactcggctgcagtcaccaagttcctcgatgagctggctaagattgacttccctggagccaaggtggtgagcgaggcggtggccaagtccggcacctcgcccctgcttccggcgatcaccttcatcttggacaaggtcgcaccgtttatccccaaggaggagcccaaggcggagccggcggcggaggccacctcccgggaagtcgccgtggaggagaagaaggaggaggccgagccagctgcagcgacggaggcggcaccggcgccggcagagacaccgtcggaggcggcggtggtagaggagaagaaggaagaagagaagaaggaagaggaggataagccggctgccgaagaggcggcgccgccagcagaagcagcagctgctgctgaggagaagtgatcctgttgacggatcgagcatgcaaagctctccctcctcgctcccttgcttgcttgcttgcttgctgctggtaaattaaattaagttgccgtgatacttaagcgtagccgcacggagtgaaaagttattaagtaaaagcagacaaacacttggcatgcatggacattaatttgttattctttgtaccgtcgtcgtctcgatg

SEQ ID NO: 2990 - DNA, 1955 bp, Zea mays
  Clone ID: 700239031_FLI
gcagagagtgggagcaacaaggtgagttccattccatcccatccatcagccatgtcgcagctggcgcctctgcccaaggtggtgatgggttcgctggcgttcggcgtgttctggatgctggcggtgttcccctcggtgccgttcctgccgatcgggcgcacggcgggggcgctgctgggcgcggtgctgatgatcgtgttccacgtgatcagcgccgacgacgcgtacgcctccatcgacctcctgatcctgggcctgctgttcgccaccatggtggtgggcggctacctcaagggcgccggcatgttcaagcacctgggcaagctgctggcgtggcggagccagggcgggcgcgaccttctgtgccgcgtctgcgtcgtcaccgcgctcgccagcgcgctattcaccaacgacacctgctgcgtcgtgctcaccgagttcgtgctggagctggccgccgagcgcaacctccccgccaagccattcctgctggcgctcgccaccagcgccaacatcggctccagcgccacgcccatcggcaacccgcagaacctggtcatcgccttcaacagcaagatcaccttcctcagcttcttcttcggcatcctgcccgccatgctggccgggatgggcgtcaacacggtcatgctgctctgcatgtactggaacgacctcgagggcgccgccgcatgcggcagccccggtgatgagaaggagatggaggccatcgaggaagggcggtcgccggcctcggtgctctcgctcaagagtagccccgccgccgccgccgcccagcacgtcgccctgcgccagcgccagaacggccgcggccacgacgcggacgatgacgaccccgactccatgatgtcagagaacatcccgacaaagcaccggtggttcatgcagtgctcggagcaccggcgtaagctgttcctcaagagcttcgcgtacgtcgtcaccgttggcatgctcgtggcatacatgctcggcctcaacatgtcgtggaccgccattaccaccgccatcgcgctcgtcgtcgttgacttccgcgacgccgagccgtgcctcgacaaggtgtcctactcgctactggtcttcttctcggggatgttcgtgacggtgagtgggttcaacaagacggggctgccaggggccatctggaacttcatggcgccctacgcaaagatcaaccacgtcagcggcgtcaccgtgctctccctcatcatcctgctcctctccaatctcgcgtccaacgtgccaactgtgctgctgatgggggacgaggtggcggcctctgcggcgacgatctctgcgtcggcggtgacgcggtcgtggctgctgctggcgtgggtgagtacggtggcgggcaacctgtcgctcctggggtcggcggcgaacctgatcgtgtgcgagcaggcgcgccgcgcgccgcgcaacgcgcacgacctcagcttctggagccacgtcgtgttcggcgtcccttccacgctcgtcgtcaccgccatcggcataccgctcatcggcaagatcgccttctagcctgctgccagtgtatgctgctaatagtgtactgattaatcagctagcagctagcgtcgttccgatgtatccacatgcatgcatggacgaggattcagcaactacaaacgtcgtcgtcgcgtggcatggcgactggtgctggtgtggtcgacggggcaagctaggcaagcaattaagcgcccctactacacactcgtgatttgcatgtttttttaagtctcagctatatctatatttatatctatatttgctgtatagctttgtcatatgctcaatctgggacgacgacgactgtgccgtaaggtcgatcgttaacagggattgcattgcgttaattgtcagatgttaagaaatgtgcaactaatgcgacaattaattaagcagcggatgctgaacgaagaacagttggccttgtt

SEQ ID NO: 2991 - DNA, 916 bp, Zea mays
  Clone ID: 700239159_FLI
ggacgggagcgcagagccagcccacgtcgcccctcatgccgctgcctctccgacaggcggcgaggcggcgcagcacggccacgggtacaagaggcgtcacggcgtgcagcggatccggcaggaggatcggcgctggagctccggcctggtgtggtttctggtgatcctgtgcacggtgctgaccatcggcgtgatcgtgacgggcgccaccgtgttcgccgtgtacctgctgtacaagcccacgacgccgtacctgctggtctcgtccgcgcggctggagacgctggcgtacgaccagtcgggcaccatccgcgacctgcagctggcgctgacggtgctggcggagaactccaactcgcgcaccgacgccaccttctcccgcgtcaacctcgccgtgggcttccgcggcgccgaggtggcgctgctccgcgcgggcaccttcgccgtgccgcgccgcagctccttcccgctccgctaccaggtcgtgtcggcggggcgccagctcagccccgaggggatggagtacatggccggcgcgctccgggcgggcgtcgtcccgctcgacctcttcggcaaggcgcgcaccacctggaaggtcggcatcttcgcctcgctccagttctggacgcgcatctcctgccgcttcctcttcttctaccccggcaatggcaccgccatgcccatcgactgccgctccaggtcgccgtagcgtcctcctggcagccaggcaggcgtcacccattgttcacctgctctgtctctgcctgcagtctcctctgcagctacgcgtttgttctgtcattcatttgttcattcactcaggctcagcaacacaatttgacacatgcgccattcttgtacagaccaaaaataataataataatactggtacggtacagtgcatagatcgacagat

SEQ ID NO: 2992 - DNA, 812 bp, Zea mays
  Clone ID: 700239267_FLI
gctcgttccggccgctggaggaggtgcacgcgctggtgccgcatgtggtggacgtcatcgcgcggggcgtggaggagctgatcgcggagggggccgcggacctggtggtgccggggctgctccccaccggctgcttccccatgttcctgtccaccttcgtcggcaagccggccgcggcgtacgggccccgcagcgggtgcaacagggagctcaacacgctgtcgtgggtgcacaacgcggcgctgcagcgcaaggtggaggagctccgcgccaggcaccccgacgtgcgcatcgtctacgccgactactacacgcccgccatccggttcgtcctccacgctgaggagtacggcatgctgaggcagacgccgcgggcctgctgcggggcgccgggagtgggggagtacaacttcaacctgacgtccaagtgcggcgagccgggggcgtacgcgtgccaggacccctccaaccactggagctgggacggcgcccacctcaccgaggccgcctacggccacatcgccaagggatggctctacgggccctacgccgacccgccaatcctccacccatgaatccttctcccgtactccctccgcccgccggcgccgggacgccgggtaccgtaccgtatatacacacataccgacataagaataggcatcatcgttgtacgaatacacatgctagttaatctagtttgatttgcataagaagttagcttctgtacataacttgggatcggagtataaacttgtactattacatgttgagtaataatatacaggtcgatctctttcgacttttttttt

SEQ ID NO: 2993 - DNA, 1078 bp, Zea mays
  Clone ID: 700239275_FLI
ctttcctctcctgcaactgcaagcgaccacccctccacccccatccacccacccgcccgccgacgcttggatcccctcccttgtttgccgtgtccccgcccaaaccccgtagccgccgccacagcaatcgctgccgccgccgctggaggccgggccgtgggggctgaaatgaaggaggtggtgctccacgtgtatgacgtgaccaacagtgactccgagaagacgaacaacaccatcctccagatcaaccgcatcttcaaggaccgcatcggcctcggcggcatcttccacagcgccgtccaggtctatggcgaggacgagtggtcgttcgggttctgcgagtccggcagcggcgtgtttagttgccccataggcaagaaccccatgtacacctaccgggagcgcatcgtcctcggggagaccgagtgcggcatcgccgccgttaaccggatcctgcgggagctcagccgcgagtggcctggccactcgtacgatctcctctccaggaattgtaaccatttctgcgacgtgctctgcgagaggctcggcgtccccaagctcccaggttgggtgaatcgctttgccaatgccggtgatactgctgtggttgttgctgagaacacagcagttaagttcaggcaggctaaaacagaaatcgtgaatgccagtagagtagcatacagatttatggcaggcctgacttccaaaaatcaagcctcacctgagtctccgggtaacaatcaaaacagaggcagccctagtttccagggagcttggttcaagaacatcgtctcagctggtgcaaagccttcatcgagtggatcgacacgcacacattttcaggacgctgatgatggaacccctttgcaacatcaaagttcaacagagcaatcaacacagttgtagttgcttcccagcatatcaaccaacaattgaattgaatctgtcaatctgttgtgtaacattagctaatatctgttcgaaacctgttgttaaattgtatcagtagtgtaacagttgctgagatttgttcaaaaactgctattttgcatttgtccgtgaatcagttttttgcagc

SEQ ID NO: 2994 - DNA, 1386 bp, Zea mays
  Clone ID: 700239281_FLI
aggatatatagataatatacaaacaaaggttcctccagagcccagagcaggagggaagtcaccggccgtcggcggggaggagatgtcggacggcgcgggctcccggacgggcgtcgctggcgcgctgggcctctcggtcacctcgtcggtggccatcgtcatctgcaacaagtacctcatcagcactctaggcttcttcttcgcgacgacgctgacgagctggcacctcatggtgaccttcttcacgctgtacgttgcgcagcggctgcgcttcttcgagccaaagccgatcgacgcgcgcaccgtcatctccttcggcctgctcaacggcatctccattggcctcctcaacctctgcctcgggttcaactctgttggcttctaccagatgaccaagctggccatcatacccttcaccatagtcttggaaaccctctttctgagcaagaagttcagccagagcatcaaggcctccctcatggttctgctgctgggagtcgggatcgcgtcggtcacggatctccagctcaacctcctcggctcgatcatcgccgtgctcaccatcgctgcgacatgcgtcgggcagattctgaccaaccaaatccagaggaggctgaaggtttcgtcgacgcagctgctgtaccagtcgtcgccgtaccagtccgcggtgctgctcgtcaccgggcctttcgtggacaagctcctcaccaagcgtgacgtcttcgcgttcagctacaccacccaagtcgtggtgttcatcctgctgtcgtgctcgatcgcggtgtgcgtaaacttcagcacgttcctggtgatcggcacgacgtcgcccgtgacgtaccaggtgctgggccacctcaagacgtgtttggtgctctccttcggctacatcatcctcaaagaccccttcagcgcgcgcaacgtggtgggcatcctcatcgccatcttcggcatgggcctctactcctactactccgtcgtcgagagcaggaagaagaccgaggacgctagctcgctgccggtcgccgcgcagatgagcgagaaggactcggcgccactcctcggcgccaagagctcgccgcggacagagaacaaggccgaggaaaccttcgactacatgccgaggacggccaagagcgcgttcaccggccggtgagcgcgtagcttgtaaggagtacgtatctttctagagttgtgggtagacgacgagcaacaaggcgggaatgtgttagtgaaagatgtaacggcggcaagtgacattccaattatcatttttgcgatttctcctctagggtggtctgcgtggtcatggtttaccagagcataaacagcagaatgtgtggtctactggtcttgaccgagcttgaaatagtagattggattggtgat

SEQ ID NO: 2995 - DNA, 707 bp, Zea mays
  Clone ID: 700239287_FLI
agaaagacctgatgctttccaagcttcaaatactcatcggtactgcagacagggcagcgctggaggaggagttggaggaggcagcagctagcatcgaccagttggagacagagctggagcgccatctccaggagaaactagaggctgaaattcagtgtctgttgatgttgaaagcgaggcagaattggcaggtccgagcggtggaccaggtggccttggaggagcacagggcgctgtctgccggggacaagaccagaatgctgctcaagctacgagagacggagagcaagatcgtgatgctgaaagagcaggtggacaagctggaggtccgggagaaggagctcaaccggacgaccgaggtcctgaagatgcagagcaggaccttcagagcgtccctctttggcctcgtccagctggtaatgctatgcctgtccctgaaggtgttcttcgcgcgggtctcggccccatttgacgaggttgtgccgacatgatgccgtcagctggtgctctcttctgcctgtaaattagctcgccgggattgcgatgccttaacgcgtgtccggctgtcttactgtagctgtagccagtaggtagcacagtttcgttacactgatgcagtgtaggctgtggtgaatgacgtcagaaactacgcgtgttctgttaaaaaaaattactgcaggtctgtgcataaattgggttggattggc

SEQ ID NO: 2996 - DNA, 918 bp, Zea mays
  Clone ID: 700239316_FLI
ctcgaacacaaactcaggcaaggcaaaaggaacccgcaccatccgaggctcaagcagggaagtgatcatcatcatcatcagaagaagatgtgcccaaccaagaaggggatgaccggagagccgagctcgccatgcagctcggcatcagcctcgaccttaccggagcaccaccagacggtgtggacgtcgccgccgaagcggccagcggggcggaccaagttccgggagacgcggcacccggtgttccgcggcgtccggcgccggggcagcgccgggcggtgggtgtgcgaggtgcgcgtgccggggaggcgcggctgcaggctctggctcggcaccttcgacacggccgaggcggcggcccgcgcgcacgacgccgccatgctcgccctcgccggcgcgggcgcctgctgcctcaacttcgccgactcggcctggctcctcgcggtcccggcctcgtgcgccagcctcgccgaggtccgccacgcggtcgcggacgccgtggacgacttcctgcgccatcagctggtcccggaggacgacgccctcgcggccacgccgtcgtcgccttccagcgaagacggcaacacctctgatggcggggagtcatcctctgattcctctccgcccaccggggcctcgccgttcgaatttgatgtgttcaacgacatgagctgggacctgcactacgcgagcttggcgcagggattgcttgtggagccaccgtccgcggtcacggcgttcatggacgaaggcttcgccgatgtgccgctctggagctactagagactgaaaatttccgtttctttccttggcctctggcgcctaattttggcagtgtaaaacggttacttattttggtaatgagatcgatcaagtttgcgaaacatgaaaacagagcatgctaatcgacattttagc

SEQ ID NO: 2997 - DNA, 380 bp, Zea mays
  Clone ID: 700239329_FLI
agaggctgaagcccatgtcgtcaagagtattgtttttgagtcgcggaagcagagggaagaaaaatcgtagtcatgtttggactttaactttgttttatgttggaaagtacttgaaagacttttcctgtggtaattctaggcgtaggttgctgtgctggttggggtttactggtgaaccagagtttttctatctcccactatgaatttgttacctcaagttacctggatgttcactattttgttggtacatgtcgattttgcctcgttcatgcatgtccactgagtgagtatgcgcatgtgttatctgctgtctgtgttcgtgctcttggcatgtatgtttgcatcgatgaaagtaaagagctgttgggagttgatgattc

SEQ ID NO: 2998 - DNA, 538 bp, Zea mays
  Clone ID: 700239348_FLI
gatcagatcgactgctaagagagtcgtcccagactatcccgccgggtagctaaccttatcttcccatggagccagcgaagctcgcagctttccttgccgtcgctgccgtcgcctacgctgttgccgtcgcaccggctgccgcggaatactccggcggcgcgaccgccccagaaagctgccagacgcaaatcatgtacttcaccaactgcctggcccgtgatgagatccgcgggcagtgctgtagcgtggtcgagagccgcgagtgcctctgccagctgaagcgggaggtggcgctgccctgcagcctgcatcgccaccatcaacgcagatgctccaaggaagggtcgcctccacggtcggtgaagctggccgagctgcagcgcctcccatgcttcaagacactcaagtgctaggagccgttacgagttcgtatttttgttttgtgtacgtgtgcttttgtttgtttcacaattgttccttgttactgtttatttccattcagcttgctatggatgtaggtacctgtgcttgtccgttg

SEQ ID NO: 2999 - DNA, 1244 bp, Zea mays
  Clone ID: 700239361_FLI
agttcatgtcgtgggtgctgtccacgcctttcggccttgggaactgcctctcgcggtatgtgcgggacaaattccggtccctggctgctgactctgtggaggagagctctgtttcaactgttagcacaacctttgacacttctgatgtttatctgctaacacgggggagagcatgggcaattgccctcagcctaagaaacaagttgagtgaaaagctgctgtcagcttctgttattggaatggacacagaagacctcctttataggtcatctgttcatggaaaaggactgagccggttctggtcttgtgttgaggggtacaaagggccaatgctgattctactttcagcattctcaaaaggtggtggtgagaatgttgattctgatcgaagatgggtgattggtgtattgaccgaggagggatttgagaacaaagataccttttatggtagctctgggttcctttgtgccgcacatccaatattccgcatgctaccaccatctggcaaggaaaagaacttcatgtactgccacctacatcctcagataagagcttatgaagcgaatccaaagcccgttggcttagcatttggtggaacaattggaaatgagaggatctttcttgatgaagacttctcgggagttttagtacgacaccatgctgttgataaaacttatcaacatggctctctcatccccaatcagggttatttgcctgttgaggcttcagtgcttgatgttgaggtatgggggctgggtggagaagcaacgaaacgacagcagaatatgtacaagaagagggaggacatcttctcagagcagcgaagaaaggttgatctcaaaacttttgctagctgggaagactctccagagaagatgatgatggacatgatgtcggacccaaacacggttcgacgggaagaccggtgattttggtttgcagcctccggggatgtacagacgacagcgtttgttgcacataggagtattttgcttgcgcatttggctgggtcacacgctttatttaggttgaagtactaaaagaagatttgtacagaacgtaattcccaataaatgaaatggagattctggacaggtctatggtgtccaagcttgctgacatgtcttacggtaccccttttgctggggaggttcatgttgatgttggtgttgtgtggcacaatggctgccagatactgtaattgttatggctgaacgaactgatgaaacaatgctggatttttc

SEQ ID NO: 3000 - DNA, 1372 bp, Zea mays
  Clone ID: 700239367_FLI
cgagtgacagtggactcccctggctccccgtcacagcggcgtcgttaaatagcggccacccattgtcgcatgtcgcatcccatctgctatccttggttgccgcttcctccaaagccactccaaacccccgcttccagaaccttctcgaaactctccgcctcctcctctactcgctccgatggcgaaggaaccgatgcgcgtgctcgtcactggcgccgcagggcaaattggatatgctcttgttcccatgattgctaggggagttatgcttggtgcagaccagcctgttattctgcacatgcttgatattccgccagcagctgaagcccttaatggtgttaagatggagttggttgatgctgcatttcctcttctgaagggagtcgttgcgacaactgatgttgtggaagcgtgcactggcgtgaatgtggccgtcatggttggtggattccccaggaaggagggaatggaaaggaaagatgttatgtctaaaaatgtttcaatctacaaaacccaagcatctgctcttgaagcccatgcggcccccaactgcaaggttctggtggttgccaacccagcgaacaccaatgctcttatcttgaaagaatttgctccatcaattcctgataggaacgttacttgcctgacccggctggaccacaacagggctcttggccagatttctgagagacttagtgtccaagtcagtgatgtgaagaatgttatcatctggggtaaccactcgtccactcagtaccctgatgttaaccatgccacagtgaagacttccactggggagaagcctgttcgtgagcttgttgctgatgatgagtggctcaatggcgaattcatcacaactgtccaacagcgtggtgctgcaatcatcaaagcgagaaagttctccagcgctctctcagctgctagctctgcttgtgaccatattcgtgattgggttcttggaacccctgaggggacatttgtttccatgggtgtgtattccgatggttcatatggtgttccttccggacttatttactcattcccagtaacatgcagtggtggtgaatggaaaatcgttcaaggcctcccgatcgacgagctctcaaggaagaagatggatgccactgcccaagagctgtcggaagagaagtcgcttgcttactcatgcctcgagtaaattataccacacacccagagagcaattgctaccccctgtgttttgaataaaagaaactccagctccgtccatagattctcactcagaactgctgcacgtcgctgtgcaggcgtgttgctggcttcgcccagcgtgtacgagactacgagggcttgtagcccctttttggcctgatgacttgcgagacatttattg

SEQ ID NO: 3001 - DNA, 1417 bp, Zea mays
  Clone ID: 700239372_FLI
ggtgaagaagcggtcgaagcaccgcaaagcggtcaagttctacgccacatgcttcggcttccgcgagccctataaagtcctcatcgacggcaccttcgtccaccacctcctcacccagcgcctcctcccggccgacgaggctctccgagacctcctctcggcctccaggacgccagccctcttcacctccaagtgcatcctcgcagagctcagacgtctcggcaagtcacatgccgaatcatttgacgccgcgcagcttctcaccacaaccaagtgtgagcatgacaaggtggtcggtgcagttaactgtgtccagtcactgataggtgataaaaatcctgaacatttcttcgttgccacccaggatcctggtctccgagaaaacttacgagagattcctggggttcctgtgatatatggtctgaagaactctttatgcatagaacggccctctatgcagcaacgcaagtttgctcaattggatgaggagaagcgtctcaatatggatatctctgaatacaagaagttactgaaggctgcatcagaaggaaagacaattgccagtgaaaatggaagtggcgaagaacaacatgagatgcctattagttctcttgtaaaaaatgcacttcatgttactgataaaaccaagtttaagaggaacaaagcaaagggtccaaacccactctcctgtaagaagaagaaaccaaagctccccacggctattcaaaagcaggcaggtacggctgatggcgaggcaaagaggaagagggttcggaagcggaagagaggccaaaaagataacaagcaattggaggctgcgaactagaaggatgggcttgcgtaggaagtttcagtgctcttgctagacatccatcctgactccggagcaagtcaactatggaggagttcctttctcccacacaggattcagtatgccatgccataccatgctcattatatgttgaagatgcttcttgcaacgtaacacttgattggttatggtgatcgtgaatccttctctagaggatgttattggatgtttcttttgtcgcaagatgcaactttaaatgttttttgaagcaaaagtttgatgccagtagctctaccaggttcttgcttgccctgctacatgtgtgatcccattcttcaattgtaagatgtgtttgttgagaatatgtataatagataatacttctattattttagattttagacagtagtaaccttagtttatttggacctcgagacaaatgtttaaagtacctaccattagatagggatgaaagtggtaattcgaactgttagaacaaatttaatattttaaaatagatatgtataaaatttaatgttgatcttttcttatgttatcaagcacattagtacaaatatgaataaaatattatataagttgttttat

SEQ ID NO: 3002 - DNA, 1060 bp, Zea mays
  Clone ID: 700239377_FLI
agaattgtgaggccagcatcagtgaaccgcagtcaaggggcagctagtacagatgcggataggcttgtctgggcaatccagcgcactcataactctttagaagcaacaaggcggcaaaaactagatgacaacaacttgtgtggaaacggttctgctaagaaggatgagtcctgtgactgcaactccagctttgagtgcaatatctgtcttgacccagctaaacagcctgtggttacaccctgcggtcacctcttctgttggccatgcttgtaccagtggcttcatgcacattcaccccactctgagtgccctgtatgcaagggtgaggtgctagaactgaatgtcactccgatatatggaagaggcggtgaagaagggaattccaccaaccctgacttcccacctaggccacgagcaaacagaagggagagcctgaggcaacagctgcaaatgacagacacaagaggaattgcaacagtggtgaggcagttgatacaaaaccagggtataattagcgttctcccaagcccaacagggatcgagatgtcggtggttcctgcaggccggcaaagggctagggctcggagacagcaaaggcaggataataatgcatcatcttccatacacgttgtagcgcagaatatgggcaatgttgcccctgagagcagcaaccaaatccagttgtcacattctaacggtgacaatgctgcacagatggttcttgcagctcctcagcagtcatcatctgtcgaacagctgtcaacttctagcaccacagctgttatattgggcgagcctgggtcaagtaggcggtcaaggccttcggagtctccaaccataagaagaacgaggaggaggccacagtaggtactcgagtgttgtcactcccttcagtaaaatctacagaccatgccccagtgatagttattaccatgattatctccaataacatctcaaggttaataatgtagaaatgtatatgccatcactggtttctgcctttctcttacattccatgtatcatctattatgcaaaacgagtcgaaatatcagttccagt

SEQ ID NO: 3003 - DNA, 1404 bp, Zea mays
  Clone ID: 700239390_FLI
gatctcgccggcggcgtcccgcggcttcctcacgtccttcccggaagtgttcatcaacgtcggcatcctgctcggctacctgtcgaactttgcgtttgcgcgcctaccgctccgcttcggctggcgcgtcatgctcggcatcggcgcggcgccggccggcctgctcgcgctcatggtgctctggatgcccgagtcgcctcggtggcttgtcatgaagggccgcctcgccgacgccagggccgtgctggagaagacctcggcctcgccggaggaggccgccgagcggctggctgacatcaaggttgccgcggggattccgaagggcctcgacggagacgtggtcgccgtacccaaggagcgaagcggcggcgagatgcaggtgtggagggagctcatcttatccccaacaccggcgatccgacgcatactgctgtcggccgtcggcctgcacttcttccagcaggcctctggcagcgattccgtcgtcctgtacagcccgagcgtgttcaagagcgcgggaatcaccgacgacaacaagctcctggacctgggcgtcacctgcgcggtgggcgtcgccaagacgctcttcatcccggtggccacgttcctgctggaccgcgccgggcgtcggcctctgctgctgaccagcacgggtggaatgattgtctcgctcgtcggtctcgggacgggcctcaccgtcgtggggcaccacccggacgccaagatcccgtcggccgtcgcgctgtgcatcgcgtccaccctggcctacgtcgccttcttctccatcggcctcggccccgtcacgggtgtgtacaactcggagatattcccgctgcaggtgcgcgcgctgggattcgcggtcggcgtggcgtgcaaccgcgttaccagcgccgttatctccatgaccttcctgtccctgtccaagggtatcaccatcggcggcagcttcttcctctactcgggcatcgccgcggtcgggtgggttttcttcttcacgtgccttccggagacccgcggtcgtacgctggaggagatgggcaagctgttcggcatgccagagccagacacggacatggctgaagcatacaacgccgctgccaaggagaaggcggtggaaatgccggcagtgctcggcaatgattgatgcagcgtcttaccagagcagcgtggcaagattggcctctgtcccttgactctgaggtgtcgcggtattgcaggacagtgaccgcgtggtccaaccagagactcttctgcaggacagctgtgcattatcgctgtcggcgtggcgtgtgcttcgcaagttgtgaagctatttggcttgttctacatgccagatagtgaacccaaaatgcaaagcagtatccagtagcaactggcaagggacacgtggttccgtactatttt

SEQ ID NO: 3004 - DNA, 1467 bp, Zea mays
  Clone ID: 700239487_FLI
cgggtccttctgcgtgcatcggtttcttcgtcgactccggctccatctacgagtccggggagaccaccggcgtatcgcacctgctggagaggatggccttcaaggacaccaagcaccggagccacctcaacatagtgagcgagctcgagcttgccgggggcaacgtcggcgcttcagcctccagggagcagatggtctacagctatgacacgctcaagggatacatgccagaggctctcgagatcctcatcgactgcatgcgcaacccgctcttcctccaggaagaagtcgaacggcagaagtaaatgagctacaaaagaaccctgagaagtttcttcatgaacagcttaaccttgttggatattcgggtgctcttgcaaatccgctaatagctcctgaggatgcccttgctagaatcaatgacaaaattattcaaaagttctatcatgaaaattttactgctgatcgcgtggttctagcagcatcaggtgttgatcacgaacacttgctaggctatgcagatttgttgttgaaagattggcacaaggggaccccaatggaaaagccaaagtctacatatgttggtggagattccagacacagagcagattcagatatgacacatgttgcattagcttttgaagtgccagggggctggcttcaagagagagacgctacaattatgactgtcatacagactttaatgggtggtggtggttcattctcatctggcggtcctggaaaaggaatgcattcacggctttatcgacgtgtcctaaataaatatcacttggttgattctttttctgcatttaacaatgtatatgacagcagtggcctctttggtatctacttgaccacaccatcagattttgtggcaaaggctgtcgacatcgcagtaagtgaattaattgctgtcgcaactcctggagaagtgacagaggttgaactgcaacgagcaaaaaattcaacgatttcatctgtattaatgaatcttgaatctagggtagttgttgccgaagatattggaaggcagctgttatcttatggttgcaggaagcctattgactacttccttcaatgtatggaagaaattactctagatgatgttgcaacatttgccaggaagatgctagctacgcaacccacaatggctagctggggaaatgttgacaaagttcccccatatgaatttatttgcaagcggctacaatagtacccctacacaatgacctctggactctggtggtcttgaaggatcctttcgtggaaaactaaacaatcacttgtatgaagtgccctagcttagaaactgcttttctttcagacatgcagtttagtgagtttaggatttcaacagctatgttcaattgtaactgttcaagcaacacatagtaaatgagaggctgatgaatggcaaatatcaacagtttctccatggcccattagcattttattgtcatgttc

SEQ ID NO: 3005 - DNA, 748 bp, Zea mays
  Clone ID: 700239490_FLI
gccgcgccaagacggacgtgcagctctcggacgggtgcatgatcccccgcgacggagctgctcatcccgatcatggccatccaccacgacgccaggttctggggccccgacgccgcgcagttcaaccccgcacggttcgccggcggcacggccagggcggcgaagcacccgctggcgttcatcccgttcgggctgggctcccggatgtgcatcggccagaacctggcacggctggaggccaagctcaccatggcgatcctgctgcagcggttcgagatgaaggcgtccccgaactacatccacgcgccgacggtcctgatgctcctctacccgcagtacggagcgccggtgatcttccggccacgttcggcgcatccggcagcctcatagcgcagatgcttcgcctgtcccccacattcttttgttgattgaaactgatgggaacgccgcaggtctgcctggtgctcgaaagccataggacgtgtcccaaatactccttccgcgaccccctgtgtatatgccaagtgatactagaagccaagaagcactaactttttgtcctagcctgcgcctcggggcctacccaggttgcccgccggaaatgccctcgttaatagaccagatcaggcccagccttttttgttccctgccccatggcgtttgtgtggtatgtgtatgtatttgtaatctgtatagaggtttgctattccatcttctacgttcctagtagagacgaaaatgcaatggg

SEQ ID NO: 3006 - DNA, 1052 bp, Zea mays
  Clone ID: 700239494_FLI
cgaagttgtctacatcacttgacttgcgagcgaccgcggctcacgtcggctgcataaattgcttcgtagactagtaccacacagtttgcgagaaggggagaggtagaggttccgaggtagagagatagagaggaggagagggagggcgaggcggcggatccgtcactccgttcttctccgctgatctggaggaaggaggcgaggggagttgcaaatccatcaatggccactccaaccacctattcagtccgcatatcctcggagacccacaagattgaagcctgggtggtgtctgacgaagctttggccaggcaactgcaggaggaggagaacacgcgtgacgctgctgccgacaccagagaagtcgccggcaatgtacccttggagtcatcgtcaccggctgttgagtacaggcctgcacagaatgcagctcaggttgcaagggaagacaatgtggacccagataatatgtcatatgagcaactacaagcattaggggaagcagtaggaattcagtccagagggttatctgatgagctgatatcttatttggagccatttaggaacaagtgcactttcttctccaggaaaaagaacagtgaggaatgtgtgatctgcaagacaacatatagaagccggcagaaattgataagactaccctgcagccactgttatcacgcagattgcataactcgttggcttaagatcaacaaggcatgcccagtctgcaacgaggaggtgtttggatgaactgcaaggttcctggcagatgctgcggtttcatcgttacttgcttgcggcatgcttttgagaagacgttggacgcataaggtccattgtttgtgattatgttgtgagcctagtttggtgccctttgcttaagaggactggctctgcccatgcatgggtcggtctacacgtgtgctagtaactggaccaggtcgcgttttgtgatgcgtctatccatcttggttttatcacaaattgatagatctgttgtgtgggtagtttggttgccgttttctgaatataatggatggtgtttttgcccc

SEQ ID NO: 3007 - DNA, 1894 bp, Zea mays
  Clone ID: 700239551_FLI
gccgccgttttgcctcgccgttctgccgcgccatcgcatcgtccgcgctccctctcatcgttcttcccccggtacggctcgacggagggcgtgggcgctggagttgcggctcggaggccgaggcgccgggtggtgcgttgggtgcgctcggttcgggagatcccggactttgctgctcgcgcggtcagacagggagcgccggaggaggaggaggctgtgcaagtgcaagctgtgctgaactaagggttctggcttcggactctgtgtacgcgccgccgcaggagggagctggagatgtacgggccgccgtcccgaggcggcgggggagccggcgctgccggagagcagccgagggtttaccaagtttggcgaggaagcaacgagtttttcttgcaaggccggttcatatttggacctgatgtgagatccttgtttctcaccatattccttattcttgcaccagtggtggtcttctgcatatttgtggccagacatcttatcaatgactttcctgatcattggggagtttcagtcatggtcatagtgattgtcttcacaatatacgatttgacactgctccttcttacctctggtagagatcctggtatagtgcctcgtaacacccatcctcctgaacctgaagctattgatatgcacaatgatgctggaaatggtcagacaccacaacagttgcggttgccacggacaaaggatgttatcgtaaatgggaccattgtgaaagtcaagtactgtgacacctgcatgctgtacagaccacctcgatgctcacactgttctatctgtaataactgtgtggagcactttgatcaccactgcccttgggttgggcagtgcataggattgcgcaattatcggttcttctatatgtttgtattctctacaacattactgtgtctctatgtatttggcttctgctttgtgtacattgtcaagattaaagacgcagagcagtcgacgttctggaaagcaatgttaaagaccccagcatcaatcgttctgatcatatactgcttcatctgtgtgtggtttgtgggtggtctgtctgtcttccatttctatctcatgagcactaaccagacaacctatgagaacttcagataccgctatgatcggcgggacaatccgtacaacagagggaccgtgaacaacttcatggagatattctgcacctcagtcgctccttccaaaaacaatttccgagctagggtcccagcagagcaaggtttacagcaagcacgtgcgccagcaaggggtttcatgagcccaaacatgggtaaacctattggggaacttgaattgggcaggaagccaatatcgtgggatgaacctcggtcagcagctgatattagagacttggaggttggtctaggcagtctactggacgagaaggaaggcagagtagcccatgcatccccggacctgagcagagaagcccttcctgagcttgtggaagggagggctggcatgcattcgaggcggtcaagctggggtcacagaagtgggacctcggcctccatggacagccttgctgtgcaaatggggaccgcagattctcactggggctccattagcagtgtccatggtacaaacagtggagctcactagcaagccgctccacgtcttgacgcgtctctttgtgtaaacctgcctgataccaccaactaagaagcaacctttgcgtgctctgtgcgcctgtgcttccgctccacctaggatatacgtctgcagtgctttcttactcagcgccctgggagagcgcatcagttcttctggtgtgcttcccgtttggtgtcctaagcaaaaataatagaggtaccatttaactccttattagttgtttggaccatcactgtatatagatatatattattgc

SEQ ID NO: 3008 - DNA, 752 bp, Zea mays
  Clone ID: 700239558_FLI
ctttctgggactttaggttacgtggctccagagtacctattagatgggaagctgactgaaaagagcgatgtatacgcatttggagtggtgcttcttgagctactaatgggaaggaagcctgtcgagaagatgagtcaaactcagtgccaatcaattgtgacatgggccatgccgcagctgactgacagaacgaaactccccaacatagttgacccagtgatcagggacacgatggacccaaagcatctgtaccaagtggcagcagtggcggttctctgtgtgcaaccagaaccaagttacaggccgctgattactgatgttctccactcccttgtccctttagtgcccgtggagctcggagggacgttgagggttgcagagccaccttccccaaacctaaaacattctgcttgttgagatgtcatggtcggtcgaagatgacagttacgtgctgatgagcttggacgatgcttatcagtaacttatcactctagctgtgtgccagaggatgacggttccaacctgccggtcgctgagaattctggtttgcaaagagttgtctcctatgtctttgcttgtacaaagaagtgaaagaagcaacaccctttcccttagaatttagggtccttctgtacagatcaaagtttctccaacactataacataaagaatttgagaacgacgtgcataaagaatttgagaatgacgtgctttgggttccacaggggtacccgagcacctttgctttgctgc

SEQ ID NO: 3009 - DNA, 1262 bp, Zea mays
  Clone ID: 700239581_FLI
tttcccagccaaagaaccagcatcctggttgtgaaaatggggggtgtgcgtagctacttcttcatcatcgccgccgcggtcgttgccgtcgtcctcgcgcttctcccggccggcgccacaggtgccggcctcaaggtcggcttctacagcaagacatgcccgtcggcggagtccctggtgcaggcggtggctgccgccttcaagaacaacagcggcatcgccgccggcctcatccgcctgcacttccatgactgcttcgtcaggggctgcgacggctcggtgctgatcgactcgacggcgaacaacacggcggagaaggacgcggtcccgaacaacccgagcctgcggggcttcgaggtcatcgacgccgccaagaaggcggtggaggcacggtgccccaagacggtgtcctgcgccgacatcctggcgttcgcggcgcgggacagcatcgcgctggcggggaacaacctgacgtacaaggtccccgcggggcggcgcgacgggcgggtgtccagggacacggacgccaacagcaacctcccctcgccgctctccaccgccgccgagctcgtcggcaacttcacgcgcaagaacctcaccgccgaggacatggtggtgctctccggcgcgcacaccgtcggccgctcccactgctcctccttcaccaaccgcctctacggcttcagcaacgccagcgacgtcgaccccaccatcagctccgcctacgccctcctgctgcgggccatctgcccgtccaacaccagccagttcttccccaacaccaccaccgacatggacctcatcacgcccgcgctgctcgacaacaggtactacgtcggcctcgccaacaacctcggcctcttcacgtccgaccaggctctgctcaccaacgccacgctcaagaagtccgtcgacgccttcgtcaagagcgaaagcgcgtggaagaccaagttcgccaagtccatggtcaagatgggcaatatcgacgtgctcacgggcaccaagggggagatcaggctcaactgcagggtcatcaacagcggcagcagcagctctggattattccagcttcacacggcaaccgcctctgacgaggaattcgcccacgttgcaactaactagcagctactatatctctatccgtagaggatctagtgatctactgctactcagtgaccatgttcttcgatgttacaattagttccactacctgaatccagcttttacggagtgctcgacgctttgccgagtatattttgtcg

SEQ ID NO: 3010 - DNA, 1334 bp, Zea mays
  Clone ID: 700239608_FLI
aaggaggcggggccgagtagcagggcggtgttggtgacgggcggggcaggctacatcggtagccacgccgtgctacagctgctcaccgcgggcttccgcgtcgtcgtcgtcgatagcctcgccaactcctcagagctcgtgatccgccgcctgcgctcgcttgcgggggaacacgctaaaaacctcgcgttccataaggttgatatccgtgacacagatggattgaaaaaggtttttgcttcgacaagatttgatgctgttattcattttgctggactcaaagctgttggagaaagtgtacaaaagccattgctttattacgaccataatgttgttggcacaataaatcttctggaagttatggcggctcatggatgtaagaagttagtgttctcatcatcagctgcagtttatgggtcacctaacaacccaccctgcactgaagattttcctctcactccacataacccatatggaagaaccaaagtactttaatccggttggggctcaccccagtggataccttggtgaagacccatgtggaacacctaacaaccttatgcccttcgttcagcaaattgctgttggcaggaggccatcactaacaatttttggaaataactacgcaacaaaggatgggacaggggttcgtgattatattcatgtggttgaccttgctgaaggacatcttttcgcattaaagaagctttttgaaagctcatctaacataggatgtgaggcgtacaaccttggaaccggaaaaggaacatcagtgttggagatagtcaatgcatttgagaaggcttctggaaagaaaatccctttggtcatgggtcaacggcgtcctggtgatgctgaggttcttttttcatcgccggcaaaggcggagagagagctgcactggaaagcaaaatatggcatcacagaaatgtgcagagacctgtggaactgggctagcaagagcccttatggatacgcggcatctgagtctcccaagctgaatggcagttcacgctgagcaacacgattggtccttgtggaatcacttgtacatgagacagtagtgcctaccaggataaatgtagatctagtagggcagtcatacagagaaaagttctataggcctaggaaagaaatgttatcttgctgtccttagcataagctcctatagtggatcttccatatgcttatagtttatgaaaattgttctaggagcattgctgtagtcaagcagctaattcgattcttctatttcttgagttgtgttgcctaaaatagagcatgatatagatataattatcacaagaagttgcacatcatacaattttttttgg

SEQ ID NO: 3011 - DNA, 2168 bp, Zea mays
  Clone ID: 700240214_FLI
gtttgacaaggccaagctcttgtgaaatggaggaagatgcaggccatgatttactgagggcatcagtgctcgctttgtttgtttctgactgctttggtggttgtgaccgaagcgcttctcttgggagaacacgtagagctattgttagcttgaggaaggagcagccttttgtttgtacttgttctgctgggaacttgggcgacaacaatgaagctaagcagaccaatattctttctgggcactttgattttgctggtttgtgtaatagatcaatacatctcatcaaggaaagaagaaattcgggtattgtacctataggttcactgcaattaggtgtttgtaggcaccgagctgtcctaatgaagtatttgtgtgaccgggcggatcctccaattccttgtgagcttgtgaggggccatcttgactatacacctcatgcttggaacattgttcctgttaaaaagaggaatggctgggtaaggatgattgttgatgcttgttaccccaccaacataaaggaagagacagatccagagtacttttgcaggtatataccactcagtcgacttcaaattgtgctcgatgatgagggctatactcctcggtgctctttcccatctgtgtcatcatgcaaagaaattgaagttacaccttctagttctgtctatcactgtaaaattggtgctgttgatgctgctgcaaagatacgatatctggatactcgtagggtctcaaatgatgaagttaaactttttgaatacaagcttctgggggaagtaaggatgctgggtgcgctaaggaagcacagatccatagtggacatatatggacaccaactttcatctaaatgggttcaagtcgacggtgataaagaatataggatattgcagtctataattttaatggaatatgtaaatggaggttctcttaagggatatttgacaaagctactgaaggagggcaagaagtgtgtccccattgatctgtcagtttacattgctcgggaagttgcttgtgcattgttggagatgcacaagaagctagttattcacagggacataaaaagtgagaatgttttgattgatttggaccccaagaggaatgctggtgcacccattgtcaaactatctgattttgacagatccgttcctttgtattctttgtcccatacatgctgtatatctcagcttggtacacacccacctgatgtttgtgttggaacaccttgttggatggctccagaggttgttaaggccatgcatgaaaaacaccactatggactggaaatagatatctggtcatttggatgttttttattggagatgcttacgcttcagatgccttaccagggactttctgacactgaaatatatgatctgatactgaggaagaaacagaggccaaggctaactcaggaactagaagcattctggacaatggatgagccagctacgagactcaagttagggatcacatctgatgctcatgcagataaattgagacacctgatagatctcttctaccagtgtaccagaggacatgcatccaggcggcccaaagctgtgcaaatttacaactcactgtgctccttgcccacatgttacgacatgaggtgaacgttctgatactgtatgaacgcgaaacttgatgcagaagtgcaggggaagaaggtcaaggcaggacatctagccagcctcagagggtttggtgctctaacccgaacatttcaccgtgagttggccttcaggtgctgccaggcagaacatgagaagtgggaccaaggctagcggctgtggtcgccagagctcctcctgagttggtcagttttgtagcggcacggcatctgcgtccacttgtagtcatcatcagttggtcagttttgtagtggcacggcatctgcgtccacctgtagtcatcatcatgtatgtgttatcacatccattgtttccccttttcatggttgctgccatcccaatggggtttaagttatcaaattaggtcattggtgccccaggggcatttgtctgctagaccgctgcatttacttctctatgtgtattgtattgtttatatctgtttagaaaaaaatgactgttgtccatgtaacaattgatgacatctgctatgtgttattgcgaggttatttgtttatgctgattttaccagcc

SEQ ID NO: 3012 - DNA, 1034 bp, Zea mays
  Clone ID: 700240552_FLI
cacacactacgacccagtcagcaactcagccatggggcaggctagtagggctcatcagctcctagcctccctggcggctatctacgtcaccctagccatcagtatcacccagcagcagcatgtcgccggcaacatgaccgacgacctcgagataatgtggggcaacgcgaaggtcgtcaccgacggcagcggccagcaggccatcgcgctggctcttgaccgctcgacgagctccgcgttccgctccaagaagacgtgccagttctgcagggtggacatcgagatcaagctcgtccctgggaactcggccggcaccgtgaccacgttctatatgataaccgagaacccgtggcagttccacgacgagatcgacatcgagttcctgggcaacagcagtggccagccctacaccatgcacaccaacatgtacgccagaggacagggcgccagagagaagcagtacaagttcgacttcgaccccactcaggagtaccacaagtacaccatcatctggaacaaagattggatcttgttccttgtggacgacaagctgtaccggcagatcaagaacaaccagatagacggcgccccgtacccgtactactacccgatgagggtgtacgccaccatctggaacgccgacgagtgggctacgcagggcggtcaggtcaagaccgactggtcgcaggcgcccttcacggcgtacttccggaactacagggccatctcgtgcaactcgttcatggcctcccctctgtgcctcccaggctccggctggttcgaccagcagctggacgagtcgcggaagcagcagctggcgcaggtggactccagtaacaagatatacgattactgcaccgactccaggaggtacaagaacggcctcccgagggagtgccaggtacattaattagctgcgaagtgtgtgcttcagcaactgaagaacgatcgagaggttgtgttggggtgattattgagtgattcggcaacattcttttaattatataaggaattttctacggtacccttaagag

SEQ ID NO: 3013 - DNA, 626 bp, Zea mays
  Clone ID: 700240561_FLI
atcgccatctcttctcttcttttgctcgctctatacatataccagagaggtaggtagttagctagctagtggtgaaaatacaatggcgcagcggcagggaagaggcagtggtgctgtggcccttgcggcggcggcggcggtgctcctctgcgtgctccttcatgcccacgtcgcggagtcggccgtgttcaccgtcggcgaccgtggcggctggagcttcagcaccggcacctggactaatggcaagcgcttcaaagctggggacgtcctagtgttcaagtacgactcgacggcgcacaacgtggtggcggtgaacgcggccggctacaaaggctgctcggcgccgcggggtgccaaggtgtacacgtccggcaacgaccgcgtcacgctggcccgcggcaccaactacttcatctgcagcatccccggccactgccagtccggcatgaagatcgccgtcaccgccgcctgagtcctgaccgatcgcggctgccgccggcacgcctgctgccgcgggctacatacatctacctatcgactgcctgattgtcagtttgactggcttgtatcgactccctgattgttatatatatatgaataaaacacaccatcatgattcgatgcgt

SEQ ID NO: 3014 - DNA, 1074 bp, Zea mays
  Clone ID: 700240564_FLI
ggcgctgccgtggtacaccccgtacgtgtacaacaacccggtcggccgggtggtgcacatcgtggtgcagctcaccctcgggtggccgctgtacctggcgaccaacgcgtcggggcggccgtacccgcgcttcgcctgccacttcgacccctacggccccatctacaacgaccgggagcgcgcccagatcttcgtctcggacgccggcgtcgtggccgtggcgttcgggctgtacaagctggcggcggcgttcggggtctggtgggtggtgcgcgtgtacgccgtgccgctgctgatcgtgaacgcgtggctggtgctcatcacctacctgcagcacacccacccgtcgctcccccactacgactcgagcgagtgggactggctgcgcggcgcgctggccaccatggaccgcgactacggcatcctcaaccgcgtgttccacaacatcacggacacgcacgtcgcgcaccacctcttctccaccatgccgcactaccacgccatggaggccaccaaggcgatcaggcccatcctcggggactactaccacttcgacccgacccctgttgccaaggcgacctggcgcgaggccagggagtgcatctacgtcgagcccgaggaccgcaagggcgtcttctggtacaacaagaagttctagccgccgccgctcgcagagctgagaggacgctaccataggaatgggagcaggaaccaggaggaggagacggtactcgccccaaagtctccgtcaacctatctaatcgttagtcgtcagtcttttagacgggaagagagatcatttgggcacagagacgaaggcttactgcagtgccatcgctagagctgccatcaagtacaagtaggcaaattcgtcaacttagtgtgtcccatgttgtttttcttagtcgtccgctgctgtaggctttccggcggcggtcgtttgtgtggttggcatccgtggccatgcctgtgcgtgcgtggccgcgcttgtcgtgtgcgtctgtcgtcgcgttggcgtcgtctcttcgtgctccccgtgtgttgttgtaaaacaagaagatgttttctggtgtc

SEQ ID NO: 3015 - DNA, 1561 bp, Zea mays
  Clone ID: 700240618_FLI
gcaaagctattggagatgagcttggcgatatatatgattatgttgcaccatgctttcctcctaggtatgaaattttccagctcatggtaaacctgtatactgagagattcattcagatgcttcgacttctcagtgatagagcaaacgatattcaaaatataaatatcctgaaggtgactggttgggtcgtgcaatatcaagaaaacttgattggtcttggtgtggatgaatcacttgcccaagtttgttctgaaagtggtgcattggatcccctcatgaacatgtatgttgagcgtatgcaggcaacaaccaagaaatggtacagcaacattttggaggctgacaaaacacaaccaccaaagagtacagaggatggaaaactatatacacctgcagcagtggatctattcagaatattgaccgagcaagttcagatagttagagacaacagcacagacgtcatgctatatcgaattgcacttgcggttattcaggtcatgcttgattttcaagcagctgagaggcaaaggcttgaggagccagcttctgatgttggtctggaatctctatgtgcattgattaacaataatctgcgttgctatgaactttcatcagagctaagtagcagtacattggaggcgcttccacaaaactatgctgaacaggttaattttgaagacacctgcaaaggatttcttgaggttgccaaggaggccgtcctccaaactgttagtgttatttttgaagacccaggtgtgcaggatctactcgtgaagctttaccagaaagactggctggagggaatggtcacagaatatcttgtcgcaacatttgctgattactttggtgatgttaaaatgtatattgaagaaagatcatttcgaagatttgtggaggcttgcatagaggaaacaattgtggtctatgttgaccatctcctttctcagaaaaactacataaaagaagaaacgatagagaggatgaggttagatgaagaggtgcttatggatttcttcagggaacacatcaacgtgacaaaagttgaaagcagagtgcggattctggcagatatgagggagctagcttcagctgagagtttggatagctttactctcatttacactaatatactggaacatcaacctgattgcccgcctgaggttgtcgagaagcttgtggcaatgcgggaaggcattccaaaaaaggaagcgaaggaggttgtacaagaatgcaaagagatatacgagaactcgcttgtggatggcaaccctcagaagtccggttttgtgtttggcaaattgaagtgcttgacagcaaagaaaggcatatggaggaagcttgggcagtaagtgtggacttgagcagagtggacagaagtaccacctaggcaaagactgtacgtttcacttctctatgatcattcttttgttcttttgtcgatgctactgttgggtttcacgtttagactatcagtgtgtactcagcttgaggagcaaaaatgtatattccactttgcttagctacagaggattttggtgtaagaatatgtaatttattcaat

SEQ ID NO: 3016 - DNA, 1228 bp, Zea mays
  Clone ID: 700241578_FLI
aaagataggaacactaaacgggacatcaggaaagagctcaaaacgcttgcaaaagaggagagaaaacgacagcagcttgcagtcactgatgtactgaaaaatgcagatgttgtgctgaccactctgactggtgcatcttcgaaaaagttaaacggaattacatttgatttggttgttattgatgaagctgcccaggcacttgaggtggcatgctggatagccttgttgaaagggccgagatgtattcttgctggagaccatcttcaacttcctccaacaattcaaagtgttgaggctgaaaagaaggggatgggaaagacactctttgaacgccttactgaagcttatggagaggaaatcacatccatgctcactgtgcagtacagaatgcacgagcacattatgagctggtcatctaaagaactttacaataataagatcaaagcacattctagtgttgctgggcatatgctctatgatctagaagaagtcactagatcttcttcaacagaaccaactattgtactcattgacactacagggtgtgatatggaagaagtaaaagatgaagaggagagcaccatgaatgagggcgaggcagcagtatccattgctcatgccaagttgcttgttgagagtggcgttaatgcttctgatattggaataattacgccttacgctgcacaggtaacctgcttgaagatgatgagaaacaaagatgccaagttgaaagatttagagatatctacagttgatgggtttcaaggccgggagaaagaagccatcatcatttctatggtccggtctaactcaaagaaagaggtggggttcttgagcgatcacaggcggatgaacgtggcggtgacgcgagccaggaggcagtgctgcctggtgtgcgacgtggagaccgtgagcagcgacaggttcctgaaacgcttggtcgaatacttcgaggagaacggggagtacttgagtgcttcagaataccagagcagctgactggcgtcgatcagatccattcagctcttcttctagtggctcgtggtggcatctggctggcatgtccgtggagcaagtggataggatccgcatggagtcttggagaacacaatatcaagctttggttcctagatatctcagcttttcttttcttttcttttctcttggtgaacgcataaatgatgtattgttgtgacgttgccaatgccatgggaatgagatatttaac

SEQ ID NO: 3017 - DNA, 943 bp, Zea mays
  Clone ID: 700242305_FLI
ctcacatatgaacaggcctacacatatctagacgaagcacacagtattggagctgttgggaaaacagggagaggtgtttgtgagctgctcggagtggatccagctgatgttgacattatgatgggtacattcacaaaatcatttggatcatgtggaggttacattgcagcatcaaatgagattattcaccatctaaagcatacatgcccagcccatatttatgcaacatccatgtcacctccagcagtccagcaggtcatttcagctataaaggtcatccttggggaagatggaactaacagaggggccaagaagctcgctcaaattcgagagaacagcaatttcttccgctcggagcttcagaaaatgggttttgaggttcttggagataatgattcacctgtcatgcctatcatgctttacaatcctgctaaaattcctgcattctcaagggagtgcctgaggcaagctgttgctgttgttactgttgcatttcctgccacgccacttctacttgcgagagctaggatatgtatctcagcttcccactccagggaagatctcataaaaggattggaggttatcagcaaagttggtgaccttgtgggtatcaaatacttcccggttgagcaagaaaagaccacggctgttgaaaatctgaagaaaattcaatgaacaatggcaagaactctgaagctgttgtagggtcatcttagtgtgcatcgcatgcctcagtttggcccttctgtgcacctctgggcccttttttgtccttctgtttgtggagaaatttagactttgtacagtatgtatcatccaccatagttgaaaatataacgggcagatagacattgtcatcgaattcggagaagtaatttttccggtcaccactttaaaccatttagactatgtgactgaaaccatgtagatattattatcgatc

SEQ ID NO: 3018 - DNA, 867 bp, Zea mays
  Clone ID: 700242337_FLI
ggccaagaaggtggtgctgaagctggacctgcacgacaacagggacaagcagaaggtgctcaaggcagtctccactctccacggtatcgactccatcgcggtggacatgaaggagtccaagctgacggtggtcgggctggcggaccccgtcgacgtcgtgggcaggctgcgcaaggtcggctccgccgccatcgtctccgtcgggccggccacggaggagaaaaagaaagacggcgacaagaaggaggccggcgacaagaagggcgacgacaagaagcccccgccgcccccggtgtacccgtacccgtacccgtggcacgcgtacgccgccgcgcagtaccagtaccagtaccacccccggccgtacccgccccagtacgtcgtccacagcgccgaggaggaccccaactcctgcgtcatctgctgatctgatgccggcgtggcgcagcagtcaccatcttctttttttgcacattcctatatttgttgttgttggcctgcttgcctacctgctcgatcgaccgccacgtcgtcggtgatcgccgggaccggggcgggtgtggtggttggctgctccgctcgtctctatgctggcggtggggttggtcgttggcccgtgtccgcaggtcgttgcaatcatgcaggcgatccatccaaaagtacttgttgccttgtcggggttctcaggctgctgaccagcgtggtcgcgtagtgtgcatgcggttttttgtccttggctatttgcctattcggggtgtttgaggcatgaaactttatatatagagagagagagatttataaagattaattgaccttgtaatgtaaattataacttggagatgtccgatgcgtggtgacgagtttatt

SEQ ID NO: 3019 - DNA, 1765 bp, Zea mays
  Clone ID: 700242342_FLI
gggatctcggtctcctctctcctccctctcttggggcatggatcgcgccgccgcatcgccgcccgccgtggaggaacccgtcagggccacctccgttctcgacagcctcggcgcggaggtgctggcggtcatgtccccggtctccatctgcatggccctcgtcgtgctcctcatctccctcctctcgccgccgtcctccgggtccgcggcgggttcgcccccgccagtcaccgctgccacactcgtctacctcgagtcccctaacgactccccgggccagaagctcctcggggcgcttctcgacgccgccgtcttcgttgccctcgtcgccgctgtcaccttcgtcctcgtcgcgctctattactaccgctgcacgggcttcctcaagaactacatgcgcttctccgccttcttcgtcatcttctccatgggaggcgccatcgtagccgccgtgctccgccgcctcggggccccgctcgatgcggccaccgtgctcctgctcctcttcaacggcgccgctgtcggggtcctctctgtcttcgcctccgccgttcccatcctcgtccgccaggggtacatggttgcgctcgccgccatcgtcgccgcctggctctccaggctccctgagtggaccacgtggatcatgctcgtcgcgctcgccctgtacgacctcgtcgccgtgcttgcaccccggggaccgctcaggatgcttgtggagctagcctcctccagggatgatgagctaccggcactcgtctacgaatctcggcctactgtcggtccagccactagttcttcctcttatgcttcagtcatggggtctgtggagatgcaaaccatgtcagattctggtcagatctgtggcaatcgatatgaccgggtggagcaggaggaatatgccagccacgcctccttggaaatgagggatcttggaagaggccgatcaagcgttggtgagatgaaccgaccgagaggtcctgtgcttcaaatggagaaccttgaaagggaggtaccagcgacttcagcagagctgacggcaaatcaaggtgggggttcacagcatgccatcattcaaattgaacaacctgacgaagaagagacatcacctttggtgtctgcaccctctaccaacactgcagcattggatgtggaggagcatagacaaagttcatcgtcagagcctctggattttgagatgtttgagtctaccaggggcatcaagctgggccttggtgattttgttttctacagtgttcttgttgggagagctgccatgtatgatctgatgaccgtgtatgcatgctaccttgccatcattgctgggcttggttgcacccttatcttgctttccatatgccggcacgcacttcctgcactcccaatctctattatgctgggagtgacattctacttcttgacacggttgctgatggagccatttgtggttggtgcttcaacaaatttggtgatgttctgacttttcactgatctgctgttgcatttacatgtggatgaagccctcaaccaaaagaaagttgttggtcagcaactcagcattctatgtgagagtgactaatattttgttggttacttatcgtaaactgtcatttgtatttattgctaggagtgctcaagaccatagactccgtggtagcatcatagatagatttagctcatgtcttgtagttccatcaacctaacatggtattcgagaagagctattctacattctgaataatcaagtaattgatcatccattaggcct

SEQ ID NO: 3020 - DNA, 1723 bp, Zea mays
  Clone ID: 700261008_FLI
gctcggcgtcttcacaaacgccggcgcaaactctcgcccgagcccgacagatcttcaattccccattccgcccaccgatcgaccttcacgccagtctcggtctcttccgaaggcgtcgcgcgcggttgtttgagaggagaggaggaagatgagggagtgcatctccgtccacatcgggcaggccggcatccaagtcggcaacgcgtgctgggaactttactgcctcgagcacggcatccagcctgatggccaagtgcctggagataagaccgcgggacatcacgatgatgccttcagcaccttcttcagccagactggtgctgggaagcacgttccccgtgcaatcttcgttgatctagaacccactgtgatcgatgaggtgcgcactggcacgtaccgccagctcttccaccctgagcagctcatcagtggcaaggaggatgcagctaacaatttcgcccgtggccattacacaattggcaaggagattgttgatctgtgccttgaccgtatccgcaagcttgctgacaactgcaccggcctccagggcttcctggtcttcaatgccgttggtggtggcaccggctctggccttggttctctcctccttgagcgcctgtctgtggagtacggcaagaaatccaagctgggcttcactgtgtacccatctccccaggtgtcaacctctgttgtggagccttacaacagcgtgctctccactcactcactgctggagcacactgatgtctccatcctgctcgacaacgaggccatctatgacatctgcaggcgctccctcgacattgagaggcccaactactccaacttgaatcgccttgtgtctcaggtgatctcatcgctgactgcttctctgaggttcgatggtgccctcaatgtggatgtgaacgagttccagaccaacctggttccttacccgaggatccacttcatgctctcctcctacgcaccggtgatctcttctgcgaaggccttccacgagcagctgtctgtggcggagatcaccagcagcgcgttcgagccggcttccatgatggtcaagtgcgacccacggcacggcaagtacatggcttgctgcctgatgtaccgcggcgacgtggtgcccaaggacgtgaacgccgcggtggccaccatcaagacgaagcgcaccatccagttcgtggactggtgcccgacggggttcaagtgcggcatcaactaccaggcgccaactgtggtgccgggtgccgacctcgccaaggtgcagcgtgccgtgtgcatgatctccaactccaccagcgtcgtcgaggtgttctcccgcatcaacagcaagttcgacctcatgtacgccaagcgcgcgttcgtgcactggtacgtcggcgagggcatggaggagggggagttctccgaggcacgcgaggacctggccgccctggagaaggactacgaggaggtcgccgcagagggcggcagtgatgacggtgacgaggaggaggaatactgatctgcttgcatgaatctgtttggctgtcgagccaggttgtggtgttgaaaaacctttgtttgtgtcctggccccctgggtaatgtttgggtgtttccttccatcatcacttgctgaactgctctagtatttgcatttgtaattgaagtctgtcgctttaagcactcttggttctaaagttctctgtgcttttggggggtgtttttgcattgccccaaatccc

SEQ ID NO: 3021 - DNA, 752 bp, Zea mays
  Clone ID: 700262255_FLI
gtcaccaccgctctcgcgtcgccgccgccttcctccttcccctgcgattacaaaaccctaggacaattctccaccaattcctataatccctcgtcgctaggtagttcctgcgtctccatcccgatccccttgtcgattcagttgtaatcaggatgcagcccggatcggccccggcggccggcggcaccggcatgttcgtgccggcggcgacggctggcacggtgctctgctgcatgtgcggcgtgtccatgcagcccaacccggccaacatgtgcgcgcgctgcctgcgcgcgcgcgtcgacatcaccgagggcgtcccgcgccacgccgccgtggtttactgccccgactgctcctcctacctccagccgccgcggtcctggctccgcgccgcacccgagtcgcccgagctcatgcagatcctgctccgccgaatcaaccgcccgctcgcgcggctccgcgtctccctctccggcgccgagttcgtcttctccgagccccactccaagcgcctccgcctcaagctccgcctccgccgcgaggtgctccacggcatcgtcctcgagcagacgcacccagtggagttcgtcgtccacgaccggttgtgcgactcctgctcccgcgcgcaggccaaccccgaccagtgggttgccgtcgtccagctgcgccagcacgtgccccaccgccgcactttcctctacctcgagcagctcctcctcaagcacggccaggcttccctcgcgatccgagtc

SEQ ID NO: 3022 - DNA, 1763 bp, Zea mays
  Clone ID: 700265564_FLI
aaaggactgccctaacctcgtgcagtcgtgcccgcttgtttcccttgctcgccttcacccctcgccgccgccgccgccgtcgccgtcgcaagcgacgatgctcgacatcaacttgttccgcaccgacaagggcggcaacccagaccttattcgcgagtcccagcgcagtcggttcgcctccgtcgagctcgtcgacgaggtcatcgccctcgacaaggcatggcgcgaaaggcagttcgagctggacaagatccggcaggagctcaacgctaccagcaagaagatcggcaagctcaaagccagcaagcaagaagaggaagcgaagaagctcatggagagcacagacgaaattaagaaaaggttggcagccaaagaagttgaggtgcaggaggccaagagcaccctcgacgccaaggtcacgacgattggcaacatcgtgcatgagtccgtgccagtcagcgacgacgaggcaaacaataaaattgtacggacatttggagagaagagagtagaggataatttgaagaaccacgtggacctttgcaggatgcttgatattgtcgcattggaaaagggtgctgatgtggctggtggtaggggtttctatttaaaggacgaaggtgtcctccttaacctggcattgataaattttgggctagcttttctgagaaaacggggatttaaaccaatgcaaactccttttttcatgagaaaggaaactatggcaaaatgtgcccagttggcccagtttgatgaggagctttacaaagttacaggtgatggcgaggacaaatatctcatagctacatcagagcagcctttatgtgcttatcacttaggtgatcgaatctaccctgctgaacttccaatcaaatatgctgggtactccacatgcttccggaaggaagctggttctcatggaagggacacagctggtatcttcagagtccaccagtttgaaaaaattgaacaattctgcattacaagcccaaatggcaatgattcctgggagatccatgaagagatgctaaaaaattcagaagatttctacaaggagattgggctaccataccaagttgtttccattgtctccggtgctcttaacgatgctgctgctaagaaatacgatttggaagcatggttccctgcatcaaagaccttccgagagttagtatcctgttcaaattgcactgactttcagtcaaggagacttggaattgggtatggccagaaaaagaatgacgagcagtccaagcagtttgttcatatgctgaactctaccttgactgccactgagaggaccctctgttgcatcctggagaatttccagaaggaggacggcgtcgaggtgccaaaggcgctgcagccttatatgggtggaatagagttccttcctttcaagcaacctttggatgccaaacaagctgctgactccaaatcaaacaagtccaaatcaaagggaaatgctgcttgagttggacgaggaacagactggaatgcaaatgcacgtgcaggttgcaaattcttatttatgttaatttttggggcctatcagtacacagtactcatagcatgacaaatggcgttgcaggttttggtttttacccgttttggtttcctggttgccgcattctctgacgacccacttggcacacttgtattgcaatagcatttcttgaaatccggaatgcttggccaccaccgccagctcaaccgggctgtgtttatcgcgttgccacagaacgcctgcttgtctgtctccg

SEQ ID NO: 3023 - DNA, 1884 bp, Zea mays
  Clone ID: 700265640_FLI
ttccgcgcagatgcacgtgagccgcccgggacggccggccggccggtcccagcagggccattgcccttcttctttcactagctcggcctcgcttcatgggaatgggaatgaagtggggagcgacgaaagccatgacacaattgaagctactctcgtctcgtgtctcgttgccgttatttaaacaccccttatctttccctcaggctcaaaagccttgcccttccctgctctgctcctcctcgttctctgtgatgctgaggctaaaagctctcaccttcctgctcctgctcctcctcctcgctctctgctccggcgttcatctgtgcgacgcgaggagcggcacgcgctggagtcggacgacgcgaggcggtggtagcggggcggcaccgtccgcctccgctgctgcgatcgggaggaaagggaaagcgagaagcagcggctcctcccacaggcaaagcggcgaagggagtcggagcccgaccgacggcgaccccgtgcagggcgacggaagccaggctccaccaccacaggatactacggtcttcagcgtggtggagttcggagccaagggtgacggcgttacagatgacactcaggcctttgaagcagcgtgggcagcagcgtgcaaggtggaggcgtctacggttcttgtaccatctgggctcgagtttgtcgtgggcccgatctcgttctctgggccttactgtaaaccgaacattctgttccagctagatggaactattttggcccaaaccagcgcaagagcatggggctctgctggtctgttgcagtggctggagttcacgaagctaaccggaatcgcggtccaaggcagcggtgtgataaacggcaggggccaggactggtggacgtatgcagacccaaacgatgccgacgacgagtctgtggagatgctgctgccacggactaagcccacggcgctgaggttctatggcagctccaatgtcacggtagctgggatcacgatcgtgaacagctcccagtgccacctcaagttcgacagctgcgagggcgtcatggtccacgacctgagcgtctcgtcccccgaggacagtcccaacaccgacgggatacacctgcagaactccaggggagtcgacatccaccacgcgacactggcctgcggcgatgactgcatctccatacagacggggtgcagcgacgtgaacatacacagcgtgaactgtgggccagggcacgggatcagcatcggtggtctagggaggttcaacacgaaggcgtgcgtgtccaacgtcaccgtacgagatgtcaagatgttcaggacaacgacgggtgtcagaatcaagacatggcagggcgggtcggggctggtgcagggcgtgaggttctccaacatccaggtcacggaggtgcagacgcccatcatgatagaccagttctactgcgacagggcgacgtgcaggaaccagacgtcggcggtggccgtctcgggcgtccagtacgaggacgtcaggggcaccttcaccgtcaggcccgcgcacctggcgtgcagcgacagctcgccctgctcggggatcaccctcgccgggatacagctccagcccctgccgctgccgcagcaccgccgcctgtcgtacgaccccttctgctggcaggcgttcggggagctgtacacccccaccgtgccccccataccttgcttgcagatcggcaggccggcagcagggaacagcgtgctgtccgacggcgacctttgctgaaacgccgatcggttcatcagttaagctaaggcggtcgtcgtgatgcttccgacccctgctttgcacgatgtggattgtggagtgtcagttgatgatgcatcatgcatgcatgcgtacgtgggatacttgaggccgatttatt

SEQ ID NO: 3024 - DNA, 1584 bp, Zea mays
  Clone ID: 700265656_FLI
caaaggcagacacaatcaagaaactctggaatgcagacccgaagctcagcaaaatccacagtgactagggaaaccagcagatatgacccaacgactcccacttcaaatagagagatgcctccagctgcatttcatcaaaggagagaacttctgagctacgagcaactttgttgcctcgatgatgtcaattttgccaatgctgtcatctttggcaacaaaagctttaggcccctgcagtacgaagcttgcagggctgcaatggataaccaagactgtttcgtacttatgccaactggtggtgggaagagtttgtgttatcagctccctgcaacattgcacccaggtgtcactgttgtcgtaagtccgctgctgtcgctgatccaggatcagattgtggcattaacttacaggtttgcagtaccagcagcattcttaaattcccagcaaacttctgctcaggcatctgcagtaatccaggagctaagatgtgggaaaccagccttcaaacttctgtatgttactcctgaaagaattgtcacgaactattcatttatggagaccctaagaggcttagatcagaggggactgctagcaagatttgtgattgatgaagcacattgtgtaagtcaatggggacacgatttccgtccagattaccgtggtctaggttgcctcaagcagaacttccctagggtcccgatcatggctttaactgcgacagcaactgaatctgtccgtaaggacgtcctcggtgccttgaggatccccaacgctgtggtactgaagaggagcttcgacagactgaacctcaactacgaggtaatcggcaagacgaaaactttccagaagcagctgggcgatctcctgaaagagcgcttcatgaacgaatctggtatcgtgtactgtctctcgaagaacgagtgtgcagacactgccaagtttttgagggagaaatacaagatcaaatgcgcgcactaccacgctagcctggcagctcgtcagcgaaccagtgtccaggagaaatggcacagcggggaggttaaggtcatctgcgctaccatagccttcggcatggggatcgacaaacctgaccgttttgttatccacaacacattgtccaagtcaatagaaagctactaccaggagtccgggagggcagggcgagatgagcttccggcacactgtatcgtcttgtaccagaagaaagacttcagccgtatcgtgtgcatgttgaggaacggtgagaacttcaggagcgagagcttcagggttgcgatggagcaagctaagaagatgcaggcatactgcgagctcaagaccgagtgccggagacaggcacttctgcagcacttcggcgaacagtacgacaggcgaaggtgccgagacgggcctagcccctgcgacaactgcctcaagacatagtttagggtaataaactatggcgataagaatgccatgacgcttggttatgctctgaacttgtgaggtgtgtgttccacagtacattcgtctgtgtatatgtagcatccatagctcaaacaagtggccgcaactgcactgtgtgtaacgatggtctttgttttc

SEQ ID NO: 3025 - DNA, 1310 bp, Zea mays
  Clone ID: 700239649_FLI
gccaatggccagcaatggcatggcgtcctcaccctcgcccttcttccctccaaacttcctcctccaaatgcagcagacgccctccgatcatgacccccaagaacaccaccaccttcatgctcctccccttcatcttcaccacaaccccttcctcccctcctctcaatgcccctccctgcaagacttccgaggtatggcggcgccaatgctgcggaagcgcccgacgatgtacggcggcgcggacgacgtcggcgtcggaggcgaggaggcgaactgcggcgcgacgaacgaggacgaggtgtcggacgacggctccctgcacgccgggcccggggagaagaagcggcggctgaacgtggagcaggtgcggacgctggagaagaacttcgagctcgggaacaagctggaggcggagcgcaagctgcagctggcgcgcgcgctgggcctgcagccgcggcaggtggccatctggttccagaaccggcgcgcgcggtggaagacgaagcagctggagaaggactacgacgcgctgaggcgccagctcgacgccgtcaaggccgacaacgacgccctcctctcccacaacaagaagctccaagccgagatactggcactgaagggcagggaggcagcaggggggtcgtcggagctgatcaacctgaacaaggagacggaggcgtcctgcagcaaccgcagcgaggacagctccgagatcaacctcgacatctcgcgcacgccgccggcgtccgagggccccatggaccatccgccgccgccgccgccgcaccacgccgccggcggcggcttgatccctttctacccttccgtcggcggccgacatagtattgccgccggcgtgggtatggaccaactcctgcacgcctccaccccgaagctggagcaacacggtgacggctgcgccgtcgccgtccaggccgcggagaccgccggcagcttcggcaacctcctgtgtggcgtcgacgagacgccgccgttctggccgtgggccgaccaccaccacttccattgatcgatcatcgtccatcacaaacgatggcgatcgacactgtagtgagtagaaatatcggaggaaaggaatttatttggacaattctggcgagtgcatgcagcaagggaggagagaaaaaaaaggtcgtgtactcgtgtgtgatatctggtccatattggcggggtaggcgggtagctgcctgcctagctggtcatgcatggtgggaactgggaaggggttgtaaatggggaataagtggagaggcggtgtaatttaattaggtagattttggtctgagttc

SEQ ID NO: 3026 - DNA, 1217 bp, Zea mays
  Clone ID: 700239711_FLI
gggcacgtacaacgctgctgctgacaccgagctacctacctcccccgtgccaccacctctaaaatcccccagcggcccaaccgaacccgcctagggattcctaccgagggaggccgcacgcagccatggatttcctgcaggagcaaagcgtcgagaccacagtggccgtcgccgtcgctgtcgccgccgtcgccgcaggcggcgccttcctcctccttcgatccaggaagcccaagggctgcttggatcctgagaacttcaggaagttcaaacttgttgaaaagaagcaaataagtcataatgttgccaggttcaagttcgctcttccaactccaacttctgtattgggccttccaatcggtcaacatatcagctgcagaggacaagacgctacaggtgaagaagtaatcaagccttatacccctactacattggattctgatcttggatattttgagcttgtcataaagatgtatccccaagggagaatgtcccatcatttccgcgagatgaaagttggtgattatttgtctgtgaagggacctaagggccgattcaagtaccacgttggccaagtgagggcatttggaatgctggctggtggatcaggcattactccaatgtttcaagttgccagagcaattcttgagaaccctaatgacaacaccaaggttcacttaatttatgctaatgtcacatatgaagacattcttctgaaggatgagctggacgacatggccaaaacctatcctggccgctttaagatctactatgtgttgaatcagcctcctgagaactggaacggtggtgttgggtttgtgtctaaggaaatgatccaatctcattgtccagcgcctgctgaggacattcagatcctgagatgtggtcctcctccgatgaacaaggccatggctgcacaccttgacgagctcaactacacaaaggagatgcagttccagttctaagcaatgttaagtttgcaaataataattagtgaccgacatggttcttcggtcacaggaatagtacctgactctgctcgttagctgatatcaggaggaattcaggatcacatgatgattagtagtgcgccagcattttttgcaatctctatttttgaggtcaaatgatatctacctccacataaatccacattggcagagacaacattttgttactatcattattgattttaaatgtggaccattggatgcgat

SEQ ID NO: 3027 - DNA, 634 bp, Zea mays
  Clone ID: 700239732_FLI
gacgccatcggcgtgccggagcccctgtccgtgttcgtcgactcctacggcaccgggaccatccccgacaaggagatcctaaagatcgtcaaggagaacttcgacttcaggccagggatgatcaccatcaacctcgacctcaagaagggcggcaacaggttcatcaagaccgccgcatacggccactttggccgtgacgacgccgacttcacctgggaggtggtcaagcccctaaagaaggcatccgcttaagaatgtattgggaagttcactggacatgaggttcatcttcgtctggctctgctgatacctgcaaggattgctgctgctgctgccgcccctggatgtgtgtttgatcagtgactggctgctctgctccatagaagatgaatgaagagagagatggtgaagaaggctttggcaaatggcaattgccgcagcaagccatgtcggcgccactgaccggcttagtgattggtataatttggtgtggcagcagccaggattaatgcgctggtcttttatctttactactagtttggtctcgtccggtatcttatttttctttccccttttcgagtctgtactgaaactgctgagagatttgcagttttgatctatcatatcctttggt

SEQ ID NO: 3028 - DNA, 1760 bp, Zea mays
  Clone ID: 700239741_FLI
gccttcttcagaacaagaagcactttctatgagtgagtaccaacgaggtgtcagtgcatggaacttcgatattgaggatctaaaggctcaggcatcactgatatgtgatgatgatccacctgaaataaaagaagacgatgacactggtagaataactgacattgataaggatacatcttctgacgattattttggaaagacagcaccatcgaatggaaataactgcagtgatcgttcttctgtgccagcaaatcctggtcaaaatggtcccgaaataaatgaaatattgtcttccaacaatgggaatgcctacagtgaaaggaagcctgatggacgtaaaaacccagaatcagaaaatgattcattgccctcgacgtcgaagcatgatgctgatgggaaagattatagatgtgatttcaggcaaaaacagaggacatactcaggtccagttctgcaatctggtccgaataatagttcgatgactgaaaggggccacattattgaaagggatgcaggagttcaatctgtatctgataaacaaaagaatggtacaagaagagccaataatcttagtggtcctttgtcacttccaactcgtgcttctgcaaatagtctttcaagagccaataatcttagtggccctctgtcacttccaactcgtgcttctgcaaatagtctttctgctcctattcgatcttctgcaggttatgtaggctctttgggtgataaacctaagcgcactatggtggaaattaaaggccgcttctcagtgacatctgagaatgtggatcttgcaaaggttcaagaaattccagggagcagtgcctcacgtaaattgcaagaggggccttcactgagaaaatcagccagtgttggtgattggtcagcgaatgataagacaacgtctactaatcatcaaaggaaggaactctgcaatagctctgtatctacatcaattctgattccgcatcttcaaaaccttgtgaagcaaactgcattccagcaagatctgattacgaacctactaagtagcttgcaacaaaatgagagagtcgatgctcagtcaagagtccagagcacgacgagtgatacagtggttgaagctgctactgctgagagagaacactcgttacttgttaaaatttttgagttacaatctaggatgatttctttgactgacgaattaattgcggcaaagctgaaacatgttcagctgcaagaagagctaaatgtactctactgccaagaagaaatcctggatatgagagaggacgagagcgaagaagcatgatgcggtggagcctgccccccttttttttactactactactgagggggactaaaagccacatgctctaagcccgtgcaattgaggcttggctaactggctgcatacaatacaaggactcgaaggatcattggccaactccgggtgcaatcgaagaacctgcaatgagtttgatggagcggggtttatgatcgttggcctcggatttgaactgttatgtatattcagtcgacccgttcgatttctgactcgggtttggtttgttcagtgagcttttaaggcgtcttgcgatgcgcatctacttgatcattaagatggctatgacgccagcctctaatatatactactagtggtagtaataggtatagcgtccgtatagtaccattgtacttgtacctcagaagtcagcaagactgcgacaataattgcatcgcgtctgtagacagcggaatgcatgagtagctactgtagt

SEQ ID NO: 3029 - DNA, 493 bp, Zea mays
  Clone ID: 700239751_FLI
aggaggggaaggaacaagatgagttccaagaaagcaacaaaccggggtttggtacttgtccttctgctcgttgttttgcctgcgctttcggtcgccacgcacgcaggagaaagagagttgccagatgaaaaggatcacaagggccattccactgttgcttctggaaaggggggaacggcttcaggagatatggtgaagacgaatgactatgggcgctacgatccaactccggcgttctccaagcctcgctccaagcttatacccaactaattacactcacacttgctgcatctacatgcttactatatggatggcatgcatagaaatatagtcctgtagagaatataatgctcactttgttttttttgtcgcgttctagttcaaaaataaactaatcggcgataaatatttaagaacggaggtagtatctagtatctagccttgacgcctctactgaatgtacctctactgaatgtactcggcttcagttctt

SEQ ID NO: 3030 - DNA, 221 bp, Zea mays
  Clone ID: 700239763_FLI
gccatgcagtacagtgtactgtgtacacagagactgtactgcatggctccaatcgataaagagcttctgactgtatttgcagcatagttcagaatcaaaccggtcaccagtatcgtaggattgcctcgattactcatccgagatcctttgacggaagtctttgaccattagcggaaggccttctctgagagagacgtttggctcccaatgtagcagttgct

SEQ ID NO: 3031 - DNA, 520 bp, Zea mays
  Clone ID: 700239779_FLI
acaaacacgaccccagtagagagaacgcagagagagagggccacgggtgtagcgggttctggtggcgctgcggcttcaagcaaggtgccgggcaaggtcgttggggagtacgcgcgaagcattgccgcatgacaacctggaagcgagggtctcggcttaattgtaccacggtggggatttcacagcgcacgccaggcggacgaaccgtggacgggcgcggttggcatctcactggaccggccttcatcgccaaatcgagccgagcgttgagaattctgatgagcaagctacagaggatccagggcctcagctggtagaatctgttgagcaggagctcattgaaggagaagaacatgtggtcgaagaggagccgcctaacactgaggccttcgacttgatctaggtggcgtctcccagtcagctttgtggcgccagtgaataatatttagttcgctttattttatcatttatttctgtaagacatctgctatataataagtacatttatgatatttatgac

SEQ ID NO: 3032 - DNA, 1033 bp, Zea mays
  Clone ID: 700239780_FLI
caacgctctctaccgtccgagaccccaagcaccagcgcggcggcgggggcggcggcgaccatggctgtcggaaagaacaagaggatctccaagggaaagaagggtggcaagaaaaagaccgtcgaccctttctctaagaaggattggtatgacatcaaggcaccgtcggtgttcagtgtgcgcaacatcgggaagactctcgtatccaggacacagggtaccaggattgcttctgagggtctgaagcacagagtctttgaggtttgcctagctgatcttcagggcgacgaggatcaagcttacaggaaaatcaggctccgtgctgaagatgtgcagggcaggaatgtgctcacaaacttttggggcatgaattttaccactgataaactcagatccctagtgaagaagtggcagacattaatcgaagcccatgttgatgtcaagacaaccgacaactacatgttgcgtttgttctgcatcggcttcaccaagaggcgcccaaaccaagtcaagagaacctgctatgctcaggcatcccagatccgtcagatccgccgtaagatggttgagattatgatcaaccaggcttctacatgtgacctgaaagaacttgtttcgaagttcattccagaagttattggtaaggagattgagaagtctacctccagcatcttcccacttcaaaacgtcttcatccgcaaggtgaagatactcaaggcccccaagttcgatcttgggaaactcatggaggttcatggcgactacaaagaggatgttggtgtgaagcttgagaggcctgtcgagggagatgaggctgggcaggaggttgctgctgccgagtagtttgtttgctacttctgtatctaggcgagtctggacatgaggttgcttatgacgtgaacttatagagttgtcttggctacgtgttttcatctggccctaagattttgtcttgaaacaagtttaaaattaagattactcgtggcgatcttctgtgttcgagtactgatgtactaagttcctttgcatcctc

SEQ ID NO: 3033 - DNA, 1110 bp, Zea mays
  Clone ID: 700239784_FLI
cggcgacgcgcacccgccggcaaccagacggtggcgcgtcaagactccccacccggctgtccggcgaggacctcggctcctcgcccctccgccgctaaagagccgccatccagccgcccagccccaggccccaccgccccagctccacctcggtcccctcgcctcacctcgacccggattccgcccctcgcctcacctcgacctacatctgcctcgtccccatggaggcggcggcgagccgcaagcgcgcgtacagcatcatcgtgcctacctacaacgaacgcctcaacgtcgccctcatcgtctacctcatcttcaagcacctcccggatgtgaactttgagatcattattgtggatgatggtagtccagatggaactcaggacattgtaaaacagctgcagcaagtatatggtgaagattttgttttactgcgagctaggccaaggaagctagggcttggtaccgcatatttacatggactaaagcatgcctcaggggaatttgtcattatcatggacgcggacctatctcaccatccaaaatacttgccaagctttattaggaagcaaaaggaaactggagctgacattgtaactggcacacgttatgttaagaatggtggtgtccatggttggaatctcatgcgcaagctgactagcagaggtgcaaatgttcttgcacaaacgttactgcagcctggagcttcagatttaaccggatcatttaggctatataagcgagatgtcctggaagacttaatctcctcatgtgtcagcaagggctacgtgttccagatggagatgattgttagggctacaaggaaaggttatcacattgaagaggttccaataacgtttgtggacagagtatttggaatttcaaaacttggcgggtccgagatagttgaatatttgaaaggccttgtttatcttctgctcacaacatgattgaagatatatagtaggcttctggtttgtgggtacaaccgtgttacattacagagaattttactgatgtgttattaatgcagcttgaattgtaacagtaccaccattacgcatgtttccagtggatggattattgtactcaattcttggttttctctgt

SEQ ID NO: 3034 - DNA, 1330 bp, Zea mays
  Clone ID: 700239811_FLI
actccctccatttccctcacctcccgcagcagctagccgccagccaacaaccgaaccaaccaaccaacccacaggccacagcgagcgagtaaagcgtccaatggtagcgatggcggccgtgcagcagcagcagcagcagcagcgccgcgacgcggaggcggagctcaacctgcccccgggcttccggttccacccgacggacgaggagctggtggcgcactacctctgcgcgcgcgccgcggggcgccgcccgccggtgtccatcatcgccgaggtcgacctgtaccgcttcgacccctgggacctgccggagcgcgccctcttcgggcgccgcgagtggtacttcttcacgccgcgggaccgcaagtaccccaacggctcccgccccaaccgcgccgccgggtcgggctactggaaggccacgggcgcggacaagcccgtggagcacgagggccggacggcggggatcaagaaggcgctcgtgttctaccacggcaagccgccgcgcggggtcaagacggagtggatcatgcacgagtaccgcctcgccgaagccggcggcgcccgcgccaagaagtccggcgccggcacgctcaggctggatgactgggtgctgtgccgcctgtacaacaagaagaacgagtgggagaagatgcagcagcagaaggagaaggagaagaaggcgatggagtcggaggcgtcgctctcgcactcccactccgacacgcggacgccggaatcggagatcgacgacgacccgttcccggagctgggctctctaccggcgttcgacgacatgggcgcagccccagcccctgccggcgtcgtcctgcccaaggaggaggtggaggacttcggcgacctcggcggcgacgactggctcgcgggcatcaacctcgacgacctgcagatgccgggggacgccgccgatttctacggctccatgctcgtctcgccgatggccgccaagatggagccggacggcggcttccccttcttctgagatccttcggcgactccggggacgaccggatgcagcgcaacgcaaactgtgtatagttcagattttcttcatggaaccaacaacaacaaaaaaagttcttgctaatatcttgttctagtggtgtagtgcagaagtagcagcaacatgattgaagttccattgtagtactgatgttcatcgccacttgagctgtgacaagtgacgacattctttcgtttcttggctgcaaattcttcgttgtccagaatataatttcagatgggtaatgccaattcgggacgtgttaacttgtttcttgcctctgaacatacaatagcttgttgtgct

SEQ ID NO: 3035 - DNA, 892 bp, Zea mays
  Clone ID: 700239941_FLI
ttcgagatctacgcgagtcgcgggcaagcagccatgagcgaggtgttcgagggctacgagcggcagtactgcgaggcctccgcctcgctctcccgcaagtgcaccgctgcctccgccctcgatggggagaagaagaagcagaagctgtccgagatccaatccggcgttgaggaagctgaatcgctgattcgtaagatggacctggaggcaaggagcctacagcctagcattaaggctggtttgcttgcaaagctgagggagtataaatctgacctcaacaacgtcaagagtgagcttaagaggatctcagcgcccaatgctaggcaggctacccgggaggagctcctggagtctggaatggctgatactctcgcggtgtctactgatcagagggggagattgatgatgacaactgaaagactgaatcagtcaactgacagaattaaagagagccgaagaactatgttggagacagaagagcttggtgtgtcaattcttcaggaccttcaccaacagcgacagtcactactacatgctcatactactttgcacggagttgatgacaacattggcaagagcaagaagatcctggctgcaatgtcaaagaggatggataggaacaagtggatcattgggggaattatcacggctctcgttctggccatccttctcatactctacttcaagctcgctaattaagcctctgcctgcaggtaggttccccctacatatctgtgttcagtaattgtgtgatatgagttgtctgaatgccgtgtattgagcaacacgcagctctccgagcgtcatttgttccccctcaaacctgtaaactcaaaatggcttattctgtgtatagtctgttattcccaactatgtaaaatgtctaaagagt

SEQ ID NO: 3036 - DNA, 824 bp, Zea mays
  Clone ID: 700239986_FLI
ccaggccgccacccaagcaaccatggcgaccgcgctgctccgccgcgcgctccacctccgccgtgtgctcccctcgcccgccgtcaccgccgccgcctcccagcgcctcatccccgccttctcgaccacccccacgccgaccccgaccacctcccagcagaacgccgccaccactacgatcgacctctcctccgacgagagccgccgccgcctcctcaataggttggtgtaccggagcaagcagcgaggttttctggaactggacctggtgctggggacctgggtcgagcagcacgtgcacgccatggacgaggccaacatccgcgccctcctgcaagtgctcgacctcgaaaacccagatttgtggaaatggttgactagccaggagcagccaccagaggatctgaattctaatccggtgtttgctgccatcaaatcaaaggtcacagataacctgaccaagcatgcttctcctgagacccgatctacaccaggtcaaccatgggttagaggatgggacgacataaagaaaggcaaagatggacccaagtatggaaatcagtgataagctgcttgaaatggggatgacggctttccatcctaaataatacctgtccccccaccccaccccccaatatgcttgttttgtgattgtgtagaataaagtgaactgcgaccggcatgtgtgaagtttgttaaattgtagaatcagcttgtaactatggatggtactcctgatgttttcctggcaattccagccttccaggtatcgtctactacttggaaatatgttatattatgcattgcagtctgttagtgatggc

SEQ ID NO: 3037 - DNA, 1213 bp, Zea mays
  Clone ID: 700239991_FLI
gctgcatatatttttgatagcattccaatcgcaggagtaccctctaacagaatcacaatgaacagagacattataagcagcattcctttttgatagctgcatatatttgttttagattttatttttttacagcaatatgggtgatagtgccgattggaatgaagataacactgctctagtgtgtgaattgttcgccgaacaagtgaaggcgcacaaccattctggtacccacttaaataaaatagggtacaaaaatgtgatggacaaattcaaagaaaagactaggttgtcctacaccaaaatgcagttcaagaacaaatgggacaagatgaggattgagtacacaaattggaaaagactatcgaaggaaactggtttgggatgggacaccgcgaaaaaaacctagagtgcgacaaatgaaaggtggaagaacttgaataagcaatacaaaggaattgccaagtttaaagacgggcctctattgcatgaggaagaaaaagccatcatgtatgaagatattaggaacacaggagatgatcattgggctccgtctagtggtactacaccacaaattctggagggtgaaaccactgagaacactgatgacaaggatggagactatgaggccaatgatgagaaggatgaagactttgaagaatgtgaagaggtttcaccaacaactgctaaaggaaagtgtcatgtttctgttggtcgaaaggacaagggtaaaaagcccaggtcattgggaggacattgggtgcaagatcaattgagcaaacttgtgacagcaagtgagaagagcacagcatccgttgagtctttggcaagaaaggaggacaatgggtgctccattagagatgtcatggcattggtgaaggagtgtggtgcagttccaggaacaaaagaacacttcatagcatctcaagtttttatcaagagggcagagagggagatgtttatgactttggacacaccggaagaacgcttcaactggcttacaatgaaacatgattgggtcacttggatgagtcattaggatgtgtaattttttgtagcactatgtcccattttcagtgctattatgtatctgtttaatcctttttaccgcggtttgaacttgttgtgacattattgtggatggattgtacctccacctatttattgcaacatgtttggaacttgttatgagaattatgtttaactattttgttgc

SEQ ID NO: 3038 - DNA, 811 bp, Zea mays
  Clone ID: 700240012_FLI
tacaatcaaagacatctcttaccaatagtcaccaaagtaggccgagcgaaagatctcttttggaaggtcaaacaactagaacttcgcggtctgtcgcagctgcagacaatggattcggtaggacgatatcgtggaagtcacttgacatggctatcaggcatatggacattcgacaaaatttgggtggcatccgtggtgcatctctattccctcatagcattcgctctactactaccaagagccggccagctagagcctcagatccaggccattgcatctcaaatggtgaccgatgcttcacagataacggcagtagcaacgggcacttctctggagattctaatggcactctttcacacaacggcggcagctcaattggttcccctgatagtggaaaaaaagaggttctgagtgaactggatatatatgccaattcacgatacgatgcgatgttgctgaaggaggactccaagaacatgagttggttgcacagcgtggacgacaagtctgaccagagcccagtgtttgatcataggttcgagccgctccctgagccattcggtccgctatgagctgtttatactagtcataaagattccactcgctttgttcgtcacttgctgttaaaggttttatgcttgtctctttctgtttggcctatctcccccatcttttttatagatctgctagggcagataaagatcgtggggtttgtacttgttctcctttgatagctggagtctcgatttcgagtgacttgtgcgggaataacatatatactcaatccccatccttggctatcattttgatt

SEQ ID NO: 3039 - DNA, 1355 bp, Zea mays
  Clone ID: 700240073_FLI
cggccgcctcctcgccatgtccgaggacgacctcccctaccacgtccgcgttgcggacgacggcgacctcgagaccgtcggccgctacgacttcgacgggcagctcggctgcgccatgatcgcgcaccccaagctggacccggccaccggggagctccacgcgctcagctacgacgtcatcaagaggccgtacctcaagtacttctacttcaggcccgacggcaccaagtccgacgacgtggagatcccgctggagcagcccacgatgatccacgacttcgccatcaccgagaacttcgtggttgtgcccgaccaccaggtggtgttcaagctccaggagatgctgcgcggcgggtcgcccgtggtgctggacaaggagaagacgtcgcggttcggcgtgctccccaagcacgccgcggacgcgtcggagatggcgtgggtggacgtgccggactgcttctgcttccacctgtggaacgcgtgggaggacgaggcgacgggcgaggtggtggtgatcggctcctgcatgacccccgccgactccatcttcaacgagtccgacgagcgcctggagagcgtgctgacggagatccgcctggacgcgcgcacgggccggtccacgcgccgcgccgtcctgccgccgtcgcagcaggtgaacctggaggtgggcatggtgaaccgcaacctcctgggccgcgagacccggtacgcgtacctcgcggtggcggagccgtggcccaaggtgtcgggcttcgccaaggtggacctgtccacgggcgagctcaccaagttcgagtacggcgagggccggttcggcggcgagccctgcttcgtgcccatggacccggccgcggcccacccgcgcggcgaggacgacgggtacgtgctcaccttcgtccacgacgagcgcgccggcacgtcggagctacttgtggtcaatgccgccgacatgcggctggaggccacggtccagctgccgtcccgcgtgcccttcggcttccacggcaccttcatcacgggccaggagctcgaggcccaggcggcctgaccgagctccacgtttctcggaggaggaacagaggagccagccatggatcaggggagaagtcaccagagggagcccagatcagttccccggggtcttcctgtccccccacgcacaccagagttacagttggtagttgctttgcttttcttttcattatttcatttgacactagtgtaagtaaattgggatagtggcagcttagagagagagagagagtttagtagaaaggcgcccagctcgtagcttttcagctggtggtgcctctggctagtatagagtacataatttttttcttcttctttgcttt

SEQ ID NO: 3040 - DNA, 1102 bp, Zea mays
  Clone ID: 700240117_FLI
cctacgtgaagcagatcgagagccaccgctacgactactcggtgctccaggtcagcggcgtcctgtcctccccggaggccgaggcacccgtcgccccgccggcgcccgtcaacctcaccgacatcctctccaagaagtactgcaagagcttcgcgggcctcctcgccgccgaccccaaggtcttcgacaccctcaacggcaccaaggacaccgcgctcaccgtcttctgccccgtcgacgcggcggtggccgccttcatgcccaagttcaagaacctcacggccaaggccaagacggccatcctgctgtaccacgccgtgccggactactactccatgcagttcctcaagtccaacaagggcaaggtcaccacgctcgccaccaccagcgtcgccaagaaggactacacctacgaagcggagagcaaggacgacaccgtcacgctcgacaccaccgtcgtcacctccaccatccaggccaccgtcagggacgacgacccgctcgccgtctacgcttgctccaagttcctgcagcctaaggagctgttcaaggccaaaaccgctgatctcgcgcctgcgccggctccacaagggcccaagaagaagagcaagaagaagcccaccggcacttcggcggcctccgcgccctcggacgatgaatctgcagatggcccgtctgccgacgacgactcgtccgatgatgccgcggacaaggctgccgccgcgccgtcgtacctgtccgctcgatgggtgaccgccgcagtgacgaccgccgtcgcgctggcgctggcggcgtaaggtgtgcgctcatgtgctatgttttttttataacttattggaccccctatcttcttttcttttgtccaagtcgtgtcccttccttgttggtgaacaaaataagaagggctatttttgttttttatatttattaccgcattccattaaaaaaaaattagaggtgtgtgtgagtgatgtaagtcttgattttgttcattgggttgtggtgatcattttgtaatggtagtggccaatggaattggagagtgggttaagttttcacatatgatactatatataaggcatcatatggagtttagaggtgc

SEQ ID NO: 3041 - DNA, 1809 bp, Zea mays
  Clone ID: 700240133_FLI
ggcggaaggtgcacggtatcatcgacaagtatgccgagcgtggtcttcgttcgcttgctgttgccagacaggaagtgcctgagaggaacaaggagtcccctggtggaccatggcagttcgttggtctgttgcctttgtttgattcgcccaggcatgacagtgctgagacgattcgcaaggctcttgttcttggtgtcaacgtcaagatgattacgggtgatcagcttgctatcggtaaggagaccggaaggaggctcgggatgggtaccaacatgtatccttcctcagcattgctcggccaaaacaaggatgctacgctcgaggcacttcctgtagacgagctcatcgagaaggccgacggttttgccggagtcttccctgaacacaagtacgagatcgtgaagagactgcaagagaagaagcacatcgttggtatgactggagacggtgtcaacgacgccccggctcttaagaaggccgacatcggtatcgctgtcgcggacgctaccgacgcggccaggagcgcttccgacattgtccttaccgagcctggtctcagtgtcatcatcagcgctgtcctcaccagcagatgcatcttccagaggatgaagaactacaccatctatgcagtctccatcacaatccgtatagtgcttggatttatgctcattgcattgatctggcaatacgatttctcccccttcatggtccttatcatcgccattctcaacgacggcactatcatgaccatctctaaggacagagttaagccgtctccgttgcccgacagctggaagctgaaggagatctttgccacgggtatcgtgcttggaagctacctcgctctgatgactgtcattttcttctgggctatgcacaagaccgacttcttctcggacaaattcggtgtgaggtcgatcagggacagcgagcatgagatgatgtccgcgctgtacctccaagtgagtatcgtgagccaggctctgatcttcgtcacccggtcccggagctggtccttcgtggagcgccctggcctgctcctggtcaccgcgttcctgctcgcccagcttgtcgcgaccttcctcgctgtctacgccaactggggcttcgccaggatcaagggtatcggctggggctgggccggtgtggtctggctctacagcatcgtgttctacttccctctggacctgatcaagttcttcatccgcttcgtgctcagcggcagggcatgggacaacctcctggagaacaagaccgccttcaccaccaagaaggactacgggcgggaggagagggaggcgcagtgggccaccgcgcagaggacgctgcacgggctgcagccgccggaggccgccaccagcacgctgttccacgacaagaacagctaccgcgagctgtccgagatcgcggagcaggccaagaggcgcgccgagatcgcgaggctgcgggagctcaacaccctcaagggccacgtggagtcggtggtcaagctcaagggcctggacatcgacaccatccagcagaactacacggtgtgagatgtgatcgagagagcctgctgtgatgtcgacgaaaacacctttgccatgccatgccatgccacccttgttgttcttgcgacgacggagtcatgtgattgttacagaaaaaaagaagaaaattttccggtgatgtgattggagacaatagaagcgtgtacgtacgtacgtgtggctgatccctgaccccgagcagagcagccctaggtgaggtgaccattgccaccagatatatacccgtctttctagcttagctagggagcttcttctt

SEQ ID NO: 3042 - DNA, 1130 bp, Zea mays
  Clone ID: 700240179_FLI
ctcaaggacaaaaaaaaaaaaaacagagcgcagcattggaggcgaggaagagctgtcggccggagatggacaagtactgggaggagacgcagcgctacctggagtacgaggagctcagcatctatttggaggcgcaggaggacgccatgtcttgctacgactccagctcgccggacggctccatctcccactcgtcgtcgtcggcggcggcgtgcggcaacaagaacatcctgatggagcgcgaccgccgccgcaagctcaacgacaagctctacgcgctccgcagcgtcgtgccgaacatcaccaagatggacaaggcgtcgatcatcaaggacgccatcgagtacatccagcagctgcaggcggaggagcggcgggtgctgcaggagctgcgcgtgctcgacgacgacaccgccgccgccgccaccgcgcaggtggagtgctgcgacgtcgacgggggcctgctgcgacgggaagccgagcgcgcgaagaagatgaagcgcgcgcagtccgtcgccagcggcgcgcagtctgctccgcctccgcctccgcccgcgccgccgcacgtcgaggtgctggagctgcgcgtgtcggaggtgggcgaccacgtgctggtggtcagcgtgacgtgccgcaagcgacgcgacgccatggccagggtgtgccgcgccatcgaggacctccggctccgtgtcatcactgccaacgtcacctccgtcgccggctgccacgtgcacaccgtcttcgtcgaggtagataaaatcgaccacatccaagtgaagaacatgattgaggctgctctcacgttgctcgacgcccccggaagcccccacagctcgatgagctattacgagacctaactatgttgagcaatgcttttcggacgtctactaggtcaacaactcagtccacaattaaccagaaaggagtatgtcgtgttttgctacaatgtgcttgttgtgttttttttcaacatcacccctaagagatgatggttgtttcctctaagatgcagctagtgtaccaagcaatgtttggacttcgtgtcatacatcaccacgagagtgacatgtatttgtgtactataacatgtatatgctaaagaaaataacaaggggacttgtctttcg

SEQ ID NO: 3043 - DNA, 1926 bp, Zea mays
  Clone ID: 700240185_FLI
gggttcgcccacatccgccgttttgcctcgccgttctgccgcgccatcgcatcgtccgcgctccctctcatcgttcttcccccggtacggctcgacggagggcgtgggcgctggagttgcggctcggaggccgaggcgccgggtggtgcgttgggtgcgctcggttcgggagatcccggactttgctgctcgcgcggtcagacagggagcgccggaggaggaggaggctgtgcaagtgcaagctgtgctgaactaagggttctggcttcggactctgtgtacgcgccgccgcaggagggagctggagatgtacgggccgccgtcccgaggcggcgggggagccggcgctgccggagagcagccgagggtttaccaagtttggcgaggaagcaacgagtttttcttgcaaggccggttcatatttggacctgatgtgagatccttgtttctcaccatattccttattcttgcaccagtggtggtcttctgcatatttgtggccagacatcttatcaatgactttcctgatcattggggagtttcagtcatggtcatagtgattgtcttcacaatatacgatttgacactgctccttcttacctctggtagagatcctggtatagtgcctcgtaacacccatcctcctgaacctgaagctattgatatgcacaatgatgctggaaatggtcagacaccacaacagttgcggttgccacggacaaaggatgttatcgtaaatgggaccattgtgaaagtcaagtactgtgacacctgcatgctgtacagaccacctcgatgctcacactgttctatctgtaataactgtgtggagcactttgatcaccactgcccttgggttgggcagtgcataggattgcgcaattatcggttcttctatatgtttgtattctctacaacattactgtgtctctatgtatttggcttctgctttgtgtacattgtcaagattaaagacgcagagcagtcgacgttctggaaagcaatgttaaagaccccagcatcaatcgttctgatcatatactgcttcatctgtgtgtggtttgtgggtggtctgtctgtcttccatttctatctcatgagcactaaccagacaacctatgagaacttcagataccgctatgatcggcgggacaatccgtacaacagagggaccgtgaacaacttcatggagatattctgcacctcagtcgctccttccaaaaacaatttccgagctagggtcccagcagagcaaggtttacagcaagcacgtgcgccagcaaggggtttcatgagcccaaacatgggtaaacctattggggaacttgaattgggcaggaagccaatatcgtgggatgaacctcggtcagcagctgatattagagacttggaggttggtctaggcagtctactggacgagaaggaaggcagagtagcccatgcatccccggacctgagcagagaagcccttcctgagcttgtggaagggagggctggcatgcattcgaggcggtcaagctggggtcacagaagtgggacctcggcctccatggacagccttgctgtgcaaatggggaccgcagattctcactggggctccattagcagtgtccatggtacaaacagtggagctcactagcaagccgctccacgtcttgacgcgtctctttgtgtaaacctgcctgataccaccaactaagaagcaacctttgcgtgctctgtgcgcctgtgcttccgctccacctaggatatacgtctgcagtgctttcttactcagcgccctgggagagcgcatcagttcttctggtgtgcttcccgtttggtgtcctaagcaaaaataatagaggtaccatttaactccttattagttgtttggaccatcactgtatatagatatatattattgcaaattggaattgcctgcag

SEQ ID NO: 3044 - DNA, 795 bp, Zea mays
  Clone ID: 700240187_FLI
gtctcaccagacgaccttctcgcctcagggcctgcttggcatcacttgccaggtccgttggatcggtcatcgtctcgtcaacacgagttctccaacgaacaagttcgatcccgctgctcatctatcgcgcgcgtcgtcaatcgtcatcaccatggttggaagcagccccctgcaggccgtgctggtggccccaggcgtcaaggacaggaaggtgctcgcgttcaagcgcgacgccctcaaggacaaggacgccgtctccggcctcatccactccatcctcgcgtccagcccggcgcagcgcagcgccttctacgtcttcgacctggccaaggtcgtcgacctcttcagggcgtggcgccgggcgctgccggacgcgcggccctgctacgccgtcaagtgcaacccggacccggcgctgctcggcgcgctcgccgcgctcggcgcgggcttcgactgcgccagccgcgccgagatcgaggccgtgctcgcgctcggcgtgcggcccggggacatcgtctacgccaacccctgcaagcccgaggcgcacctcgagtacgccgcggaggtcggcgtcaacctcaccacctacgactccgaggaggaggtggccaaggtcaggcgctgccaccccggctgcgagctcctgctccgcctcaagggccccgacggcggcgacgtcagggtcgacctggggaccaagtacggcgcgcacccggacgaggtcgtgccgctcctgcgcgccgcccagcgcgcgggggtcggcgtggccggcgtctccttccacgtcggcagcgg

SEQ ID NO: 3045 - DNA, 1229 bp, Zea mays
  Clone ID: 700240195_FLI
attgcccctagctcaccacacactcgagtgacgagcacacccaccgacgatcgccatggccggcggcagcagccttaagaacatggtcgtcgccttcctcgtcccgctcccttccatcctcttctacctctccttcgtccgcgccggcggggacaccggcgccagcccgctcgcctcgtggtgcgcagcgcaccctctggtcctggccaacgtcctcttcttcctcaacgtggacgtcctcttctggctcgtcggcctcctcctctccaaccactggctcatcgacctgtactggaccgtcatccctgtgatgctgctgcactactaccgcggccacccggcatccgtggcggacgcggcgaggtctgcggtggccgtagcgctcacgtgggcgtggagcgccaggctcacgcacaactacctcaggcgggagggatgggagttgggcaagcgggaggactggaggttcaacgagatgcgtgcccagtacggcaacacctggtggtggatgtcgttcttcgccgtctacctctcccagcaggtgttcctcatcggcatctgcctgccgatgtacgccatccactccagcaaccagccatggggcgtctgggacctggtggccgcagccacctgcgttgccggaatcctcatcgctcacttcgctgacacccagctgcacaggttcgtgaccaggaacgagaagctcaagcggctgggcgagccaaccgtcccgaccctcgaggacgggctgtggcggtactcgcgccaccccaactacttcggcgagcagctctggtggtggggcttgtacctcttcgcgtggaacctgggccagcggtggatgttcttggggcctctcgtcaacagcctctgcctcggctacgtcacggtgctggtcgagcgccgcatgctgaagcaggagcaccgtgctgaggcgtacaagctataccagaagaggacttcggtgtggatcccttggttcaggaaggccgtccctgaatcgaagctgaaggagacctaaggccacactgtcgtttagttgtttgggccataccccttgtccaggttgttcaccatgttgttgtttgttccacaacgtccatgtttagaacctgttgtttcatccgctatatgtgtaattcactgtatgtgcatgaagtgcagcttgtatcatatgcatgatgacctgtttaaggtgcaagttaaaagtaatgtatctacattcgttt

SEQ ID NO: 3046 - DNA, 662 bp, Zea mays
  Clone ID: 700240224_FLI
cctccaaagcaccagacatccgtccatgacgacgtcgtccagcgaggtcacggtgtgctcgcacctgttcacggtgagaggctacacccacacaaggggcatcggcgtcggcaggtccatcgagtcgcaggcgttcgacgcggccggccaccgctggtccgtcgtgttctacccggacggcgacgaccaggacgcgaggggccacatctctatcttcgtcaggctcatcggcagcggcggcgccggagacgtcacggtgctctacggcttcagcctcgtcgacccgagtggcgccgcgccggcgtcggaggcctccaaggcccccaaggtcgccacgttcagacattcggcgggcggcgactacagaggtatcggccgcttcatggagcaccagaggttcgaggcgtctccgtacctgcgggacgactgcttcaccatcaagtgtatcatcggcgccgtcgagaggcccggcccgccgccgctgccggcggcggcctcggaactgcaccacgatttcgaccgacttgcagtagacggcggccgttcggaggacgccatgtccgacgtcgactgaggaagccatgctgctgtgcactgtgctatgctcctcttcctctatgcaacgagcgcagctgcgcaggtgtatcatcagcgcaaggccg

SEQ ID NO: 3047 - DNA, 567 bp, Zea mays
  Clone ID: 700240236_FLI
ggtccattggtcttggtggtatcacggaaagcctgagggagtacttgaagaacatgccacgtctaataatgcagcagcagaagccagaatcatcagagtcagattcaagtggatcagaatctggttcggaaagctctagttcagggtccagttctgagtctgagtcagaatcaagccctgatgagcgtgacagaaggcgaagtaataagaggaggaagaggacttgagagcacttccaactatgctttttggaattcatgtatttggttttgtttaaatgtgcttcttcagtatacatgtgcagtatgtgatctagctcttgatgtgttagtggtaatcagaaagccgtaacagtaagatactatccgaacttgtacgtggcaggttggtagtccagcaacaaagggccaacagagatcttgtttatttttcataacttccaatgcagaacaagttctgtacgtgggtatttgtaccattgcgacatcacactgctagccatgttctgtatcctgtagtgtggtaactggtaagcatcaaatatggacatcggttttgatttttttc

SEQ ID NO: 3048 - DNA, 2375 bp, Zea mays
  Clone ID: 700240246_FLI
ctccgcgacacacgcctccctctcctctgccccaccctcctccccacgccatcggcgccgccatcatcggatccggcccaagatgcctccgccccacgcgcccgagtcgtcgaggcacactccttcccgcctccgtcgtccacgcatatctccgcctcacctcggcgcccgagtcgtcgcacgcgttcgcggtggtgtccatcccggcaccggcctcacgcaccgtctacagctcccaactctgctcctctcagttctccctccgcatttcgccttctctcccttcctctccaagcagcgtcctcctcgcctagatccgtacaagcggcaaataacctctccggcggcgagacagatggagtcgacctccggcgaggatgctccgaagcacaacccgattccgtccgcgctcgtctccaacctacagtccgtgctcaccgcccgccgcttgtccgcagccgaggtcagcaccgccgccacagctagcgaggttgaggccttggcttaggaagcagaggcgttcgctgcccccacgggagatgggacgctggcgaggcccatcgtgctactgacctatgccggggggatccggtcggcgggtctcgcggcgctcgtcgacgccctcgttgccgccgaccgctgcgacgtccacgtgtgtgcccccgaatcgtacgtgctgcgacttagaaaaccaaaccacagcgggaccagtgctcggatagggtccgacgacgatgcaagcaaggagtggcgcgcggccgacggggcgcagatcggctcctgcacgtgcagcgcagccgcgtgacagtgaagcagggaggccgcgataggtggcgcagggagggtgcgacggaggcaaagtgcaagcacctggggacttcaggtaagtagaaaaccaacactgaatttgtcggttctctgttttgtgattgaccgattggtttgttgatctcagaaaattgtttcaccgttaagcaccaatttttgggtaggtcagtgttttgggatgattctcctatgcatcaatagtaaccttgtgcttggcaaagttatttgccctgataatgttgtaggtttagtgaaaagaaatatactgacatatccacctatccatcgatgcccaatggagattgacctctatcaagatttagttatgtgtctcagtagggcaatatttctgtgagttgtatactgtggattcctcatctgcatcatgaattgatcgcactatttatgccctatttttcaaaccatggtttctgtaattctttgcaccatggtatttttctcaaatgattttatctttcacaacccggactgaactcactgaagcagaaagaaagagtacaagtctactactgcagaaagcaaggagaatgccaatagaagcagatttcatgtatgggatcggataaaatcttgagcaaaatgggagaaggtttgggttttctgcaatctgtcgtctcctcttctgctgggtatctccattattattctaatgaagagggctacgagttggattttcgtaggtacatttgagcgtgttttggaatgctgggatcgtgaaacacgtgaatatgttgccataaaagttgtacacagtatccacaagtactgtgatgctgcaatgattgagatagatgtgctcaatcgccttgtagaaaatgaaaaatatagatttctgctacacttggggaatcaaagaaaagtgaaagtgccatgtcaaagttgatgaccagaagcttgctattggaaccctctctattgaaaaatacccctagatagaaattgatttggttttcaataaagagtgtgagctgtcacacacatcgaaaactacacgtgtatttttctttggttacaaggttgagcaaccaatcgaggaagatgaataatggatcttgattctgaagatgaagagaaggagctaaacattccagtaatcaaggaaaatggcaaaggtgatgggaaggaggaccagagaagtgaagagaaggcagttgctgcagcttcaaaatcaagtcttgggcttgaaaaaaagcaaggatgagtatgagtctgatgattctaatgagggagaaggtgaaaccggagaatgagcagatgcggctgttcatggacaacagcatcaagaaacctgcaacatgcaacctgattttaagaaatttgccacctgcaacatgactgggcagtggtatctctgagatataatgtggacaacggcaaagaatactatgcatacacaacagaagagtcctgcaacctgattttaagtccatttgtagcaaacaatcttggaagccattaactcgttgaatttgaagcggatgtgcagttttatttttatgtcagttttactaatgcagttagttcct

SEQ ID NO: 3049 - DNA, 1181 bp, Zea mays
  Clone ID: 700240251_FLI
gcgagagacgggcaggggaggaaaaaaatctaaccctagcatccgcagcgctagggttcgggggttgcgatggcggcggcggcgaggcagcgggggacggtgaagtggttcaacgacaccaagggcttcgggttcatctcccccgaggacggcagcgaggatctcttcgtgcaccagtcgtcgatcaagtcggagggcttccgctcgctcgcggagggcgaggaggtggagttttccgtctcggagggtgacgacggccgcactaaggccgtcgacgtgaccggccccgacggatccttcgtcaggggcggcggaggcggaggaggcggcggcggcggcggctacggctcccgcggcggtggcggatctggcggcggcggtcgcagctacggtggtagctggggcggcggccggagatccggcggcgggggcggtcctggcgcgtgctacaagtgcggcgagcccggccacatggccagggactgccctagcgccgacggcggaggctacggcggaggcggctacgggggaggcggctacggaggaggaggaggcggcggcggcggtggctgcttcaagtgcggcgagcctggccacatggccagggactgctccagcggcggcggcggctacggcggtggcggcggcggtggtggtggcggctgctacaactgcggccaggccggccacatggccagggactgcccaagcggtggcggcggtggcggagggaggttcggcggcggcgggggtggaggcgaccgctcctgctacaactgcggcgaggccggccacatcgcccgcgactgtcccacgtgaggtgtgtccgcgtccgtccagccagccagatcggatcggatcgctccaccacctgctggtctgatggcgccgcccccttctagatctcgcttaaaaaaacatccccctctcgctgtgtgtcggagtaccgctttagttttgccgatccgggcacgagtgcccgctgcctctttcctctcatgcgtaagaggatcccgtccgccgttttcagatttcgttcggttcgtagaagaactctcaagttaagttaagttatcatggtgtgtgcttggtcgtcgtccgtcgtcgtcgtcgttaaggttttaagagatgatttggtcctgtgttgccgaggggaagtccaatctgcttttcttttcttt

SEQ ID NO: 3050 - DNA, 685 bp, Zea mays
  Clone ID: 700240267_FLI
ctcatctgaagcgcgcgagagaaacgcgtatacccaggcggcggttgaggaagaggaggagaagaagaagaagatggcttcctccgcatacgcctcatggtccaagcggtggatccgtcccgaggtacgtacgccgttgctgtttcccatctgatcgttcattcggtttctatcgatcggagaattgggtcatcggggatggatggatggatctgacgggatttgccgatcccggtgtcgcgcgcgtccatggatcaggtgtacccgctgttcgtgccgatggccgtggccttgggcatctgctcgtaccagcttgtgcgcaacatcacgggcaaccccgaggtgcgggtgaccaaggagaagagggcggccggcgtcctggacaaccacgacgagggcgagaggtacgctatgcacggcctcaggaagttcgtccgcgggaagaagcccgagatcatggcctccatcaactccttcttcgccgaccctcccaaggacgattaagctagattccgtcatggatggatggatggatggattcccgattcccgatcgtccatagtatgttttaccattcattagctgccggcggcgcgccttgattcgtagccgtcgtcggtacatttttttttgtttctaaaattctaattctcccatataaatggaacatcatgcatttgtcgtg

SEQ ID NO: 3051 - DNA, 1690 bp, Zea mays
  Clone ID: 700240288_FLI
gcacgcgtcgtcgggcttctcctctttcttgcactttcagtcgagtccagacctgcggaatatagatctaccaatcgaccgacccggatccttcccttccgtctgacgctgcagtcgtcgtagcagatcttatctcaaaccctaccgaccaacagctgcttgctcgggacgggaaccggagttggattgcgatggcgctgcagtacgtggaggcgcagcggcaggcgcgcccggacctcgccgactggtatgcttccctcgccgacctctaccagcagaagctatggcaccagctcaccctcaagctcgaccaattcctacagctccaggccgcacagaccggagacactatcattcagctctacaacaatttcatcactgattttgagaccaagattaatctgctcaagcttgcccattttgcggtgatagcttctcgccagtaccctgataaggatgctgcaattaccttcttagagggggtgatcacaaagctgcgtgatacaagagagtcacggattaatgaaccgattctctatgtgaagatgcaaattgcagctattaatcttgagaaaggaaaccaaaaagagtgcaagaattcgttggaggatgggaaaaccaccctggatagtatgactgatgtcgatcccacagttcatgctagcttttactggatatcatctcaataccacaagtcatgccaagaatttgcagagttctataagaacgctcttctctatctggcctacacaactgtggagtctctatctgagtcattcaagctagacttggcttttgatctttctctagcagccttgctgggtgataacatttataattttggagagttattagctcacccgattatcaatagtcttattggaaccaaggtggagtgggtttatcatatgttacaagcattcaacacgggcaaccttgctttctaccaagaactttgcagggttcacaatgctgctcttactgcacaaccagctttggtgcaggatgagaggaagctgcttgagaaaatcaatattctttgtctgatggagataatctttagtcggccatctgaagatagaactattccattaagtgttattgctgagcagactaagctttcaatcagtgatgtggagtatctccttatgaagagcctctcggttcatcttattgagggaataattgatgaagtggacagtacagttcatgtttcgtgggtccagcccagagtgcttggaatcccacaggttaaggctttgcgcgaccgcctggatgcctgggttggaaaggtgcatactacattgctttcagttgaggcagaaacacctgatcttgttgctgcctaatttagcacctgttacacttccgcgagaggcttggtcagcaaggtgatgagatgcattgtgacacttgtagtcattttctggataatgaacctgctgccctgagcgtttgtcagcctgcgtcctgatcggggcctgtaatttcttttttgatgtcctctggacatggatgggtacaacttcacgcagtgtcacggaaacgggaccaaatgattgaaatttttatactagtagggtgttactgtagttttcccagttgaatttaatttgtaactgagtttgtactctgctggacatggatgcaggagaatcttgctggaaatttagttgtgcttgatgtttgc

SEQ ID NO: 3052 - DNA, 579 bp, Zea mays
  Clone ID: 700240304_FLI
atcgcggcgtgttcaaatcccacaatcttcttgtagcacaccactgtcttcgtccaactcggcggcgatgtctgggcgcggcaagggcggcaaggggctgggcaagggtggtgcgaaacgccaccgtaaggttctccgcgacaacatccagggtatcacgaagccggcaatccggaggctggcgaggaggggcggcgtgaagcgtatctccgggcttatctacgaggagacccgcggcgtgctcaagatcttcctcgagaatgtcatccgcgacgcggtcacctacaccgagcacgctcgccgcaagaccgtcaccgccatggatgttgtgtacgccctcaagcgccagggccgcactctgtacgggttcggtggttgagcgcatctcttccctcgtctgcagcggctgccggtggcgtttcctcagttccctctgccttgcttggcttgatgtagagagttatcagattaaaatatctctgatgtgcttcgttattgggtggaatcatgtgtcccagcagtgctgggaaatcgagatcaagatgtatctttctttgcagtaatgaaatgttaaaatcg

SEQ ID NO: 3053 - DNA, 1413 bp, Zea mays
  Clone ID: 700240305_FLI
ctcttcttctgtttgttcctttggtgtttccctttggctccatggcaggctcttcatcatacagcgttctccctgaccagaccatggacaacgatgatgcacaaattggagttgctaaaactcagggaaagtattggggcattttcatctgctggcttcttggaaatggatgtctatttgggttcaatgggatgcttactattgaagattactacgtgtacctcttcccgaagtaccatccaacaaggattattactctcacctatcagccctttgttctcgccacaaccgccatattcacatatcacgaggccaaggtcaatactagggtgcgcaacctggcaggatacacgttgttcttcttgagctcatttggagtgatcatcctggatgttttgtcttcaggaagtggtggaatcgccccattcgttggtatctgtaccattgctgctgcttttggcatagcagacggtcatgtccaaggcggaatgactggtgatctgtccctgatgtgcccagaattcgtccagtccttctttggcggcgtagctgcatcaggtgcaataaccgcggcgttaaggttcttcacgaaagcggtgtttgagaattccagagatggcctgcggaaaggagctatgctgttctcttcgatctcgtgcttctttgagcttctatgcgttctactttatgctctggtgttcccaaagttgccaatcgtgaaattctaccgttcaaaagctgcctctgaggggtctcagacagtcaccgctgaccttgctgctggaggcatcaaaagcctgccgaatccattggctgaggaagatggtgtggttgaacggttgaacaacaagcagttgctgcatcagaacatggactacgctctggacatgttcctggtctatgtcctgacactgtctattttcccagggtttctggcggaagacactggatcgcacagcttgggttcttggtacgtgcttgtcttgatcgcgagctttaacgtgtcggacctgatcggaagatacctgcctctggtcgagcaaatgaagctgacatccaggacggggctactaatcgcggccatctctaggttcctgctcgtcccggcgttctacttcacggcgaagtacggtgaccagggctggatgatcatgttaacgtcgctccttggactgagcaacggccatctcaccgtctccgtcctcaccgaggcgccgaaaggctacaaggggccagaacagaatgctctggggaacctgctggtgcttttcctcttggcaggcatatttgttggcgccgtttctgattggctgtggctcataggcaaagggtggtgaccgaacttaacttgttctccccaggtgtatatttattatgcaagctagcagatcatgcaatcaataaatcatttct

SEQ ID NO: 3054 - DNA, 586 bp, Zea mays
  Clone ID: 700240323_FLI
aggctgaaaccatgagttgcaaagacatatatagaacgtcccgccggctagcagggcagccgatcatatcggataacgactcaaagcaaagaactaacacactcagaggaggaagaaacagggtaatgaagcggatttattctgtttggtccaagctgcccgttcgctgtccgggtcacgcactccatgtctccatctactggcacttggcgtttgggaggttgcacgcggaagggatggccttggcgcagctggcgtatggcgtgttcttgagcttgttccagtagttgctgcagaggcagccgaagtcggcgttcctcagcgcgtcgcagcacccctggctcggcgcgccgctcgagcaggacgcgcactgcctcagcaccgtgccccggtcgacgttgcacgtcccgtcggcctcgctcgccgcgaagagcagcgccagcagcgcgacggccgccacggccacggcactcttgccgcgcacccttctcccggccatctgagatcggcggatgtcttggcttcgctaggctgctgacctgctgtcagtttagacggcgctcggtgtgtgtaggctagtgtgatc

SEQ ID NO: 3055 - DNA, 1465 bp, Zea mays
  Clone ID: 700240324_FLI
gcacagaatggcaaggcccttgctctgcctcgcactcttgtgcacttccctggcgttcaccacctgcgccggcatccgcctggagctcacccacgtcgacgccaaggagcactacaccgtggaggagcgcgtgcgccgcgccaccgagcgcacccaccgccggctggcgtccatgggcggagtgaccgcacccatccattgggggggccagtcgcagtacatcgccgagtacctcatcggcgacccgccgcagcgtgccgaggccatcatcgacaccggcagcaacctcatctggacgcagtgctcgcgatgccgcccgacctgcttcagacagaacctcccctactacgatccctctcggtcgcgcgccgcccgcgccgtgggctgcaacgacgccgcgtgcgctctcggctccgagacgcagtgcttgagcgacaacaagacgtgcgccgtcgtcaccggctacggagccggcaacatcgctgggaccctggctaccgagaacttgacgttccagtcggagacggtgagcctcgtcttcgggtgcatcgtcgtgaccaagctctctccggggtccctgaacggcgcgtccggcatcatcgggctcggcagaggcaagctgtcgctgccctcccagctcggcgacaccaggttctcctactgtctcacgccgtacttcgaagacaccatagagccgagccacatggtcgtcggcgcgtcggccggcctcatcaacggcagcgcgtcgtcgacgccggtgacaaccgtgccgttcgtcaggagccctagcgatgacccattcagcacgttctactacctgcccctcaccgggatcacggcgggaaaggtcaagctagctgtcccctcggccgctttcgacctccggcaggtggcgccggggatgtggacgggcacgttcatcgactccggcgccccgttgacgagcctcgttgacgtggcttaccaggcgctgagggcggagctggcgcggcagctgggcgccgccctcgtgcagccgctggccgggacgacagggttcgacctgtgcgttgcgctgaaagacgccgagaggctggtgccgccgctggtgctgcacttcgggggcggcagtggcaccggcacggacttagtcgtgccgccggcaaactactgggcgcccgtggactcggccacggcgtgcatggtggtgtttagctcggtcgaccgcaagtcgctgccgatgaacgagacgaccgtcatcggcaactacatgcagcagaacatgcacgtgctctacgacctcgccggaggagtactctctttccagccggcggactgcagctccatatgatcgatcactagcttgcgtgccggccgtgtgcatattctgtactatttgtgtgtgtatgtgcgcgcgggatatatatatgtaattgtgtatcactatccaaattgctcatgcaattgcactgataaacgcgtttgt

SEQ ID NO: 3056 - DNA, 508 bp, Zea mays
  Clone ID: 700240352_FLI
gacctttggtctggcacgtcaacgccgagctgtaccccatccgataccgcagtgtctgcatgggtattgccaccgcttctaactggttctggaactttatgatctcgttcttcacccgattcatcaccgacgatatcgactacttctacggtctcatcttcgctggttgctgtgctgctctcgtcctggttgtcttcttcttcgtcatcgagtccaaggaccgaactctcgaggagattgacaccatgtacgttcagcacgtcaaccccatcacgtcgagccgatggacccccaacaagcagcaccagaatgaagttggagagattagcgacgtgcgaagtcacacgcaaaactctgagaaataaagtgctgtagttgtgctggttgctttagctagttctctagttgcgtgtttaacacgacactgggggctagtagcgaattgctagcatgtatgatagcatgtaaaataccatgtagaatatcatgaatgattattgttgataat

SEQ ID NO: 3057 - DNA, 833 bp, Zea mays
  Clone ID: 700240362_FLI
cggaagcagcccaaggaggcgcaggcgcaggcgcagcagggacaggcggtggagctggagcctgagcagcagctggacccgcgcgcgcagccggcgcacgacgcggaggaaaccgcggcagagccgccgccggccgcatccaacggaaccgccgacggcggcaacaagaggaaggcggcggccatggaggaggaggggatgctggccgtgatgacggtggcggcgccggagagcagcaccaagccgaggctgtccaccaccagcaacagcctggcggtggagacctgagctgagaatcggacggcgaccggatcacatactactacctacgtacattaatccaccattgcgggcagtcgagaaccaaccgaccaaacccaggccaccgccgagaaagagctcgtcctccttttctttcgctggttcttttggttctcggagctaattaatggaatgaaggtgtgagctcctggggatggaggggcggttaccggctctaagtgaagaacaattacgacgtaccttacctagcggctgctgcttcggccggcaaattttgttgtgctcgtggtcatggacacccttgtgttcgttaggagggggtcggggtggaacggtgaaaaggaagctgtagatagaaaaggcaggcgtctcatgctcttattgtctagtctaatttttaattttactcggcttattaatcacggtactgactagctgcctcaaaacctgtgatggatcagttggctgctgatgttgttttcgctcagttcttttcccacaaatatgtacactcaatattcaaataaactcttttccaatatctaagattt

SEQ ID NO: 3058 - DNA, 732 bp, Zea mays
  Clone ID: 700240365_FLI
gtcctgctgggcccacccatttccgaaatctcgacatcccaggcatggacagatatcttgatttctggaatctgatggcttacgactacgctggctcttgggacccgacgagcggccaccaggccaatctccacgggtcgcttgacaaccctacatctacaccgttttcaactgacgcggctattgaccactacacaaggaacggtgtggcccccagcaaaattgtgctcggaatgcccatctatggtcgtgcttttgagaatacggacggtccgggcaggccatacaacggcattggcgaggggtcctgggagaatggcatctttgactacaaggtccttcctcttcagggctcgcaggaaatttatgaccaagccaccggctccagctactgctacaacccacagacgagaaagctcgtttcttatgatacccctcacgctgccagagtcaaggctggctacgtcaagcagtggggtcttggcggcggcatgtggtgggagagcagcggtgacaaggagggccaagacagcttgattggaatcgttgtcaatgagtttggcggcccacaggcgctccagaggaaggataattgcatcgattatccgcagtcaaagtacgacaacctgaagaatggattcccaaataactagaggcgccttattcgagaatgagagtagatagaatgataagaaagaaatagagtatgagcgaaatgaaaaatgaacaagt

SEQ ID NO: 3059 - DNA, 973 bp, Zea mays
  Clone ID: 700240404_FLI
tgcatcctaaaaatcctcaagagctccagttcccgctgtccaatatgcaggcgcaccttatctaaagaggacctcttccttgctccagaggtaaagcatcctgatgaagatggttcaggcaaccttgagtctgacagacccctctcatccaaggtgcaagcactgctgaagctgctgacggcttcacagaacgaagacccctcatcgaagtctgttgttttttcccagttcaggaagatgctgatcttgctggaagcgcccctcagaagggcaggctttaagacactacgcctcgatggctcaatgagtgcgaagaagaggctgcaagtcatccaagaattcagtcacggtggctctgactccccaactgtgctactggccagtctgaaagccgcgggagccggcgtgaacctcacagctgcctcgacggtgtacctgttcgacccctggtggaaccctggggtagaggagcaggccatggacagggtgcaccggatcggacagaagaaagaagtgaaggtgataaggctcatcgtgaagggcagcatcgaggagaggatactggccctgcaggagaggaagaagcggctgatcagcggcgcattcgggaagaagggaggcaagaacgagaaggagatgcgtgtcgaagagctccggatgatgttgggcctaggtaagtaaggaaaaggctggttggtggtgataggaggagtgatgcttgtgttgcttgtgatatagctctggcggtagaagttgtagctagggcgatggagtttcagtgtaggcatagggtagggctggaagaaaacgaaatccaggcacgcgtgcatgtatctctgatgctaaacattagcactagatcagtgctaaatgattgggtcctcacttcctcagctgtgatggtcaattactgaacacggtcaaatctagtagtagctgtgctaaatgaattgcgtttgcagctttcctattc

SEQ ID NO: 3060 - DNA, 792 bp, Zea mays
  Clone ID: 700240437_FLI
cgctcatcgacgtcgtcggccgcttcgccatccagctgctgggcttcttcatgatgaccgtcttcatgctcggcctcgccatcccctaccaccactggaccacgccgggcaaccacatcggcttcgtcgtcatgtacgccttcaccttcttcttcgccaacttcgggcccaacagcaccaccttcatcgtgcccgccgagatcttcccggcgcgcctgcgctccacctgccacggcatctccgccgcctcggggaaggccggggccatcatcggcgcgttcggcttcctgtacgcggcgcagaaccaggacaagagcaagacggacgccggctaccccgcgggcatcggcgtgcgcaactcgctcttcgtcctcgccgccagcaacatgctcggcttcgtcctcacgttcctcgtgccggagtccaagggcaaatcgctcgaggagatgtccggtgaggctgaagactcagaggaggagcccgtcggcgcccgtgcggtgcggccgtcggagacccagatggtgtagagaatcgatcgatcgacgcgtgttccttcctgcactgcacatggtgggctatcatgtcctcaattgttttttttccacgttaagtcaaacctggctgtgttttgatgtgcacaagtcgttcgcatacgtagtacgtgtgtgatggtagagcaggtgaatcgcatcgcatgtggcagtctggtagaggtccacgtgtgataatatataggcgggaaagtagctaggtgaactttacactcgtatatccaaccatatataatcggtt

SEQ ID NO: 3061 - DNA, 1516 bp, Zea mays
  Clone ID: 700240441_FLI
gaggagcactggatgaaccaaaccctggatcacttcaacccgacggaccatcggcaattcaaacagcggtactacgaatttctcgactactaccgagctccaaatggcccgatcttcctatacatctgtggagaatctacgtgcaatgggattggcaataactacttagctgtggtggcaaagaaatttggtgctgcattggtttctcctgagcatcgatactatggaaagagttctccttttaacagtttgacaacagaaaatctacagttcttgtcatcaaagcaggctttatttgatcttgctgttttccgccaatattatcaggaaaccttaaatgccaagtataatcgctctggggcagacagttcttggtttgtttttggagggtcatatgctggagcactcagtgcttggttcaggttgaagtttcctcacttgacatgtggaagccttgcaagttcaggggttgttcttgctgtatacaactttaccgattttgacaaacagattgggatctctgctggtcctgaatgcaaggcagcacttcaagaaataacaggacttgttgatggacagcttcagtctggccgtaactcggttaaggagttgtttggagcgacaaagttagaaaatgatggtgacttcctctacttactggcagatgctgctgctattgcgttccaatatggtaatcctgatgtcttgtgctccccactagctgaagcaaagaagaatgggacagatttggtggaaacatttgctagttacgtgaaagattattacattggaaaatttggggcgtcagtagcatcatatgatcagcaatatttgaagaacacaactcctgctgaatcctcatatagactatggtggtaccaagtttgcagtgaggttgcatatttccaggtggcaccaaaaaacgatagtgttcgttccccaaagatcgacacgaggtaccatttggacttgtgcagaaatgttttcggcgaaggagtctaccctgatgtctttatgacaaacttatactatggaggcacaggaattgcaggttctaaaattgtttttgcaaatggatctcaagacccatggcgccacgcttctaagcagaaatcatcagacgaattgccatcatacttaattgagtgcaagaactgcggacactgcagtgatctctctggatgccctcaagctccttcaaacattgaaggtgattcatccaagtgctcacctcccgaagctctgaacaaagtaaggaaggagattgtcgatcacattgacctgtggctatcagaatgccaagagcaaggacatgacaaggagccatggctgggaagcagatggagcatagctgctatttgatcaatctgtgaagctataagcatgtgctgctagagtaaccaaggcaaatatgctttctttttcttgcagcactgtggtttatcgtttcggcaaactatgtgggctgctgagtaatccacctgtggcgaataaataaagcagtcagttctcagtc

SEQ ID NO: 3062 - DNA, 835 bp, Zea mays
  Clone ID: 700240467_FLI
gtgaccaacagtgactccgagaagacgaacaacaccatcctccagatcaaccgcatcttcaaggaccgcatcggcctcggcggcatcttccacagcgccgtgcaggtctatggcgaggacgagtggtcgttcgggttctgcgagtccggcagcggcgtgtttagttgccccataggcaagaaccccatgtacacctaccgggagcgcatcgtcctcggggagaccgagtgcggcatcgccgccgttaaccggatcctgcgggagctcagccgcgagtggccgggccactcgtacgatctcctctccaggaattgtaaccatttctgcgacgtgctctgcgagaggctcggcgtccccaagctcccaggttgggtgaatcgctttgccaatgccggtgatactgctgtggttgttgctgagaacacagcagttaagttcaggcaggctaaaacagaaatcgtgaatgccagtagagtagcatacagatttatggcaggcctgacttccaaaaatcaagcctcacctgagtctccgggtaacaatcaaaatagaggcagccctagtttccagggagcttggttcaagaacatcgtctcagctggtgcaaagccttcatcgagtggatcgacacgcacacattttcaggacgctgatgatggaacccctttgcaacatcaaagttcaacagagcaatcaacacagttgtagttgcttcccagcatatcaaccaacaattgaattgaatctgtcaatctgttgtgtaacattagctaatatctgttcgaaacctgttgttaaattgtatcagtagtgtaacagttgctgagatttgttc

SEQ ID NO: 3063 - DNA, 1560 bp, Zea mays
  Clone ID: 700240470_FLI
ggctttcctcaccatcctcctcctcgcgcgcatttccagctccattgccatctcgtccaactacatctcaaggagcgccgagcagcaggtcatcgccaccgtcgcgccggccattgttcctgacatcgacggccagggcgcgcagccgttcctcacctcgccctccggatcgtacgccgcgtacctccgccgcgccgtggacggcgccggcggcctcggcggggacgcgtgctatgtccaagtccagcaagatggcgccagcggcagcgtatgggagtcggactgcaccccggtgggtggcgctgacgcgtgcgacctggcgttctcgccggtgggcctcgagctcttcgccggagggcagtcgctgtgggacaccggggtcgacgccgatccgggaacgctgagccttgacgacggcggcgacatgaagattgttagcaaggaaggtgtgacggtgtggacggcaagcagcgagccatggacggggcagcagtgcggggctcccttgccggtgtcaacgaccgcgccttcaatggaggcgctcccaccgccgccgtcgactgccactgccactgccagcacaaaactcgtgacgccaccagcagcgactcttgctggtgcgggaagcgcggtctctccttacggagaccaaccagtagtgccgccacctgtcgacacgttgccggactttccgggccagccgccagttgacacggcacccgaacagccactgccaccgccgccagcagacgcgtctcccgccttgccggacctgtcgctgccaccgccgccagcttacacgcctcccgactcgccggaccagccgctgctggcacccccgccagctgacatgttgccagacgagccgctgtactcatcgccgcctccagctccagccacctttggccctcaaacgccattgccgccattcggcgtgccactcgccgccccgccgaccggcgacacagtcccggacacggccacgccatctggcgagccaggatcgcctggccgcgtgcccttctcggggccatctcctgccggcatgccgcgccagcacgggcatccacactagcagccccttgtaggatcgccgccgctgccggacgcgctggcgccgggcgtccacggtgcgggagccggcagccggtacccccttcggccatgggcagcagcaggcggggcagggcgtgttcggccagcagccgcagctgctcaacggcgaggggcagccgttggaggacagcgccgccggtgggtggtcaagaacaagaagcgagagcggcagggtggccgcgtgcgtggccttgttcggtctcatgacgttgggctttgccttttagtttgtttcccttttgtgttgtgttttggtttttgggattgcatggtcatttctgtagtactgtttattctccgttggtctgataggaggggtctttttgtggattgtagtaaaaaaatttgtgtgtaaaacctgtcatacggtgcgctgtctgattcattctgtaggatagcatgatctaccgtatgtacatctgtgtattatcgtgtgtaaatgtc

SEQ ID NO: 3064 - DNA, 1664 bp, Zea mays
  Clone ID: 700240523_FLI
tttcaccaaggctccgacgaccaccggtgaaagtgaaacgtcggtgtccggcgacgaccgagttcccatcgccggaaatcatggagaagcttccgtcacagcagcaggttgtgctgttggcgagtcctggcgcgggccacctcatcccgatggtggagctcgcgcagcggctcgccgctgaccacggcttcgcggtcacgttggtcaccatccccggcatgtccaacccggcaacggaggccgtcgtgctgtcctcgctgccgtcctacgtcctgaccgcggtgcttcctgctgttcctcttgacgacctcccgtcggacatcggcttcggtgccctcgtgttcgagttcgtccgccgatcgctcccaaacctccgcgcgctcatggaggacgccagccgcggctcggtgaccgcgctcgtatgtgacttcttcggaacctcggcgctgccgctcgccgcggagctcggcgttcaggggtacgtcttcttgccgaacagcttcgccatgatctccatcatgcgccacctcgcggggctccatggcgacgccgctgcccccggcgaataccgtgacctcccggacctgctcccgctcccagctggaggcctggttcttcaccacgccgacctccccgaagggttccaggaccggaaagacccggtgtacgcctatcacgttgaggaggcccggagatacggccgcgccaacggcttcttggtgaacagcttcgaggagctggaggtcgtcatggtggaaacgttcaagcgggacgccgaggacggcgcgttccctccggtgtaccctgtgggaccctttgtcaggtcaagctccagcgaagaagccgatgaatcgggctgccttgagtggctggatcgccaaccggagaactcggtggtatacctctccttcggcaccgggggctcgctatccgtggagcagacggccgagctcgccgccgggctggagatgagcggccacaggtttctttgggtcgtgcgcatgccgagcctcgacggcaacccctgtgcctatgggtcgatgcccggcgacaaggacgacccactggcgtggctccccgagggattcttggagaggacgagcggccggggcctcgccgtcgtggcgtgggcgccgcaggtgcgcgtgctgtctcactcggcgacggcgtgcttcgtgtcgcactgcgggtggaactcgacgctggagagcgtggcagccggcgtgccgatggtcgcatggccactgtacgcggagcaaaagatgaacgcagccatcctgaccgaggtgaccggcgtggcgctgcggccggcggcgcgcggcaacggccacggcttggtcacgcgcgaagagatcgcggcttcagtgaaggagctaatggagggggagaaaggaagcgcggtgcgcggccggacgagagagctgcgtgaggcttcgaagcgtgcgtggtcgtcggaagggtcttcccggcgggcgctcggggaagtcgccggcaagctgaaggctgcacttgtcaacgggaacggatcggctccatgattcgttttcttcccgtgaatcggatgagataaaaaaaactattttttactgcaattcattgggtgtggtaattatggcatatgtatttatggactagctgtatctattcaaagttttttttgcttg

SEQ ID NO: 3065 - DNA, 1701 bp, Zea mays
  Clone ID: 700240526_FLI
gggcgtggacgaaattgttcccatgttcccggaacgaggaacgtggcggtttctaagtgcatgacattgatatcggttacttaatggaattggttgcttgctttctaagtgatttcgtttcctttgttcgtttttctgaccggtgctatattgctgccgcctctaataaaaatgtgtttgatttcagcttcaaggtcttgtctttgggtagaacatgtcgtgctttgcgtgctgtggtgatgaagatacccaagtaccagacaccagggctcaatacccaggacaccatccagcgagggccgatgcataccgcccttctgatcaacctcccaagggtcctcagcctgtgaaaatgcaaccaatcgcagtccctgctattcctgtggatgagattagggaggtgaccaagggttttggtgatgaagctttgattggtgagggatcctttggcagagtatacttgggtgttctaagaaatggtaggagtgccgcggtcaaaaagttggattctaacaagcagccagaccaagagttcttggcccaggtctgtctttccctgtttatgaaatgcagtgcatctattttatcccgtggtttgaagtcaacatgaaattcgtctacaggtgtctatggtgtcaaggctgaagcatgaaaatgttgtcgagttgcttggttactgtgctgatgggacactccgcgtccttgcttatgagttcgctacaatgggttcccttcatgatatgcttcatggaaggaaaggggttaaaggggctcaacccggtccagtcttatcgtggtcgcaacgtgtgaagatagcggttggggcagcgaaaggcctcgagtatcttcatgagaaagcgcagccccatatcatacaccgagacatcaagtctagcaacgtccttcttttcgatgacgatgtagctaagatcgctgactttgatctgtcgaaccaagctcctgacatggcagctcggcttcactcaactagggttctcggaacattcggataccatgcgcctgagtatgcgatgactgggcaactcagctctaagagtgatgtatatagttttggggttgttcttcttgagctgttgactgggaggaaacctgtcgaccatacattgccaaggggacagcagagtcttgtgacctgggctacaccaagacttagcgaagacaaggttagacagtgtgttgactcaagacttggaggggactatcctcctaaagctgttgcgaagtttgcggctgtcgccgccttgtgtgttcaatacgaagcggacttccggccgaacatgagcattgttgtcaaggcgctacaacccctgctgaatgcgcatgcgcgggcgactaaccctggagaacatgctgggtcataagctttgcgtttgcttctctccctcttgttcttgtatgataggtaaggtatatgactcgtcgatgtcgttgttgcggacatgtggctggcagcgtgtaatgtctgtgattattcttcccctgagctgtaaacaagattcttgtatccccacagtatttgattctttctattggtgccgtttttacctatctcaaggcgcaactgctcaagcaatcatccaaacaggccctacaagtcaagttgagcaaattgcgggtaaaaggaatctaatttttttaaattcctctgaacagaatgcctccaggctccggtgaataatc

SEQ ID NO: 3066 - DNA, 498 bp, Zea mays
  Clone ID: 700240543_FLI
atcacctgtgtctaggttgggagcaaagcaaagagagagaggaaagctagctagctagcatggagagtggcagcaagaaggtcgcagccggtgtgttggtgctgctgcttctccagctgatggtagctccgacgacggcgacagcccgcctcctgcaggcggatacctcccccgtgtttggcctggacttcatcgcgagggagtttggccatccagatggagccatctcctgtggtgaatcatgtgtcatcataccatgcgtttcgacactcttgggatgccgatgtgaaaacaaactctgcgtgaaataaactcgtgacgccgctgctacagtcgggacgaggccatatatctctgatccctttacgtgtgaagaaccagctccatctttgtaacaaatttgtgttgggagaaacaaaaagacggtggtgtttaacttattgtgaaaggtgatttaataataatatataataaacggtacgttggatgtgtgtactc

SEQ ID NO: 3067 - DNA, 1963 bp, Zea mays
  Clone ID: 700240631_FLI
ggccgcggctccgtgcgcacccagttgctgaggttgcaacgctgcagccggcgaggatcggatgaaccaccaacccctcctataaatcctaaccgagtcctctgcttctgctcccatccatctgtagagtgcaacatgcagtgccccgtggacactgctgctagtggaacctcgccagtgatgcaattccatagcaatgctgacgagtctatcgcccattcatctccattggcaacattaatacaacgttcacagcgccattgctatggggatggaaccccaggcgaatttccccttgctgtgagcccctccattgttctccatgtgctctcatcttgtgatctaggtccgaaagatctcgccaatctggaggctacatgcgtatttttcggcaaacctgcaagttttgcaccagactttgcattgtcacttccggagcttgcggcatttgatatgtgccagaaaaggaccatgtttaagcagatgaagcaagaagatcaggagtgtctgaaacaacggtgtggaggctcttggaagcatgttcttgggtacattctggttagggagaagaatggttctcgggtgattgccgggccaggccacagcatcattatcacctcaaatggagatgtatattcgtttggagcaaactgctccggtcagcttggccttggggattcagaagaccggttcaagccatgtgttattaggtctctacaaggcatcagaatcacacaagctgcagttggttcgagatgcacaatgcttgtgagtgacacaggaagcgtctactcatttgggaaggaggatttcagggtcgcagaactagttgacggtgctcattttcagatcacaactcctaggattgaggagtcactgaagggtgtgtttgtagttcaagcagccatagggggttacttctctgcagttctgtccagagagggtcgagtgtacaccttctcatggggcaaagccgagaggcttggccacagttcggatccttcagatgtcgagcctcgtcttctccctggactcgaggatgttcctgtcgcatacatctctgcaggaaattgctaccttcttatgctggcctaccagccaaatggaatgtctgtgtactctgtaggctgtggtttagggggcaagcttgggcatggatgcaaaaccaacaatgggatgcccaaattggttgaacagttccagtccatgagcttcaaaccagtttcaatagcagctggcacttggcatgccgtggcccttggcgctgacgggcgtgtgtgcacctggggctggggccacaccggttgtctggggcacggcgatgaggagtgcagggctgttcccacagtggtagaaggattacgcgacgtgaaggcggttcatgtctccacgggtgaatacacgacgtttgtcgtcgctgagaatggggacgtctactcctttggatccggtgaatccttggctttccagttggacgatgaggcggaggaggaaccggattcctcgacaccgagcatagtcagctcgctcaaggatctgaacaagaaggtcgtgcagatcagccacacaaacgcctcgtactggatgaactcggaaatgggccacccgcacacatttgcggtcatggactccggcgacgtctgtgccttcggaggaggggtcagaggccagctcggcgtgaagctgcatgagggcgtcgaaaaagtgcgcgtcccgatgaatgttccaatcggtctcaattgatccccttccaccagcattcgcctgaacattttgcgatggcactctgcttccgcgaacattctgtttgggccttcagaccagtggcgtaagcttagacatgctaggatgtgaatattagggatgatttgtttttatctgaactcttcgaagtgatatagatcgtctgcataaagtttacctaatccgtgaccgctcttttatccaaaccatttaaagcacc

SEQ ID NO: 3068 - DNA, 843 bp, Zea mays
  Clone ID: 700240638_FLI
cacatgaaggttgtgggaagataactatcatgtgtgccagtacccagaatgtggccgaagatttacacaagaatcaaaactaagagctcatatcagggcacaacatgagaaagctgtttgcctgcagaatccaggtgcttcggctatgaaccatagtgcaattggagaacagcatcagccccctaagccagcaaaggtctcagcaacgcctccagctccctcagctgagcgcccttacgtctgcccctacgatggttgcgacaaggcatacatccacgagtacaagctgaacctccatttgaaaaaggagcatcccaaccactaccaggatggtggtccacaaggcgctgccccttcaaagcgcagcatctcgaagagttcccataggagcagaccggacatcactgctagaatgccaccagccaaggtctccaagcgcaaaggagggtacgcagcgccatcgccagctgtgaacctccctgaggagcaccttcccgaggagcagcagtggccaaggaaagtgatgtacgaggatgacagcgaggagaccgaggaagaagaggggggcaacaatgtcgaggatagatggaactacaacagagctgctagtagcgatgatgaggaaaccgaagacgaacaatgagcttctagcaggcgtccatctgttctgtagttgtgcatataccataaattttaaactttgagggttatagtttttgcatacatgtaaaattttaaaataaggcggacttgttgtagacagcataggttgtaggtggtctgccccttctcaatcagacatgccatgagttcagaaaggataatggatcattgttctcgttt

SEQ ID NO: 3069 - DNA, 984 bp, Zea mays
  Clone ID: 700240655_FLI
aacctccattgcaggcaggcacatcactagctagtacagaaaatggagcaggccggtgacgagacgccgggagagatcgggcgagaggctgctcgccgtgaagctgcgctccggagcggcggcggagacgccggagagcgcgtagacaaggctgtggtggacggcggagaagacgagcggtttcgcgtgcagcggaaatggaggcggttcttggcccatgtcgggcccggagctctcgtggccattggcttcctggatcctagcaacttggaaaccgacatgcaagctggggctgacttcaagtaccagcttctgtgggtgattttagtcgggatggtcttcgcgcttctgatccaaacactggccgccaaccttggagtgaagacaggcaagcatctcgctgagctctgcagggaggagtacccacgttccgtcaacatctgcctgtggatcatcgcggagatggcggtgatatccgacgacatccccgaagtgctgggcacagccttcgcgttcaacatcctgctcgggatcccgctgtgggccggagtcgtcctcacggtgctcagcacgctgctgctcctcggggtgcagagattcggggcccgcaagctggagttcgtcgtggcggctttcatgttcgccatggcggcctgcttcttcggcgagctgagctacctgaggccgtccgcgggggaggttgtcgtgggcatgttcgtccccaggctccgagggaaaggcgcggcagccaacgccatcgcgctcttcggcgccatcatcacgccgtacaacctgttcctgcactcggcgcttgtgctctccaggaagaccccgcggtcagtgaaaagcatcagggccgcgtgcaggtacttcctcgtggagtgcagcctggcgttcgtggtggcgttcctcatcaacgtggcggtggtcgtcgtcgccgggtccatctgcaacgcggcgggcggcaacctgtccccggtcgac

SEQ ID NO: 3070 - DNA, 1202 bp, Zea mays
  Clone ID: 700240681_FLI
gggtaacactgcaaaagcactcctctcttcgtcctccccctcccacctccatcccatcacataccataccattccataccaccagagaagaaccagtctcgctcgctcccaactcccaagccaagccggatcccaaatcggcacagcgcacccactccgctcggtcccttcgttcacccccatcatccatccatccatccagccatgggcggcaaggactgcggcaaccacggcgaggacgacctgcggcggtcgtgccggcgcctgctagcgatcctcctagtcctggccctgatcgtgggcgtgatcgcgctgatcatctacctggtggtccggcccacgcacccgcgcttctacctacaggacgcgtcgctccagcagctagacctgtccaactccaccaccgcctcctccccctccgcgtcctcgtccctcctctccacgacgctgcaggtgacgctggcctcgcgcaacccgaacgagcgcgtgggggtgtactacgaccggctggacgtgtacgcgtcgtacaagtaccagcaggtgacggtggccgcggcgctgccggccgtgtaccagggccacggcgacgtggacgtgtggtcgcccgtgctgtcgggcgggcccggcgtccccttcgcgccctacctcgccgacgcgctccgccaggactgccaggcgggctacctcgtcctccaggtcaaggtcgacggccgcgtgcggtggaaggtcggcagctggatctccggccactaccacctcttcgtcacctgccccgcgttcctcgtcaccgccggcggcaacggcgcccccggcgcttccgggttcaggttccagaccaccacctactgccacgtcgaagtttaatagattaggagcgagaggaggaggagggaggggaaggaagcagagagaccatggtccatggctctgctgctcctcctgctgccgttgcctggtgtggtaataactctctctatctctctctctgtccgctgctggcgttactgctgcagtgatgcgggatgtaaaggaggggtaaaaaagttcctttcgttttcgcctccctcttttttttttgtttttttttttttgcatcttctccttcacctttccatatactactagtatgctctgtcgactgttgttcaaaggaagcttccaattgtcaataaacattttggatcggaggatcaattgcaatt

SEQ ID NO: 3071 - DNA, 1635 bp, Zea mays
  Clone ID: 700240685_FLI
cttctccctcttgccggtcccgaataaagagcagcagcgcaagaggtcggtagagcgagaagaaggcaatggcggccgagagcttccttttcacctcggagtccgtgaacgaggggcaccccgacaagctgtgcgaccaggtgtcggacgccgtgcttgacgcatgcctcgcgcaggaccccgacagcaaggtggcctgcgagacctgcaccaagaccaacatggtgatggtgttcggcgagatcacgaccaaggcgaccgtggactacgagaagatcgtgcgcgacacctgccgcgagatcgggttcacctccgacgacgtgggcctcgacgccgaccgctgcaaggtgctggtgaacatcgagcagcagtcccccgacatcgcgcagggcgtgcacgggcacttcacgaagcggcccgaggagatcggcgcgggcgaccagggccacatgttcgggtacgccaccgacgagacccccgagctgatgccgctgagccacgtgctggccaccaagctgggcgcgcgcctcaccgaggtgcgcaagaacggcacctgcgcctggctgaggcccgacggcaagacccaggtgacggtggagtacgtgaacgagggcggcgccatggtgcccgtccgcgtgcacaccgtgctcatctccacccagcacgacgagaccgtcaccaacgacgagatcgccgccgacctcaaggagcacgtcatcaagcccgtgatccctgagaagtacctcgacgagaagaccatcttccacctcaacccgtccgggcgcttcgtcatcggcgggccccacggtgacgccggcctcaccggccgcaagatcatcatcgacacgtacggcggctggggagcccacggcggtggcgccttctccggcaaggaccccaccaaggtggaccgcagcggcgcctacgtggccaggcaggccgccaagagcatcgtggccagcggcctcgcccgccgctgcctcgtgcaggtgtcgtacgccatcggcgtgccggagcccctgtccgtgttcgtcaactcgtacggcaccggcacgatccccgacaaggagatcctcaagatcgtgaaggagaacttcgacttcaggcccgggatgatcagcatcaacctcgacctgaagaagggcggcaacaggttcatcaagaccgccgcctacggccacttcggccgtgacgacgccgacttcacctgggaggtggtgaagcccctcaagttcgacaaggcatcggcttaaggttgggagtgtcactgtggacatgaggactaccttcctctggctctgctgttacctgcaagcattgctgctgctggatgtgtgtgtttgatcagtgactggctgctgctccatagaagatgaacggagagaaggatgatgaagggctttggcaatcgccgctgcaactgcaacccatgccatgccggcttagtgattgggtataatttggcttggcagcagccagcattattatgtgctgatctgttatcttttactagtttggtcgtccgatatctttctttctttttccccccttttcgactctgtactgaaactgctgagagattcgcagtattgttgtatcgtattcatatgctactgttactctggtgcccctctc

SEQ ID NO: 3072 - DNA, 1317 bp, Zea mays
  Clone ID: 700240687_FLI
cgctcccctacctctccagcatcctcccgtctccgtcgtctcgtctccgctcctcacctcgccagccatgggcaagatcaagatcggaatcaacggtttcggaaggatcggcaggctcgtggccagggtcgccctgcagagcgaggatgtcgagctcgtcgccgtcaacgaccccttcatcaccacggattacatgacgtacatgttcaagtacgacaccgtgcacggccaatggaagcacagcgacatcgccctcaaggactccaagacgcttctcttcggcgagaagccggtcaccgtctttggcatcaggaaccccgaggagatcccgtggggtgaggctggtgctgagtatgtcgtggagtccaccggtgtcttcactgacaaggacaaggctgctgcacatctgaagggtggtgccaagaaggttgttatctctgccccaagcaaagatgcgcccatgtttgttgttggtgtcaatgaggacaagtacacctccgatgttaacattgtttccaatgctagctgcaccacaaactgccttgctccccttgctaaggtcattcatgacaactttggcattattgagggcttgatgacaactgttcatgccatcactgccacccagaagactgttgatggaccctcagccaaggactggagaggtggcagggctgccagctttaacatcattcccagcagcaccggtgctgccaaggctgtcggtaaggttcttcctgaattgaatggcaagctcactggcatgtccttccgggttcccaccgtggatgtgtcagttgttgacctcactgtcagaatcgagaagggggcctcttacgaggaaatcaagaaagctattaaggctgcttctgagggcccactcaagggtattatgggctacgtggaggaggatctggtttccaccgacttcaccggtgacagcaggtcgagcatcttcgacgccaaggccgggattgccctgaacgaccacttcatcaagctcgtctcttggtacgacaacgagtggggctacagcaaccgcgtcgtcgacctgatccgccacatgttcaagacccagtagagagagatatttctgcctccctatcgtgggtcgtccccaatggcctttggtcgcagaccatctttgctgcttgtctatgctgagaataaatgtgaacggtgcccctggacgctggatccatgctggttttggacacgttgtctttttgtgtttaacttatctgctaccgtcctgtaacgaattcactaagttctagttcttttgtgctttgttaagaatataaacaatgaggtttc

SEQ ID NO: 3073 - DNA, 1069 bp, Zea mays
  Clone ID: 700240708_FLI
gctggtgcatccgtgcaggtaaccattttcctttgcttacttttcttgaggttgggaaataacaaaagccaaatagccaaaaaaatccccttttctttctgtggcacttctctaactaggaactttctcttgaactgatgttggaacagtggaatccaggagagggaacggagggtcgacagcttgtgaggtgctcttgttccaccacgaggacatgggcatcccgtacgagatcgcaaagctcggtatccggcaagggatgtggggatgcgtgaagagaatcgagcctgggctccgggcctatcagcaagccagggctgcaggggagccggtgtcacggagtgccctgatggcccagatcaacaccaaagtcggcgacagctttgtccggtcgctggagtccgacagcgacgggtccgaaaccgtggaagcggaagagaagcctgcgaggaaccgtgtggcgaggttccttgtgcttggaggggcagttgctctggcctgtactcttgaccaagggctcctgacgaaggctctcatcttcggcgtcgcgcggaaattcgtcgggcagaggaaggcactgtagcatctctggcatttatttctcagcgtcgtccgcttggcccgtggtccgcactaaccggacctgtcctttcactgtcgtagagtggaggatagaggtggttcagtgtctgcctaattggggcaaatgccattgaccattgtggctgaaagagaacagagctgatgaaaaacattttggtgtacagatatgctgccggctgttggatagcgaggaatggggaatagagcaaacaatgtacttctcgtttggagaacggaactcctacgatatatataaatgtgtttcatctaatcttgtatctcagacaagaacagatcagatgactgtgcagatgagaacaagcatttttctatgtagcttactgcggctacggcttctacaatattttgtttctatggattgcaggattgcagccgcagccacttgcagccgcagcagtggctgtcagccaactgaacaataatttgaatctagaatttgaattcc

SEQ ID NO: 3074 - DNA, 1267 bp, Zea mays
  Clone ID: 700240731_FLI
caattgtgtctatagagaactctggtgaaaaaggcgcaatggagaaagctgatatgtgtgtggcatcaacttctataacaaatactgatgatacttctctttgtattggaattcactctcatgatagtattgttgaatgccaggattatgccatgcaacatactctttattgtgagaagcaccttccaaggttccttaaacgtgccaggaatggtaagagtcgactcgtttctaaagatatcttcgtcaatctactgaagggatgcacatcaagaaaagataagatatgtctgcaccaagcatgtgaatttctttattggttcttgagaaacaacctttctcatcaacacactagtcttgctagtgaacatatgccccagatattggctgaagtgtctaaaaatccagatgttggagagtttttgttaaagttgatatctactgagagagagaaactagcaaatatctggggctttgatacaaatagatctaagcaaatatattctgaaaacaaagaagggtctctagtgttgcataaagagggaactaatctttcatctggtccgaagtgcaaaatctgtgctcaccagttctctgatgatgaagctcttggattacattggacaactgtccacaaaaaggaagcccggtggctgtttagaggttattcttgtgctgcatgcatggaatcatttaccaacaaaaaagtccttgaaagacatgtgcaggatgtacatggggctcaataccttcagtattcaattcttgtaatgtgaccaggaaggagagtctattcatcacttgcttgtttcttgtgtcctcgcgaggcaattttggtatcttctcctccagcgggtcggcctgtccgcactctcccccgggatggaagatatcaactttgaagcttggtggagtagatcggctgaggttactcctaaggaccttagagatggccttaactctttggtggttcttggggcttggactatctggaggcaccgtaatgactgtgttttcaatggtgctcagccttctatagctagattgcttacctcagccagtgatgagttcaatatgtggtgttttgcgggggccaaaggcttgacccgtctttcggacctagcttttgtgttcaaccccggttagaagggggttattattactagtgttgtttgtgtgtgtgtttgtgggagtggtgtttaggtcattgtaattattatcatccttcttttaatgaaatgatacgcagctctcctgcgtgttcgag

SEQ ID NO: 3075 - DNA, 731 bp, Zea mays
  Clone ID: 700240739_FLI
gactccaagaaggtgaccccttgctgcctgctacaaggcgctcaacgagcaccatgtcctcctggagggtaccctcctgaagcccaacatggtgactccaggctccgactccaagaaggtgacccctgaggtgattgctgagtacaccgtccgtaccctccagaggaccgtccctgctgctgtgcctgctgttgtcttcctctctggtggacagagcgaggaggaggccacccgcaacctcaatgccatgaacaagctcagcaccaagaagccgtggtccctgtctttctccttcggccgtgccctccaggcgagcaccctcaaggcctgggctggcaaggtggagaacctggagaaggctagagctgccttcctcgccaggtgcaaggccaactctgaggctaccctcggcacctacaagggtgatgctgccgccgacaccgagagcctccacgtcaaggactacaagtactgagttgcttctctttgcgtgcccgttttggaactcctgcctacgagctaggttgcggagtgtggtttgctcgttagagcttattttcggacatccaaaaaacatgcttcctatgtgggatgatggttatctttatatttgtatgttaattagtctctttgctgttaaatttcgtgtaagttggtcctgccgatggagaatcgagcagctccctttttttgttctatcaactatgctgtaattctggctatgtatcggc

SEQ ID NO: 3076 - DNA, 247 bp, Zea mays
  Clone ID: 700240754_FLI
caaactcttggcattctacctctcacatgtttccaactcggatgaagcaaacaatggccatccgaaacaaaagaacatggaagtgcgcacaagaagatgaactttcagagcatccagctcagatgcaacaagccagaatgaggaaatgctacgtttagcttccacacttaccaagttatgggtgtgcacacagcacacgttaaatctgtaactgtaaagcaactaacaatgtccaattacttgagtc

SEQ ID NO: 3077 - DNA, 799 bp, Zea mays
  Clone ID: 700240779_FLI
cccttctcgtcctcctcccgactcccacccaaaaaaaaaaaaaacttcgaaggaggtttcgatcgcgaaaccgcccagggcccgccccgcaagtgcatggcagtgagcttcctggccaatgaggtgtcggacctgtgcatcggcaagccggccgtgaggtcgctcccgctctccgccgccgccggcgaccttgccgccgcgctccggagggtggcccgctctggcgcaccatcctgcgtcgcggtgactggaccagcgcgcgccgtcgtcggccgggtcggcctcgcggacgtgctctgcttcctgtgcaccgaccccgaagcgctcgcgcgccccgccgtcgtgttctccaagccggtctccgcgctcctgccgaaggacggcgctggagaggtccgccgcgtcgatccccgctcgagtatcttggaggcgcttgatgcggttctgagcggggcgcaggtgctcgccgtcccgctacgcgctggctggcgcaagaagcagctcggcggcggcggaggctccgccgccgccggcgacttctgctggctcacgcaggaggacctcgtgcgctacttcctcaactccatcggcctcttctaccatgtggccgcgcgctccgtgtcctcgctcgggctcgtgcgcaccgacttcctgtcggtgcgccccggcgaggcggccctgtcggccgtgcccctcatccgccgcgccgtcgccacggagacggcggtcgccgtggtcaccgaagacggccacctgctcggcgagatctcccccgccctcctcgcggcctgcgacgaga

SEQ ID NO: 3078 - DNA, 1712 bp, Zea mays
  Clone ID: 700240804_FLI
tcccttccccatcccgatgagcgtgtagagtatgagttctggacaaacagtaatgatgaatgtggtcctaaatgtgatatgcaaatggacttcgtgaggagctttagaggaactgcacaaattcttgagaaaaagggttacactcagtttactcctcattatatcacatggtattgtccagaagcttttgttgatagcaagcaatgcaaatcacagtgcatcaatcatgggagatattgtgcaccagacccagatcaggattttagccaagggtatgatggaagaaatgttgtggttcaaaacctacatcagatttgtgtattcaagattgctaatgagactggaaagccatggctgtggtgggattatgtgcatgatttcgcacttaggtgtccaatgaaggataagaaatacaataatgactgtgcccatgatgttatcaaatcacttggattggacatcgagaatataaacaagtgtgttggagaccctgaagccgatgtggaaaatgaaattctaaaggcagaacaagatgcccaaattggtcatggtaaaaggggagatgtcacaatactaccaacccttgtcatcaacaacaagcaatatagaggtaagctggacaaagttgctgtcctgaaagcgatctgttcaggatttgaggagacaactgaacctgctatttgtttgagcgaagagattcaaacaaatgagtgtttggagaacaatgggggttgctggctggacaaagctaataatgttactgcatgcaaggataccttccgcgggcgtgtttgtgagtgccctattgtgagaggtgtaaaatttgttggtgatggatatacccattgtgaagcttccggtgttggtaggtgtgagatcagtaatggagggtgctggcaggaaactaaagatgggaaaacaatctctgcctgctcaaacgaaatatctgaaggttgtaaatgtccaatgggtttcaagggtgatggagaaaaaagttgtgaagacattgatgaatgccaagagaaactttattgtcagtgcaagggttgcagctgcaagaatacgtggggaagctatgaatgcagctgtggtgatgacaatatgctatacatgagagagcatgacacttgcatcagcaaagagggaactgccactactgttggctggagcttcctctgggttattttctttggacttgtttttgccggggttggagcatacgctgtgtacaaatacaggctgcggagttacatggattcagagatccgtgccatcatggctcagtacatgcctctggataaccaagaaggagcaaaccagcatcaggtcgtgcacgccaatgatatctgaagctgcactccttttctgaagcagaaatagagggggcgtgcaacatttcacttgtgctgctgcatcattgggtcatgggttttacaggtataggtcaactaggctcaaagatacacaggttatgcgagatcaagatctactgtaccatgaattaagatttaagagagagacgttgtgcgcctcttgttacgacacttgatgaacagcatagggaatgataccatcatagttttagtagtccttcgttgccttcagtttgtcttcaaagagttcttgttgcctcttcacatacatgtaaacactgtaaataccgttacctgaataaagcttcagcctgctaggctacaagcagggttcactgt

SEQ ID NO: 3079 - DNA, 833 bp, Zea mays
  Clone ID: 700240807_FLI
cgacaatcagctgagaaagcatttattggtggtaaatcttgcaaaggacacacactacgatttatgtggttgacagcatctcctggctcaaataaccattataggcatcagaatacctcagttcatgtgaggccctctactatccctggccatactcaaagcatatcatctgagtcccccagccctgttgggaaagtatcatctcttgctacatctgttatggtagccattcctcataataaatccatctcaactgtggaaaatacaaagacttctccagcgggagtttccaaagtttcatgtggtagctcctctctatcatcaaatgataagtgtccttctgaatgtggttccacaaggaatgttatctcagattctgacgttccacaatgaggcttaatgctatctggacgaggtggtgttatgaatcttgatttggtggctcggctatttcataggtctacacctagtcaaaatcccatcacatttgaagttattggaagaccttttgaaaactttggtgtttaatcgtagggcagcgcggttaaggctgtaaaaagaaaaaaaagagaatgtttaaagaaatatgggttcaaaagcatactggaagtggaggctttctcggtaaccaccgtctaatcatctcattgttcacggagactgagtggtgctaggttatttgtacacttcattttgggggcgcatcgtgctgaaagcagttggtaatatgctaattctgtagtttgtagctcctgctgaaatcagctttgtggattatgttgtgagcacgatgaacatcaaactctcgcaagtcccatcgaggcatcttgtcg

SEQ ID NO: 3080 - DNA, 1786 bp, Zea mays
  Clone ID: 700240826_FLI
gggtgtgatctgagtagtccaccatggatacctcgaacgccttcgcggtcgtcactctcctcctactcccgctgcttctcgccctagcgcaacttgtacgacgtggatctccccagtacccgccggggccgatggctcttcctgtcatcggtcaccttcacctgcacctcttcgagaggcccctccaccgcaccctggcgtgcctcgcagctcgccacggcactgtcttccagctctggttcggttcccgccgcgtcatcgtcgtgtcgtcggctgatgccgccaaggagtgcctggccacgctcgacgtggcgttcgccaaccggccgcgtctgccgtcaggccggatcctctcctacgactggaccaccatgggcacctctaactacggaccctactggcggcgcgtccgccgcatcaccgtcacccatattctctccgtgcactgggtgcagcagttcgccgacgtgcacgagcgcgagacgcgggccatggtgcggggcctctaccgccccacggcccgcaacggcgtgcgacgcgctcgggtggagctcaagtcgcggctgttcgagctgctgatgaacgccatgatggggatggtgtgcgctaagaggtactacggctgcgacgggaaggagaacgagacagaggcggaggtgagcgaggaggcgcggtggttcagggagatggtggaggagaccatggagctgagtggcgcgtcgacggtgtgggacttcctgccggcgtgggcacggtggttggacgtgggcggagtggggcgccggctgtggcggctgcgggaaagccggactaagttcttgcaggggctgatcgaggagcagaggaaggagatggagaatggcccgcagccgcaggcacggaagaccatgatcggagtgctgcttacgctgcagaacgaggaccccgacgcctgcccggacaacctcatccgcaccatgtgcattagttccctcgaagctggaacaagtacttcagcggacgcagtggagtgggcgatgtccctcctgttaaacaaccctggcgcgctggcgaaggctcaagaagaaatagacgcatgcgtagggcaaccagcacgcctaatcgaggcggccgatctcccgaagctgcaatacctttggtgcatcatcatggagacgttgcgtctatacccgccgacgccccttcttcttcctcatgaatccgcaaatgactgcacggtcagcggatttcacgtacccatggggacaatgctcctagtcaatacgttcgcgatacatagggaccctgagatttgggatagacctggaagcttcatgccagagaggttcctgggtgagaacagtgaaggcaagatgttcaacccatttggtatgggaaggagacgatgcccgggggagaatttgggcacgcagatggtaggacttgctctggggactatgatccagtgtttcaattgggaaagagtaggagatgatcttgttgacatgaccgagggagctggattaaccatacccaaaaaagtgccactggaggccttctatgagccccgtgcttctatggcgaatctgctttcgaagatttagaggtgtcgtgcgagttttatagtaaagtttatagctacatagtggttattaatcctagacaacgtatttacgtgtgttgagatatatgttggatataataggatttcgtttcctattgtatattcatacatagtgaaggtatcgacaaccttaagggtttaagcccttacaataatttttatggtatcagatcttactcctac

SEQ ID NO: 3081 - DNA, 889 bp, Zea mays
  Clone ID: 700240846_FLI
gcccgaggtggcaactactggaagcaggtgatcaagatcaacgactaccagaagagccggttcgtgaaccgcgtcgtggcctccatgttcaacaccgtcgccggcaagaagatcgccgtcctcggcttcgccttcaagaaagacaccggtgacaccagggagaccccggccattgacgtctgcaagggcctgctgggcgacaaggcccagatcagcatctacgaccctcaggtgacggaggaccagatccagcgggacctggccatgaacaagttcgactgggaccacccgatgcacctgcagccgacgagccccacggccattaagcaggtgagctgcgtgtgggacgcgtacgaggccaccaagggcgcccacggggtgtgcatcctgaccgagtgggacgagttcaagaccctggactaccagaagatcttcgacaacatgcagaagcccgccttcgtcttcgacggccgcaacatcgtcgacccggagaagctgagggagatcggcttcatcgtctactccatcggcaagccgctcgacgcctggcttaaggacatgcccgcggtcgcttaattcatccgaggtgctccattggattggatccggggaaggaagaagaggaactggttgaccattcttcattacagtttgtttttttgcaggattcttaaaagttggacggcgctgctagtattccatgtttcgtgttttcatattggaggacgtctgtagatgtaaaaaaatcctcgggcgcttgtgctcggcttgaggaaatatccttgtacggttgtaccctggacccgctatagctggttggttcttcaaattgtgttcctatagaagccaaagttactacacgatcgatatgttctttttgcagaataac

SEQ ID NO: 3082 - DNA, 730 bp, Zea mays
  Clone ID: 700240855_FLI
ggaaacggtagaaattactctgcatcatgaagatttttacacacaggaggaatttgtcgacggaataccacagaactggtggtgcgaagacaccagggacaaggaagccgttctcagaataaacataacgggcaacagctcaaccaaaaccaagacgcacaccatcaacgtccaacatcgctgcccaccaccatcggcgccaccgccggcgatgaaccaacaaccggtggctgccgcgccaccaagcaatgtccttgccagcgagggacactcatcaaagcgttcctcgaagaagagccagtccaagcaccgggaacagcagcaggattacccgcagtttgggacctcagaggtacacgacctgtgccgcatgcggtgcccttgagacctgtacagactactcttacattactacaaagaagtatggatactgaagttctgtctaggttctgtacatatgcttcactcgatcagctgccactctaacgtagcccaagcaaagagtctagagtcctgggataacagtgttaacaacttgttgttttatttttgttccttattaaggagtgttcgctagatagttgaagccagggatatttgaacaatacttggtgtaatatgttccatagaattaccctaggtttgttctctcttcacgcagcagttctaatgatcttgtacttcacactattgccattgttaatatttatctcatgagactatttgttcg

SEQ ID NO: 3083 - DNA, 1213 bp, Zea mays
  Clone ID: 700240861_FLI
tccaccaccacctcctactccgctgcaaccccaaatctctccttcctcgcatacgcgcgcagcggaggagctgagaccaacgaagaagaagaagaacaaccgagcaagcacaagcttagctagcgtggaggtgtccaaggcgacgacggccgccgcgccaggctagccaaccagctgctcatcgctcctagctgcggagccgatggctggcgctgacgtcgacgtcgggacggagctccgtctcggcctgccgggaggaggcgccgatgcggccaaggctgccaagaggggcttcgaggacaccatcgacctcaagctaaagctgcccaccgccggcatggaggaagctgccgctgccgccgccgccaagccggagccggccgccgagaaggccaagaggcccgccgaggcgccggccgctgatgccgagaagccacccgcacccaaggcacaagctgtgggttggccaccagtccggtcataccgcaggaacgtcatgaccgtccagtctgtgaagagcaagaaggaagaggagcctgagaagcagcagtccgctgccaacgccggcggcaacggctccgccttcgtgaaggtcagcatggacggcgcgccctacctgcgcaaggtggacctgaagatgtacaacagctacacggagctctccgttgctctgaagaagatgttcagcaccttcaccacatccgggaacaacatgaatgagggaaaactggttgatccggtcagcggtgctgatgtggtcactacttacgaagacaaggatggcgactggatgctcgttggcgacgtcccgtgggagatgtttgtcgagtcatgcaggcgtctgaggatcatgaagagctctgaagccataggtcttgcaccaagaacgaaggacaagtgcaagaacaggagctgaagaagatacagcgttaaagacgctgcccgttgtgtcaaaagaatggtgcccttgcagtgtgctgcggtttttctagaaatataatgcgttttaattactagttggagggagacctgtcttgttcaatttgttcatggaccagaagcaataatctatctgtgtgtagctggattggtgttatgcgatgtcccctaccgtgtgtcccagaatctacttggtgattttatcccagtgttgttaatcaagcttgtgtgattgttaagtaaagggcatcaatgagactattattattatggt

SEQ ID NO: 3084 - DNA, 1621 bp, Zea mays
  Clone ID: 700240862_FLI
cgccgctcccctccgcggcctccgccgagcccctcttcgtcgaggccaagctccgccagcagatgcgggccgaggagcgccccgcgcgcggcgccgtgcccaggatcgcctacctcgtctccggctccgcgggggacggagccgcgctgcgccggacgctcagggcgctctaccacccggcaaacacgtacgtcgtgcacctcgacctcgaggctcccgccgccgagcgcgccgagctcgccgctgccgtccgcgccgaccccgtctacgccaggttccgcaacgtcaaggtcgtcacacgggcgaacctggtcacctaccgtggcccgaccatggtggccaatacgctgcacgcggctgccatcctgctgcgcgagggcggtgattgggactggttcatcaacctctccgcctccgactatccactcgtcacccaggacgacctgttgcatgtgctctccgagttgcccaggcagcttaacttcattgagcataccagtgacatcggatggaaggagtaccagagggcgaaaccggtgatcatcgaccctgggctatacagcctgcagaagtctgacgttttctggataacagagaaacggagtgtcccaactgcgttcaagctcttcactggctcggcatggatggtgctcacccaccagtttatcgaatactgcatatggggatgggacaatctcccaaggacagtcctgatgtactacgccaatttcctttcctcgccagagggctacttccacacggtcatctgcaacgtgccggagttccgcaacaccacagtcaaccatgacctgcatttcatttcctgggacaacccaccgaagcagcaccctcactacctcacgctcgctgacttcgacggcatggttaacagcaacgcgccctttgcaaggaagttcgggagagaagaccccgtgctggacaagatcgaccaggagctactgggccgccggcctgatgggtttgtgcccggtggatggacgtatctactgaatgcgacgactgaggaagggagacccttcgccgttgagcgcgtgcaggatctccgcccagggcctggtgtggacagattgaagaaactcgtcacgggcttgctcacacaagaaggctttgatgacaagcactgcctgtgagactgccccccagtaagatgattctggctgggggcggtagattacacggtcaaatcttgagggcattgaagccattttctgggaatatgcctactggctgaagaagcagcacatagtatcatgtgatgtacgcgtggatgcgagcaacggtaagataggtgctcttacagacagccgcctgagttgagctactaccgtacagcaggaggccacggacgtagccggcggagattatacaggaatagtagctcattaggttatgttagatgactatatcagccccttcccaaccgtcaataatgttgggaattttgacatctccgcggcgctgcgggttgtgcaaggcaggcaggcagtccattctttgcttggatgccatggcgcctggtgtaatcaactggtagcgtgtgaggaggcttcgttgtattgactagtgcatatttctgggcaaaacagatgcgtttggttgc

SEQ ID NO: 3085 - DNA, 816 bp, Zea mays
  Clone ID: 700240864_FLI
tcacctgagtagatttgcaacttgcagttaatcaactatcaacaattattgcatttaatccggggggaattttcgattttctttatcgagtagagatctgactctctcttaaacagacatttactgaagaagatcgtcatgtttctgttcttccaggttgttcctcctaggcctgaagaaatacggcaagggggactggaggaacatatcgcgcaacttcgtccagaccagaacgcctactcaggtggccagccacgcgcagaagtacttcatcaggctcaactccggcggcaaggacaagaggaggtccagcatccacgacatcaccacggtcaacctgacggacgaccagccgccctcgccgtcccagtcctccctgatcaccagccagtcgaacgcaccagctccagctccaggtccggctccggccgcagggatatgccaggtcccattggcggccgacgccaagcgacacggtgccagaactctgcccttcagctcaccgaacaggacctctgcggcgccggcctacaggatggagtttcatgaccaacagggcctgcagtgtggccctctgcatgatcagttgctcgccagccagagcgttctgttctaggcgcggtggcagcccaccctgcggcatggatcgaccaggtcaggtgcctagtgtataatacttgtggtatcgctgtagcttcagcgcctgtattgaagggattagccttttgggagcataacagaaaggaggtcttcatttcatggtggtccataatttgttggagaatgtaacaaaaggaacgccgagaattcgatgcc

SEQ ID NO: 3086 - DNA, 987 bp, Zea mays
  Clone ID: 700240875_FLI
gtgaccatccgtcgcatgatgtggcgagggggcagaggttcgtgaaagaggtgtatgagacactaagggccagtccgcagtggaacgagactgccctgatcatcacatatgatgagcatggtggattctatgaccatgtacctacgccggtcgttggagtgccccagcctgatggaatagttgggcctgatccatactacttcaagttcgaacggcttggggtgcgcgttcccacctttctcatctcaccttggatcgacaagggcactgtgatccataaaccaaacggtccacaggatacttcacaatatgagcattcgtccattcctgcaacagtaaagaagctattcaatttacattctaactttctgacaaagagagacgcatgggctgggacctttgagaactactttaaaatccggagaacgccaagaacagactgtcctgagaagctcccagaggtgacaaagtcactgcgaccatttggtcccaaggaagattcgtctctctcagagttccaagtggagttgattcaacttgcctcgcagcttaacggcgaccatgtactgaacacgtacccagatattggcaggaccatgactgtcggggaagcgaaccgctacgcagaggatgctgtcgccagattcctggaagctggtcggattgctttgagagctggtgcgaatgaatctgctttggtgacgatgaggcccgctctcacaagcagggcctcaatgtcctctggtttatcatcagagctctagtagatggttccagtctgcccacaaattacacatcgccattccctctgattcagctcttgggtggtgtagtgcaaatatgatagtttggttctgtaaatagacagtcggtacatgtcaaagcctcaatgtgtagtggggatttctaaaagcaatttgtgggtacctgcttgtcaagcagctggactgcactctggagtaaatgtatgatactgtacagtaactg

SEQ ID NO: 3087 - DNA, 1006 bp, Zea mays
  Clone ID: 700240889_FLI
ggccgctccgccaccccgcactcgcctgtcgcctcttctcgctttcgccaccggggcagcgctccggtgagtggcgaagggcccctcccggctcccgcttccctctgccatggctggacctgctgttctcaatgagcgtatcctttcttccatgtcccagaaacatgttgctgctcacccatggcatgatttggagataggaccaggggctcctgaattcttcaattgtgtggttgagattcctagaggcagcaaggttaagtacgagttggacaaggcatctggtctgatcaaggtggaccgtgttctttattcctctgttgtttacccacataactatggcttcattccacgcacactctgtgaggataacgaccccctggatgtcctcatactgatgcaggaacaagttgtccctgggtgtttcctgcgagctcgtgctattgggctcatgcctatgatcgatcagggcgagaaagatgataagattatagcagtctgtgctgatgaccctgaattccgtcactacacggacatcacggacctcccaccgcatcgccttcaagagatccgccgcttttttgaagattataaaaagaatgaaaacaaagaggtcgcagtgaatgagttcctgccagcgaaagatgccatcaacgcaatcaagtactcgatggacctgtatggctcatacgtcatcgaaagcctgaggaagtgatctccagctgcttgattgtggttgtggatgctacaccattttctcaacagctcatccagagtaccgtagtacagacttaacacgaacgaactgtaatcgtgaccaagggatgctattaccttctgctcatgttgaaacaatcagcagtgcctttctttccattatatgccatgtcgaatcaaggcaacttggccctgaaatctttgtggtcaagttaaaccagcactttgacagaacaaggattgctggatgcctggattactgttacataaatgaccattactgaacttc

SEQ ID NO: 3088 - DNA, 1872 bp, Zea mays
  Clone ID: 700240895_FLI
ctcgtcggcgccaagttctttggcctggggtacgaggccgcgcacggcgggggcgcggtggacgagacggactccaggtccccgctcgataccaacggccacggcacgcacacctcgtccacggcagcgggctccgccgtgccgaacgccgccttcttcgactacgccaaaggcacagccatcggcatggctccgcgcgcccgcatcgctgcctacaaggcgtgctgggcgagggggtgcacgtcctcggacatcctcatggcgttcgacgaggccatcaaggacggggtcaacgtcctctccgtctcgctcggcgccgtcggccaggcgcccccgttctacagcgacagcacggccgtgggagcgttcagcgccgtccgcaggggcatcgtcgtctctgcctccgcgggcaactccggccccggcgagttcaccgccgtcaacgtcgcgccatggatcctgacggtgggcgcgtcaaccgtcaaccgccggttctcagcgaacgtcgttctcggcagtggcgacaccttcgccggcacttccctctatgccggcacgccgctcggtccaagcaagatcccgctagtctacggaggtgacgtgggctcaagcgtctgtgaagctggcaaactgatcgccagcaaggtcgccggcaagatcgtggtgtgcgaccctggcgttaacggtcgagctgctaaaggtgaagccgtaaagcttgccggaggagctggagcgatcctcgtcagcgcaaaggcgttcggcgagcagcccatcaccaccccacatccacccagcgacggccgtgacgttcgccgttgccgagaagatcaagaggtacatcagaaccagcgcgtcccccgttgcgaccatcgtgtttctcggcaccgtcgtcggcgggacgccgtcttccccgagaatggcatccttttccagccgcggcccaaacctcctcgcaccggagatcctgaagccggacgtgaccgcccccggggtggacatcctggccgcgtggaccggcgagaactcgccctcggagctcgacagcgacacgaggcgagtgaagttcaacatcatatccggcacgtccatgtcgtgccctcacgtgagcggcatcgccgcgatgctccggcaggcgcgcccgggctggagccccgccgcgatcaagtccgcgctgatgaccaccgcgttcaacgtcgacagcgccggggacgtcatcagggacatgtccaccggcggggcgtccacgccgttcgtgcgcggggccggccacgtggaccccaaccgcgccctcaacccaggcctggtgtacgacgccggcactgacgactacgtctccttcctctgcgcgctcggctacacggccaggcagatcgccgtcctgacgcgtgacggctcggtgaccgactgttcgacgcgcccgggctctgtgggcgacctcaactacccggccttctcggtggtgttcggctccggcgacgacaaggtcacgcagcgccgcgtcgtacgaaacgtcgggagcaacgccagggccacgtacacggccagcgtcgccagcccggccggcgtgcgcgtcacggtggagcctccgacgctggagttcagcgcggcgcagcagacgcaggagtacgcggtcaccttcgcgccggagcagggaagcgtggccgagaagtacacgttcgggtccatcgtgtggagcgacggtgagcacaaggtcacgagccccattgccatcgcctggtcggcgagccaagcagcggcgatgtgatccgatccggtccacgtcgagctaccatgtgtgcgctctgtgtgcttcctgttgcagaataagttgcgttgtttcgacactgatccatcctaccaacaagttgtagc

SEQ ID NO: 3089 - DNA, 1175 bp, Zea mays
  Clone ID: 700240921_FLI
ggagcttccttttattgctacttctgtagactttcgacggcaaggaatgtgccgaattctaatgagcatcattgaaaagatgctctgttcatttaatgttaagatgttggtcctttctgccatcccagagttggttagcacatgggtgtcaggatttggcttcaaacctatcgaagatgctgaaaggaaacaacttcataatgtaaacttgatgttgtttcctggaacatccttactaacaaagagattggatggatttattatggccacaaaaccaggcgaggaaaaggatatacatgaagtttctggagtgcctaatcttaagcgtatgcctaatgggaaagcaaatgagcatttcaaactccatgaccttgatttgtccgggacagagtttaaagctgaggtttccgtgaatggtccattcagaacactgaaacatgaatgtggttcagcagcatggtttcagtctactaagttagctgttggggaagtgtgatattcttacacaaattatctgggctcatgctctgcatcgatactagctgctttgtgttggccaatttcgtcttcccacttcatggctcaaattaatttgcagcagcaaaatcattcgaacacttgctgctgcatgaactcatccttttcaagtaaagttctcacaagactactgggaaatggttgggatgacgcaggcatccatgaatttgggttgagcaaagttgaagaaaccacagattggtgtggtctgttctgcatcgagaaaatggaaattataactgtctctcctgggtgaagtgctctcctgagactgggtaaagtacgcaacacctgagttgatattgcttgcacgttgaacaaagaggatgtatttgcactccaacgtacaaagtgtaacgcattcggccccttttcaaagtaagccatgataggaattaatctaagctgtttggtatatacatcaaaagggtactgcagtaacatgtttggtaccttctcttgcgagttttattttgatatatgtgttttatatgtgtctagattaatcatcatctatttaaatatagacataaaaagaattatattctggaacggagtgagtattattttgccatatgtgctgttaggttgaggcccaaatggcaatgcaatgcatctgtcggcagttgattttcctg

SEQ ID NO: 3090 - DNA, 682 bp, Zea mays
  Clone ID: 700240927_FLI
cgcgtgtatgcttcgattcgttctgtgcatctttctgcagtggattctgcatgattgggatgatgcgaagtgcattaagataatggaacggtgcaaggaagcaatcggtggcaaagaaaggggagggaaagtcattataatcgacaccgtgattggatctaggccaaatgaggaagatatgatacgcagggaggctcaagtcctgtgtgatctaggtatgatgacaacgtcgaacggagctgagcgagaggagcacgagtggagaaggatcttcctagcagctggatttcgtgactacaaaatcacagacacacgaggtatcccgtcaatcatcgaggtctatccatagtgagaattgagagagagagagagagagagagcatcttatcctatcctttatacgtataaatccttattaattgcaaaaaagctcaattctcagccttccataccatctcaagtggcattagtactagcagctagccatcagattatgttgtatcagcatcatcatcaagccattcattgtcgatcctctatctgatatgcgtcgatgtctgcactgttggaatacggtctgaattctgacatgagttttataaagatttgtttcatggactgcagtccgttcatcctatatatctcttataaatcgacatggaaagaaagatgacatcgttgt

SEQ ID NO: 3091 - DNA, 1121 bp, Zea mays
  Clone ID: 700240967_FLI
ccagagatggcttaagcaccatgactactgctggttatgatgcccctgcagcaaggttggccaaaaggaagaggaagaatcaatacaggggtatccgccagcgcccttggggtaagtgggctgctgagatcagagatccccagaagggcgttcgtgtttggcttggtactttcaatagtcccgaggaagctgcaagagcttatgatgctgaagcgcgcaggattcgtggcaagaaggccaaggttaactttcctgatgcaccagcagttggtcagaagtgccgttctagttcagcttctgctaaagcactcaagtcatgtgttgaacagaagccaattgtcaaaacagatatgaacatccttgccaacacaaatgcacccttctaccaatctgttaactacgcatccaacaatccatttgttccagcaatgaactctactgtttcttttgaggatcctatcatgaatctgcactctgaccagggaagtaactcccttggctgctcagacttgggctgggagaatgatactaagacaccagacatcacatccattgctcccattcccactattgctgaaggcgatgagtctgtatttgtcaactccaattcaaacagctcgatggtgcctcctgtcctggagaacaatgctgttgatctcactgatgggctgacagatttggaatcctatatgaggtttcttatggatggcggtgcaagtgattcaattgatagccttctgaaccttgatggatcacaggatcttggtagcaatatggacctctggaccttcgatgacatgcccatcgcttgcgatttcttctgaggaatttgaagcttggccataggactatgtacatagggactagggaataaagactgggagattgggaagcacctgcttggcaccttggggtagcatatgctcgtgtctagctcagatgcagaagtcgcattctgaaactctttggttatcgacctgttccctattttaactatctctgtatgagagccatttatgagactgaaccattttaccattttgttttcccccttctttcgttgttacagtatatggtttaacattatgatttatggatatgtggccaaacatgccttttat

SEQ ID NO: 3092 - DNA, 2303 bp, Zea mays
  Clone ID: 700240985_FLI
ggcgacagcgatatcgggaagaggaaactcgaaagcccggcgagcggtatggcaaccggccaggagcacgtggcggcgccggcgccggcggtcgaggagacgccggagaagaagcaggccagcacaaccgagctgcccgcaccctcaggctggacgaagaagcttgccccaactcgaggtggacgaggtggacgatttgaggttatttttgtttccccaactggtgaggaaattaaaagcaagagacagctgactcagtacctgaaagctcatcctggaggccctgcatcttcagagtttgattggggaaccagtgatactcccagacgctcagcacgtttaagcgagaaggtcaaggcaactgagagcccagagggtgagaagactcctaaacgggcaagatcaagctctaagaggggcaaaaaggaggaaaaagtggatgcagaggatgcaaatgaggctggagaagatggtgctgcggcggaaggtaaaggtaccgatgtggagatgaaagatgctgaaaatgctgaagacgagaagaaagatgtcccaagtgcagagaagactgaggaagttgacgataagaaagatgctgaaaatgtggagatgaaagatgctgcagagaagactgaggaagttgacgataagaaagaggaagcccctgctgtagatgcagcagagaagaacgaggaaggtgatgataagaaagaggaggagccccctgcagagaagactgttgagaaagaggtggtccctgctgtagatgcagcagagaatactgaacaaagcaccggtgggcaagcacagcctaatgatgttggtgccccagaatctgagaataaaggagacggcaagccagctgaatccgaattagctcccactgcatttgttgatgaagcagtgccccttgtaatcgttggtgaagagaaaactgaggacagtcaggcagctgaacctacggtgacttccctggcgtcttcagagggagagaagaaagagaacggtggtgccactgaaccagcagcacctcctccagctgatgcagacaagggcgcggagaattcaggccaggtgaacaccgccccccaagaaccgacggcagcgaactgcgacaaggggcagatccaacctggtgcctctgctgtcaggtgcacataagggagcttggtctccgatgagagactgctgctttgtgtgtttagggcaatacctcgcatttgctttgagaattataagcgtggttaacctgacaggacagcgctgtgcagcactaggctgcccagcacgtagttatctttccgttttttttatggcggcagggacaaatgtgtgtacccggttcaaagtgtaactcgttattagcgtggtgaacattgatctctggagcggactggaggacgtagtactgtctccaactgttgtaacgtgacgttgtttgtgttgctgctttgtgttattgaacttattatgatccataaataaaagccataagcgtggcagggtcattccctgaccaccttcaggcaccaaaaaaaaaaaaaaaatcaaaatgcacttgaaatttaccggaaaacaatgcgagggagggttggaaactcaaagaacttctagtgcgcatgacgaacattactaggggggggccgcttttaaaagaaccaagtttaaaaagcgggggaatgcgaagttaataagcttttatataggggccccaaaattaaattacctggccgcggttttaaaaagggggaaacagggaaaaacacgggcggtcacaaaattaaaatcgtttggaaaaaaaaaccccttttacaaagtggggggaataaaaaaaaaaggccccacacagatccccttttcaaaaaaatggccacccccgaaaagaaaaagggggcccccccctttaagggggatataaaagcgggggggtgggggggggtatccccaaaagtgataccctaacattttagcaaagcctgtgaaaggcgcgggggggggggggggggggtgcgggggtcggggggcgccctcctacccccctccccccccagaccaccccaaacaccggcgcacactccccccgggagggtatttaaattccccttgagccttacccctcaaaaacacagaattgtgatgaggcatctcgaaacgtgtccggctcctccttaaaaaaaaaatttaaccacgctaatttaggaacaacctactcaacaaatcgttctgtatctgccgtagaaagacacataacacacaactggacgactcttttattacaatgaaggtacccatagcccaatgaatat

SEQ ID NO: 3093 - DNA, 1444 bp, Zea mays
  Clone ID: 700240986_FLI
ggcatacacatacctgcgatatttgtttccaagatggctggtgaaacactaaagaagtttgccaggggtgaagatgaagagtgctgtattaactcgtcgatggatgagactgcagggacagtgttggtaatgtcatttgtgtcacttgttgtcatcatgtcagttcttgcttcttttctatttgctcgaaactgccgacttctacgccatggagttgataatcacccaccttacgtcaagaaacaagtggtggaaaagtttccctgctcagcgtacagtgctccctgttctagtgaagataatttccaggaagcttgtgcaatttgcttagaagactacaataatggtgatatgcttagacatctcccatgcaagcatggtaagagcttgagatattttagtacttgctatcttaaattattattgctgatcggtagttaccaaagatacggaggtgctcagccatataactgttactttttttttctcagcgatagatacaaatttaccaatacaatcatatatatatatatatatatatatatatatatatatatatattgaatgaccctgatgggtaggtgcatattttctctctttttgcataatccatttgtttcaaggcagacaatgattttggaattaacatcatgatatccattagcagcaagtgtgctcaaaacttttcatttcttatagctctcccactatcttatcatcgataatttctctctttttgcacaattcatttgtttcaaggcagacactgattttgggaactaacatcatgatatccattagcagcaactgtgctcaaaactttttatttcttatagctctcctactatcttatcatcgataattttatttacagaatttcacaagatctgtattgattcttggctcacaaaatggggcatcttctgccctatatgcaagctagaagtaacattgggcgggtaggcacacttcattactgcatccaagtgctggcagttctattgaagattgttgatcttttgatccattgcgaggttcaatattcattttaatgattgatctttgagaatgaagtacagatctcagttcctcaggttgggccttgtagtgtgctactagactactgcgttcaggttaatatttcgatcatctgtttgatatccttgtttggtgtgtggaagagctcaaggagctctgctgctgataaatgtcagcacttctgttgcagtgtattgccctgtattcctagagaaattaggtgttgtgtgcaagcaaagtgtaatcgtaagtccaatgtaaaccccttttataccaggttacgttaccttgctcattttattttgtgggcacagataaatgctcgttaattaggcaggggttgatcttactctaaaaaattgtcctaaggctcagaaataacgatgtttgaagatgcatttgttgc

SEQ ID NO: 3094 - DNA, 1489 bp, Zea mays
  Clone ID: 700241010_FLI
ccagttttcgtgggctctttcaccgatacaaccatcctccaggctacttatattcggatctaacccaaagttgctgttttttccatatatgaaaagaagaacgcaagggatgctcgattgactctagttacttagcagaaccaaaagtggaaggccatcaaagatacgaggctattttctctccatgtctcggtcaccccacctcccaccccgctgcccaccgctgggtcctcagatcactcgaagggatgacggcatgttcacgcaaagctgcaggtttccatctggggatacgttcattggtgaaccaccgtgctggctggatgatctccttgaagattctgggaaagctcccaagctccctcctctcagaagggcctgcagcgattctgatgccatcttagatgcgctgtcgacattccagagcccaatttatccaatcgaggaatgtgatctaaactcaggtggtgaagctgaggacttgttgggtggagtcgaaggtgatgaaagtggttctgtggtcgaggctagctgtttctatggtccgaattcgccaagacagaagagtaggcttacaactttagagagttccatggtaaatgctgtgcttgagaatgtccccggcaaccccttgcagtacctgaccatcgatgcctgcagtgatgtgaatggtaatgtggccaatgtaactgctgatgcctgtgatgcttttggccatcctgatcaagacaagtcatttaaaaggcgctcagggcaaagatctagggtccgaaaacttcaatacatcgctgaacttgaaagaactgtcgaatcgcttcagaacattggagctgatttggccgtcagaatgtcatcacttttccatcttcacaatgctctatcaatggaaaacaagcaactgaggatacatatttccagtcttcagcaagcaaaactgattaaggatggtcagacgcaggccctaaagaatgaagctgaaaggttgaagcagatgtctgcccgtcaccgccggagcagaagcgtcacttcctgttatgacctgagctcattcggagcagatgctacggcagtcaattggcagatgcctgacatggcaaggctcagcctgaatggaagctcctctgtctccccaagaagcggctatggtatatgacagcagccggccctaacctccctcagaagataagtcgaggcattaccctagataacttttcgctaaccttacccaggcatatatttgagggcccatctttgactaggatatcagttggattcgctgaattttgcagaggctatcagcttaggcccggtttggttggggttttaggctgtttttgctttccaaaagccaaaagatcaaccaaaagacttttttcagaagcagttgcttttcgtaattttttttaaaacaccttagaccttgtttttggcttttggttttctgcttttctaaatgggttgaataaataacacagttgtttcgagagag

SEQ ID NO: 3095 - DNA, 903 bp, Zea mays
  Clone ID: 700241026_FLI
ctttcctctcgtaacgcgtatcagtgccaaccaggcagccatcgccgcggccctcgtgcctctgcatcgcggcgcgccttggtgctccatccacgtaatccctgaggtgcggcacaggcgtggaggtatctcggcagtcggcagggcggctggagttcggtcccagaagagatggcggggggccctgatgtcgcgggcttgatcgaggatgatgcggtctccgtcatcacggagggcttagtggtgtgtgacatatgtggcagtggtagtgcccctcatcttattgcaaactgcgctcggtgcaatgcgcgtgagcacgggtactgtatggaggggttgacgttcctgattccgctcatatggttttgtaatagatgccaacgcaacgccaacagggcacccagatcctaaccaagcctgcaggttctggagatggtgttgggcgccaaattcccttgaggaaggtagcagctagtgtcgtgtgagaaatgttggcttgtttttgtggttgtgtgtattggcaatcgctggagcctggagctgtgtgtattggcatcgctggagcaaaatgtccatgtggcttggcactgatgctggctggcctcagaacatacgtcggatattctttcaccgcgagtgagcaattgaaattgggcaggtaataccatgttgtgggcgtaaatgcgatggacactgtcagtttcgtgggttttcttttcttctttttcgggccaagagtttcgtggattctcagcctcggttgcatgcgcaagatcttgagtgcagcatagaacacgcttgttcttaccagtacgtgtgcaagaaaaatggatctcggtatatttaattaatatattttcttgtttgatggtgaacataattatttgaactaatatatttact

SEQ ID NO: 3096 - DNA, 2361 bp, Zea mays
  Clone ID: 700241038_FLI
tccttcctcctccttcgccgcctcttgcgcctcccctcccctccccactcctctcctctctccccgaaccaaaccaaacccctcccactccaactcctcgattctcagagtgctgtacaagtgtctcgccctaccgcggccgtcaaaaatccgatctttccgccgtttccggaggccacacggctgcaagactgaccaatcccccgcggatcgagccgcagacgccagcagttcctgctcgcggaccgcaggcggggcccggacggagcatggggtcccgatccgccgccgcggcgctgcggctgtggctgctggcgctcctgctgggctgctgccaggggaggttcgtggtggagaagaacagcctcaaggtgacggcgcccgacggcctcaagggcacctacgagtgcgccattggcaacttcggggtgccccagtacggcggcaccatggtcggcttcgtcgcctaccccaaggccaacaggaaggcctgcaagagcttcgacgacttcgacatctcctacaaggccaagccgggggcgttccccaccttcctgctcgtcgacaggggagattgttacttcgcaaagaaggcatggaatgcacagaaagcaggagcagcggcaatccttgttgctgatgacaaagacgaacctctaattacaatggacaaccctgaggagggtggcaacacggattatttagagaacatcactattccttcggcgttaataaccaagagctttggggacaggctcaagaaagcaatcgacagcggtgacatggttaatgtgaatttggattggagggaggccctgccccatcctgacgagcgcgtcgagtatgaattctggaccaacagcaatgatgaatgtggcccaaagtgcgatagccagattgacttcgtcaagagcttcaaaggagcagcacaggtacttgagaagaagggctatacggagttcactcctcattacattacctggtactgcccagaggccttcattctgagcaagcagtgcaagtcccagtgcatcaatcatgggaggtactgtgcacctgacccagaacaggattttagcaaaggatatgacggcaaggatgtggtggtccagaacttgcgccaagtttgtgtctttaaggttgctaaggagcacaagaagccttggttatggtgggactacgttactgattttgcgattcggtgcccgatgaaggaaaagaagtacacaaaggagtgtgccgatggagttatcaagtcacttggccttgatcataaagcaatagataagtgtattggtgatccagatgcagatgaggaaaaccatgttctgaaagctgaacaggatgcacagattggcaagggttctcgtggtgatgttaccatcttaccaactctggtaatcaacaatagacaatacagagggaagcttgacaaaggagcagttcttaaagcactttgtgctggttttagggaaactaccgagccagccgtttgcttgagtgatgatatacaaacaaacgagtgcctagagaacaatggtggctgttggcaagataaggctgccaacatcattgcatgcaaggatacattccgtggaagagtttgcgagtgtccagttgtgaaaggcgtcaaatttgttggcgatggctatactcactgtgaagcttccggatctggtcggtgtgaaattaacaacggagggtgctggaaagataccaagaatggccggacatactctgcctgtactgatgatggctgcagatgccctgacggattcaagggtgatggcaagcacaaatgtgaagatgttgatgaatgtaaggaaaggactgtgtgccagtgcgaagaatgcagatgcaaaaacacgtggggaagctacgagtgcggctgcagcgggggcctgctttacatgaaggagcatgacacatgcataagcaaaaacggagcatcagaagccggctggggcttcctgtgggccgtcgtcttcggcctcgtcgcagcaggaattgcagggtacgcggtgtacaagtacaggatccggaggtacatggactcggagatccgcgccatcatggcccagtacatgcctctggacagccaaggagatgtccagagccacgcgcaccatattgagatgtgaggaggatgcatgcagacttgatgagaggagacggaggcttggtctagctagcttatataatacaccagaattagatgtgcatattcgtaacaatcttgtgtttagcacgcaaagtccttgaacatttggcgtctgtgttaggttgtaccatgacatggtcttgtttagcaataattgccgtcttttatttcggtgccaataaaggagatggcaaacgggc

SEQ ID NO: 3097 - DNA, 449 bp, Zea mays
  Clone ID: 700241044_FLI
gacggcgtgttcaacgccgtggtgtgggacgtggtggtggagccgtcgagccagggcctcgggctgggacgcgccgtcatggagcgcctcgtcgacgagctgcggcgcgacggcgtggccaacatcgtgctctacgccgagacgcgcgtggtggggttctaccgcctgctggacttcgccatggaccccgacggcatcagggggatggcatactaccgcaagtccgctactaccgccgcttgattcgtctcgtctgtcttgtactcattcatcaatgaaggaagtcgatcgaattccctaaagccccccatgtttgtatgatgtagatatgacatggtttatttttatcactcatctcatagttgctcgtttattacctttcattttatattccgcgaaaacgatctagctagaacatgtacttatatttcgcgcaaatcaagcaatat

SEQ ID NO: 3098 - DNA, 990 bp, Zea mays
  Clone ID: 700241062_FLI
aacagcggaggcagagggtgagctcggccggcggcgagaacccggtcgacgacggccgtagctggaggaagtacggccagaaggagattctcggagccaagcacccaaggttagcacatctatctcactcaaacacgtattgttgatttggattggaaccgcgctctgtctgacgacctccgtcgtgccaaacctcgcaggggctactaccgctgctcgcaccgctactcgcaggggtgccaggcgacgaagcaggtgcagcgcaccgacgaggacccgacgctgtacgacgtcatctaccacggcgaacacacctgcgccccccacaggccggcggcggcggagcacaacccggacgcgcgcggccacctgcagaccctgagcgccggcctcacggtgaagaccgagggactgccggacccgccgcggggccggggcgccgccacgcccttgtacctctccgcctcctccacgccgccgtccacgtcggagaactggggcgtgtcgcccgcgacctcgggctccacccacgtcgcctccttccggccgttcgaggccgccgagtggcgggggcaggccgagcaccaggaagtggtgtccgcgctcgtggccgccatcgcgccgccgcccgccgtcgacagcctcgacgacctgctcatcgacatagatctagacgacatcgcgagcttcttcgcgtgacccgcgcgttgtagcagccgatgtggcgtagtatgtgaccgagccctctggctctgcttcctgaaactggaacagaacagaggagggaagagcaccaaagctctgcttcctggggtccatgcagatgcaggatgcaggcgtaaaaacctaggagatgaacaagagtagagactgcatttttttacccctctttttttgttaatctttttcctctttcagaggactgagggtagtgtttgtattgtattattgatttttaatgccaatgggaaaaataagatccttcgtgcc

SEQ ID NO: 3099 - DNA, 703 bp, Zea mays
  Clone ID: 700241077_FLI
gcttcatcctacgcgagggcgaaacccagaaaccctctccctcctgtactccggccgacacatccaggggcgatgacgctgggtagctccggcgccggatcgagcgtcgtcgttcctcgaaacttcaggctattagaggagctcgagcgtggagagaagggcattggtgatgggacagtgagctatggaatggatgatgctgatgacatctacatgcggtcatggactggtaccatcattggccctcacaatactgtacatgagggtcgcatctaccagctgaagttgttttgtgacaaggactatccggagaagccaccatctgtcagattccactcaagaatcaacatgacatgcgttaatcacgagacaggaatggttgatccaaggaagtttggtttgctagcgaactggcagcgggactacacgatggagaacatcctcacccagctcaagaaagagatggctgcctcgcagaatcgaaagttagtgcagcctccagaagggacattcttctaacgaagtgttcacttggcccgtcatgggatccaacagtaattgaaagttttatgggctaaaaaacagcgtctacatctggtgcccctgcctgtctttgtgattttttatgacttttatgttcttgtatcgtgaaccgcagtgaacaacggttgttgcaagttccagggatatctttggaagtcgt

SEQ ID NO: 3100 - DNA, 711 bp, Zea mays
  Clone ID: 700241111_FLI
aaggactttgtgatcgatattgatcaccactggctcttgcagggatggaaaggccgcatcctctatgccatctcgacatgggtggcaaatgatgccccctcttacttttagctgtttttttgtgactcacttgtctacaactttaggggccagtttggtacggcgcgtgcggcgccacggcgcgcctaagctgcggcgcccgaatcggccgccacacctgcggcgggaaaactatggcgcgccgtggcggcttagtccacgcaccaaacaacccctaggtttaggtatgtcatctagatatatctagtgacaagcgtgttcttggcccagttaatagccatggttacttggactctgcagtatgcctagtgccctagtgagaattcaacatgtacctgttctttccaagggtacattcagcttctgtggaacatgagtgacacacgggggatccagaagtcagaaggcataccgaaatctgtcctttgatttaatgtggattatatagatgctcatcactcagtcatgctgttgcatggtgctaaatatgatctagatctaggtcctggtctggataatgctctccacagcatctgctgtgcgtgtgacctgtgatcagttcagtcagttgatcaggttgtaaatgacacttgttcctctgtttccggcgcttactgcgctgtttcagacttaaccatggctattatgaag

SEQ ID NO: 3101 - DNA, 1074 bp, Zea mays
  Clone ID: 700241117_FLI
agctccagctagactgtcctgctctgcttcggcgctactgtgcagtgtgcacagccagccagctctgcagcagagcagagtccggctgtgagccctgaccagagaggattcagtgccatggagagacctgcgcaggcgcccacgcagctgccgccggggttccggttccaccccaccgacgaggagctggtagtgctgtacctccgccggaaggccctggctcgcccgctgccggcagccgtcatccccgtcgtccacgacgtcgccgggctcgatccatgggacctccctggggcaagcgaaggggagggttacttctttagcctgcggcgagcgccggcgaccggccgtggcagccgcaggaggagagctgggagcgggtactggaaggccacgggcaaggaggagccggtgttcctacagtgcggcggcggcggcgtaggcggcaagaggcagctgctcgtgggcggcaagacggcgctcgccttccaccgcagtgagccgtcgccgccgtcgtcgtcgcggacaggctgggtcatgcacgagtaccggctcgccgccgcgtcccgcggcgtggccgagcagaggaagaagaatgcgagccatggttgttgcgatgctgagccgggagagtgggtcgtgtgccgggtctttctgaagaagggagcaagaagaagcaggccgggccgggatggtaaccacagcagagctctgagacaccgcgcatccgctgcgccgtcgcagcaacgggaagatgtgggaggacggcagccgttgctgttcccggcgccacagtcgccgtcctcaagctgtgtcaccggcgttaccgacttgtcagacgaagaagacgaagtcagcagcggcagcataacaagagttgcacctcagagagaggcctgatggggattttaagtgttccctcccccctctctcatggtcccgtagcccaacctttttctggtaccatataatgatgatgagttaagcaccagataatcaggtttaaggcatgtccagcgcaggagtgatcccgaaatatcatgtcaaatggatctggcaacctgagtttaaatc

SEQ ID NO: 3102 - DNA, 1436 bp, Zea mays
  Clone ID: 700241180_FLI
cgacgcccgcagccgcagcgaaccagagaggagagcgggagatgaagggcgtcgggggcggcgcggcctccccgggggactatgtctacttcaaatctgtcgtcccgctccacaagatctccattgggtcaaaactgtggaggtactatgactttggacccaaggttgtgccacctcttgtttgtatcccaggaattgcaggaacggctgatgtatactataaacagattatgtccctttgtatgaagggttatcgagtaatatctattgacgttcctcaagtttggaatcaccatgaatggattcattcatttgaaaaatttttggactccatgaatatccatcatgttcacatttatggtacatctcttggtggattcctggcacaaatatttgctgaacaccgtccaaggagagtaaagtcattggtcctatcaaatacttttcttgagacgcacaagtttgctgctgccatgccttggtctccagttgttaattggaccccttcttttttgctgaagcggtacctcttgacaggaatccgagatggtccccatgaaccattcatcgcagactcagtagattttgttgtgggtcaggtggagacattgtcaagagatgatctttcatcaaggttgatgttaaatgttaatgttgcatccgttgggtcgttaatgttgcctgattcactcatcactataatggatacaaatgactactctgcagttccccagcagttgaaggaacagttgaatgaaaggtaccctggtgcaaggcgtgctgtactgaagactggtggtgattttcccttcctgtctcgtcctgatgaggttaatctgtaccttcagctacatctgagacgagttggtgtagagccaaggtcagacctggtccaaggctttacccgaaatggcagcgctgggagttcaaaggatcaaaaagatggaggggacagctttgataatagtggtggagacaatggccaccatggttcaggtggcagtgatcatgacaggcggcattgtgcatcagaatcacaccattccgacgagccaataccaactagcacaatgcttgccaatactgtactagaactggttatgtaggaaatcatggaagcgtgtattgcagcacattggggccactgttgtaagtgggaaagccaaaagagcatctcaaatgatgggagaggcgcttctgtatgtttgtataataataatgtatgcttgtcttatatttatttatttacccagtttagggggtgtttggagcaaagtatttttagagttttgaggtaaaaccatgatattgaagaatactatagtatttctcattgttttgctaagaggtgtttggttacattgtaaaaaactctgttttgaataccatggttttgcagataccatggtatttttgaacatttgaaactctactcc

SEQ ID NO: 3103 - DNA, 1703 bp, Zea mays
  Clone ID: 700241184_FLI
ggcagagcagttcctttcttgctctcctccgctagtccggtaccctcgacctcggcgtcccaccgaagacgacctcacgcggagctgggaatattccttcgcctccgtgctccctttagcaccaactgtcacggccgcttccagcacgcatcattctcgtctcccgtctcgagagattgcagggggcggcgctcgaagctggaggaagcggacgggttcgcgatggggtccgagggatcctcgggtccggtcgtcgttcccagaaactttaggctgctagaagaactagaacgtggtgagaagggcattggtgatggaactgtgagctatgggatggatgatgctgatgacatatatatgcggtcctggacaggaactatcattggtcctcccaatactgttcacgagggacgaatctaccaattaaagctgttttgtgatacggattatccagataaaccaccgacagtccgattccagactcggatcaatatgacatgcgtgaaccaagaaactggattggttgaaccaagtctatttcctatgcttggcaagtgggaaagggaacatacaatggaggacatcctggccagcttaaaaagggagatgtcaactcctcagaaccgcaggctgtaccaacctcatgaaggtaacgaagatcaaagagtagagcagaaagggctgtcccttagatgtgtcgtcatgtaataatgtacatttgaattgagcagcgagatgccgagcttgagcgaaccctcttagggcatgtttaggaacaatcccctccaattcccttgctttcaaagaagccctgtaggaaccctcctgtagctcaccttaatcgcaataaagtgtcgatgactgttaaattgcctgcacggctgcacaccatgtaacagcaaccgattcgattttctgtgaaggacaacgtgttcagtgtcggctgttccacaaaaaaaaaaaaaaaagctgtcgatccaattgtcacttgctctccctccaacaagctaattaaggccggtcatccctcttctagctcgtttcattatccatggcggaggagaagcaccaccaccaccacctgttccaccacaagaaggacgaggagcaggaggagcagctcgccggcggcgggtacggcgagtccgccgagtacacggaggccacggtgacggaggtcgtgtccacgggcgagaacgagtacgacgagtacaagaaggaggagaagcagcacaagcacaagcagcacctcggcgaggccggcgccatcgccgccggcgccttcgcactctacgagaagcacgaggcaaagaaggacccggagcacgcgcaccgccacaagatcgaggaggaggtcgcggcggcggcggccgtcggctccggcggcttcgccttccacgagcaccacgagaagaagaaggaccacaaggacgccgaggaggccggcggcgagaagaagcaccacttcttcggctgattgatcctcccgtatcgtcgtccctccccgtgtgctacgcgtgcgtgtgtgagagtgatatcgagcgcccgccgtgttgtgcgcgcgtacgtatgtatgcgctcgtgtgatgcacgaataagcgtggctacgtaatctatcgtatgtatacgtgtgtgtatgcatgtgcttgtgtatgatcgtggtacgaggaccgaaaaaatgtatgcaactctgatttacttac

SEQ ID NO: 3104 - DNA, 1103 bp, Zea mays
  Clone ID: 700241186_FLI
gctgatcaaatgtcgcacccaagccatgtcaagaaaggaatgccctacgtccgattgggaaagagcggcctaaaagtctctcgaatcattctaggatgcatgagctatggctctaaagaatggcaagactgggtacttgaggaagaagaggctttcaggcatattaaagcggcgtacgacgctggaatccagacttttgatacagcaaatgtatattcgaatggagtttcggagattattctcggcaaggcgatcaagaagctcaacattccgagaaacgacatcgtcatcatgaccaaggtccacggagctgtcggtcgtgctccaggagtgaatttcctaaagtcaaaggagaatccagaagaagtggggtatgtgaaccagcgcggtttaaatcgaaagcacatattcgaatcagtggaagcatcactagagcgacttcaagttaaatatatcgatttgcttcagtgccaccgattcgacaacgatacgccgatcgaggagacgatgcaagcgcttcatgatgtagttcaagctggactggtcaggtacattggcatgtcgtcgtgctgggcgtggcagttccacgcaatgcaaaactacgcaataaacaataagctcacgccattcatttcgatgcagaatcaacacaatttggtatacagggaggaagagcgggagatgtttccaacgtgcaaatactttggtgtcggcatgatcccttggtctccgctggctcgagggttcgtcgccagaccgctaggccaacaaacggttcgaggcggttgcgacatgttcatcaatcagtatgacaagaaccatccaaacaacaggaagatcgtcgagagagttgaggaggtggcgaagaagatgaatatttcgatggcccaggttgcggtcgcttggaccttgcaaaaggatggagtcgctgcgcccatcgtcggcacgacgtcgctcgataatttgaaagacatcatcggtggggtaaatgtcaagctatccgaggaggatgtggcatacttggaggagctgtaccaaccgcaggcgatcataggacacgcctgatggagaagtctccgcaatgaatgaacgtttgaaaggtc

SEQ ID NO: 3105 - DNA, 828 bp, Zea mays
  Clone ID: 700241190_FLI
gtcagtcacagctcacagcaaacaccgcgaagccgcccccgctcccaaacccgaccgagcaaagcgcaaagccccccaaccgcggatcaatccgcagcatcgatggcgcccaaggcggagaaaaagccggcggcgaagaagcccgcggaggaggagcccgcgaccgagaaggcggagaaggctccggcagggaagaagccgaaggcggagaaacgcctccccgcgggcaagtccggcgccggcgagggcaagaagggcaagaagaaagccaagaagagcgtggagacctacaagatctacatcttcaaggtgctcaagcaggtgcaccccgacatcggcatctcgtccaaggccatgtccatcatgaattccttcatcaacgacatcttcgagaagctcgccgcggaggccgccaagctcgcccgctacaacaagaagcccaccatcacctcccgcgagatccagacctccgtccgcctcgtcctacccggcgagctcgccaagcacgccgtctctgaaggcacaaaggcggtcaccaagttcacttcgtcttagattggttgccttccctctcgtttgtactggtgtctggtagtagatctcatctagttgggggtgctgttgctagtcggtcgtgggtccctttggtatgattggccctgttcaatgggtttgcaagtgattagtttgtacatggttgtagtagatatcgtttcagctgtgattctttattactgctatgctatagttgtagtgttctcgttcccatttcttgatgcagtcctatcaactatatggttgtttagttacatgttctttttttaacct

SEQ ID NO: 3106 - DNA, 1776 bp, Zea mays
  Clone ID: 700241203_FLI
cactttgctagccagcatatacttacacgtagctagcttaataatcagcagctggtgcagcaagagtaacagctagcgacgacgaccatatggcggcgaagcagccagtcgtcgctgctgctgcctccggccaccccaagatgggggaggagaagctgatcatccggccggagaaggtgcggttcatagacgtgctgtcgatgctgctcctgaggcgccccatcaccagctacgcattcgtggaggccggcgaccggaccgccgccgacctgggcagcacgcccggcgactggctcgtcgcgctcacgcaggtcatccagaaggcgctcgccggcgcctactacccggctctcgtggtcggcgccgtcgtcgagttcctcctcaacttcgtcgcgctcaacaatggcatactcggcatctttctcaacctcttcagatgtaagctggtgatcccactgaaccgggaggcgcccaacttccggtccatgatcgggatgatcgacgggaggacggagctgaagccgctgccagccagcggcggcccagaggaccggcggctgcaggtggtgggcgtctccgccgccgccggatccggcggcgatgactactacttggacgtggagagcggcagcgcggcggtgccgctggtgcagcagcagtacgtgaacgggcggctcgtccgcctccgcaccttctccgtgttcgaggtgagcatgatggccgccaagatcgcctacgagaacgccgcctacatcgagaacgtcgtcaacaacgtctggaagttccacttcgtggggttctacaactgctggaacaagttcgtgggcgaccacacgacgcaggcgttcgtgttcaccgacaaggcagaggacgcgagcgtggtggtggtgtcgttccggggcacggagcccttcaacatgcgggactggtccacggacgtaaacctgtcgtggctgggcatgggcgagctgggccacgtccacgtcggcttcctcaaggcgctgggcctgcaggaggaggacggcaaggacgccacgcgggcgttccccaaggccgcccccaacgccgtcccgggcaagccgctggcctactacgcgctgcgcgaggaggtccagaagcagctgcagaagcacccgaacgccaacgtcgtggtcaccggccacagcctcggcgccgcgctggcgaccatcttcccggcgctgctggcgttccacggggagcggggcgtcctggaccgcctgctctccgtggtcacctacgggcagccgcgcgtgggcgacaaggtgttcgcgggctacgtgcgcgccaacgtgcccgtggagccgctccgggtggtgtaccgctacgacgtggtcccgcgcgtgcccttcgacgcgccgcccgtcgccgacttcgcgcacggcggcacctgcgtctacttcgacggctggtacaagggccgcgagatcgccaagggcggcgacgcgcccaacaagaactacttcgaccccaggtacctgctgtccatgtacggcaacgcgtggggggacctcttcaagggcgccttcctgtgggccaaggagggcaaggactaccgcgagggcgccgtctcgctgctctaccgcgccaccggcctgctcgtgcccggcatcgcgtcgcacagccccagggactacgtcaacgccgtccgcctcggcagcgtcgcctcggcgtagcttttggattgcatgttcgtttccatgcatgtgtatcattgcatgcaataattggatgaaataaacagcaataagcttcatc

SEQ ID NO: 3107 - DNA, 870 bp, Zea mays
  Clone ID: 700241208_FLI
cttctacgagcccttctggctcctcgacgtcgccaacgccgccatcgccgtgcacctcgtcggcgcctaccaggtctactgccagcccctgttcgccttcgtcgagaagtgggcgcgccagaggtggcccaagtcccgctacatcacgggcgaggtcgacgtcccgctcccgctcgggaccgccggcggccggtgctacaagctcagcctgttccggctgacgtggcggacggcgttcgtggtggccacgacggtggtgtccatgctgctgcccttcttcaacgacgtggtcgggctcctgggcgcgctggggttctggccgctcaccgtctacttccccgtggagatgtacatcgtgcagaagaaggtgcccaggtggagcacgcggtgggtgtgcctgcagctgctcagcgtcgcctgcctcgtcatcaccgtcgcctccgccgcaggctccgttgccgggatcgtctctgacctcaaagtgtacaaaccgttcgtcaccacctcctgatcgaccgtacgtcctagcttccgtgcagttcaaaacacatacgcacgaacagatcattaattggcgcctagtatatatgtgcagtctttaattaaattaactaggcattaatcgatcgattaccactacgtcgttctagtgatgcgcgtagcttgcatcatcgctcgctgatttaatttccattgtttttctttgatgatctggttagccgaaatggctagtgaattaagagaaaacaaatagtagcagtactgtgtgagtaatcccaagtcaaatacgttattgaagttgtcggcggtacaaaacgcttgtaaaatgtttgtgtttcaattaatcaagaagaattgtacgtgtttcat

SEQ ID NO: 3108 - DNA, 915 bp, Zea mays
  Clone ID: 700241261_FLI
gcgagtccgccgccgacgtcttcgaccgcgtcgccagtacgatcatccgatccgagccgagccgattcagtccatcgtctccctcttctcttctcctccccacaccattatttattgacacaccaatcaacgaacccatgcgtttgcgcaggcttccttgagtcgctgtggcgggacatcgacatggggcggctggaccaggaccccagctgcgagacgaacctggtgatcgtctcccacggcctcacctcgcgggtgttcctgatgaagtggttcaagtggacggtggcccagttcgagcgcctcaacaacttcgacaactgcgagttcagggtcatgcagctgggccccggcggggagtactccctcctcgtccaccacacccaggaggagctccagcagtggggcatgtcgccggagatgatcgccgaccagcagtggcgcgcctccgccaaccgccgctgctgggccgaggagtgctcctccttcatcgacaccttcttcgaggagccctacggctcgtcggagacctcctcctcggacgaagacgaagcagaggacaaggaggaggagaccaagctgctggagcaactataactggtttcatccacatccaatccacccattcgcctcgtcctttgaaattctctccattggattggatcttataccatgtgggaagagcggagcagtgatgctgcattcagtcatcgctgatccctctcttattcgaaaacagtctgtagcatgttcataatagctattagctagaactagaaatgattcgagggcaatttcagaaaatgctaaagaaacatatgctgtatctcaaggttttagctctgacatgattctgtatgttcctagatataagaacgcatacattctctattcaaaataaaatgctcagaggag

SEQ ID NO: 3109 - DNA, 1978 bp, Zea mays
  Clone ID: 700241304_FLI
gctcggaaggttctcctcccgtgtccgcgtagctaaggtgtcccggggagacctgctgcacacgcggcggcgaggcctccatatctctctatcatcacggcgcgggggaggaagccagcgagtaagctgaaaggggagagggagccaggggttcacgcgctcgccggagacgacgacgacgacgacgacggaagatgggcggcgacccggggaaggtcatcaggaacgtgaagggcgccgcgcagaagtacctcggcgttggcttcctgctcggcttcttcctcgtgctcctcacctacttcaccgtctccgagcagttcgcgatcacggcgcccaacgctgttcggaggacatcgccgggccacgcgcacaccacgaggtcgccgatcacctcggccgtcgaagagaagaggcagcagcctcctgccatagaggagaagccacccaagccagaggttgcaccggaggagaagcctccgaaggaagagaagccgccacgcgttgatgttgaagggccccatgctgaaacagatgaggaccagaagaagcctgtccctgacgatgatggtaggagcagtggtatcagcggcggcgatggcgtcgccacggagagtgctccggccaagaagccggcgtgcgacatccagggcccgtgggcgtccgacgtgtgcgacatcgacggcgacgtgcggatccacgggtcggcgggcaccgtgctgatcgcgccgtccatcgagagcggcggcaacccgaacccgcaggagtggcgcgtccgcccctactcccggaagcaccagggcgggatcaaggaggtgacggtgcgcgagctggcgtccagcgccgacgcgccggcgtgcgacgtgcggtcccccgtgccggcgatggtgctggccatgggcggactgactggcaactactggcacgacttcagcgacatcatgatcccgctctacctccaggcggcgcggttcgagggcgaggtgcagctggtggtggagaacatccagccgtggtacgtgggcaagtaccgggccatcctgcggcggctgtcgcggcacgacatcgtggacatggaccgggacgaccgcgtgcgctgcttcccgggcgcggtggtgggcatccgcatgcacaaggagttcagcatcgacccggcgcgggagccgctgggccactccatgccggagttcaccgcgttcctccgcgagacctactcgctcccgcgggccgcgccggcgaggctggcgggcgccgacggcgaggaggacgagcgggcgcggccccgcatgatggtcatctcgcgccgccacccgcggaagctggtgaacttggacgccgtggtggctctggcgcggcgcgtcgggttcgaggtcgtcatcggggacccgcccttcaacgtcgacgtcggggagttcgccaaggaggtgaacgccgtggacgtgctggtgggcgtgcacggcgccgggctcaccaactcgctgttcctccccacgggcgccgtcttcatccagatcaacccgtacggcaagatggagcacatcggggaggtggacttcggcatccccgccgtggacatggggctcaagtacatcgcctactccgccggcgtcgaggagaccaccctggtggacacgctggggcgcgaccacccggccgtcaaggacccggagtccatccaccggagtgggtgggggaaggtggccgagtactacctcggcaagcaggacgtccggctcgacctccagcggttcgagcccgtgctccgcaaggccatgcagctcctcagggacagggagtagcagcgtcgcagagagcagcagatgaaagtacagttttttttccaaatgacttttagagttttcttccctccctatacctccttaattatatatatttctcaattcttttccatttttggtgttcttttataaagtaaaaaaaggataaatcaaagactcacatgcttacttgttactgcttc

SEQ ID NO: 3110 - DNA, 1056 bp, Zea mays
  Clone ID: 700241308_FLI
gctcttaggtatccaaaagattctgaaaagctaatgttatcgagacaaactgggttgacaagaagtcagatttcaaactggttcatcaatgcccgtgtccggctgtggaagccaatgatcgaagacatgtacaaagaagagattggtgaggcggagctagactccaactcttcctccgacaacgggcagcgaaacaaggacaaagcaccatctcccgaagaaaatgaggacctgcagaccccaacaagccaggcttgccaaaccagccagctcggccagtctaaagccatcgttggtggagtgatgggctttagtggagtgctagccggcggcttccacaccgaggccaaccccgacgacagcttcatgagcctgatgctaaaggcccagagacctggtgaaaccgaaggcaccggtctcctccacgatgccgtcgctcaccactcggacgacggcgcccggttcatggcctaccacctggcagagttcgggaggtacgggaacagcagcaacgtctcactgacgctgggcttgcagcacgccgagaacagcctcgcagtcccaccaaacactcagccaggcttccccggcgtcagagaccaagacatgtacaacgccacagctcctcctctcaacgtcgcctccacgtcttcagagtatgattcggcgagccaaattgatcaacaacagcaacggcagcggttcgagccgtcacctctgatgcatgatttcgtggcctgaatttcagctcgcccactggaaaacgtgggggaaaattactgccaatttgtagtgtgtgccaggacgaataacttgcctggactgaattttcaggcgtgggacagtagctgtagttaacgattggggattggggggtacagtacaggaggtatatagcgtaaatgtgatgtaaatttagtgggggtgatagcggtaaagaaatcctgtaaagatggaatgcatttatacgtgtatttaagggtcatgctgtaaaaatagatttacctgtaatgagtacttatgatccaggtaatatatatactgtgcacgctgttg

SEQ ID NO: 3111 - DNA, 1253 bp, Zea mays
  Clone ID: 700241322_FLI
cctcacttcactggcaactttagaattggaatataatatggcactaactacacttccatcagaagaggtgtttcaacatttgacaaaccttgacatgttgattctaagtggttgttggtgtctcaagtcactggggggcttacgtgttgcttcatctctttccattcttcactgttgggattgtccttctttagagctagcacgtggagcagaactaatgccgttgaaccttgctagcaatctcagcatccgtggctgcattcttgcagctgattcgttcattaatggcttgccacatctgaaacatctttccattgatgtctgcagaagctccccatccttgtcgattggccacctgacctcccttgaattattagatctaaatggtctccctgatctttgctttgttgaaggcttgtcttccctgcaccttaagcacctaagtttagtagatgttgcaaacctcactgccaagtgcatctcacagtttcgtgtccaggaatcgctcacggttagtagctctgtattgctcaaccacatgctaatggctgaagggtttacagccccaccaaatcttactcttttagattgcaaggagccatcattttcatttgaagaacctgcaaatctctcatctgtcaagcgcctggatttttcgctttgcgaaatggagtccctgccaagaaatcttaaatctctctcaagtctagagagtcttcatatagggcgttgccccaacgtagcatctttacctgatctgccatcctccctccagcgcatagctatatggtgttgtcccgtcttgaagaagaactgccaagaacctgatggggaaagctggccaaagatttcgcaccttcgctggaagcacatctactaataccaaacttgcttctttagacttgccacttgaaatgaatgagaaggcacctcgatgtcaccccaacgcgacgctctctcctcttgaagctccagagttcaggaccaagtcagaagcgaatgcgtcagctaatgctgttgtccccgcggttccctgtctttttccgcttgcatttgctccgctatttcacttgttatatcattccttgattgtgaacaattgccaatgtgtatttctccgacagaatgaagtaactaactgtggctatggcttttacttttcatgtggcaattagtcctacgtgaggctaattagagtatggaatgtctcatacctttactgtctttctttgaagaaagtaagaatattggcc

SEQ ID NO: 3112 - DNA, 1667 bp, Zea mays
  Clone ID: 700241323_FLI
gatggcaacaccaaggctcgccgcaatcttcttctccttgctctgctgccgcgcagcgtcctccttgcgccctccgaatctcatctccaacagcagcgacggcgtcatcacccatctccctggcttccaggggcccctccccttccacctccaaacagggtacgtggaagtggacgaggacaatggcgtccacctcttctactacttcgtccggtcggagcgggaggacagccccggcgacgaccccgtcgtgctctggctcacgggcggccctggatgctctgtcctcaccggcctcgcctacgagatcggccctctcagtttcgatcttaacggctacgttggtggcttacccaagttggtgtataaacaagattcatggaccaaggtgagcaatgtcatatttcttgattctccggttggcgctggattttcgtattctcacacggaggaaggctacaaatcgagtgataccagagctgtgaaccaaatcctcgtcttcctcaaaaagtggtttgataagtatccacagttcttttcaagtcttctctacatcgccggcgattcctactctggcatgatcgtgccaaccgttacatctgaaattgctagaggtaaagaagaggggagccaaccgaatctaaatctaaagggctacctcgttggtaatccagtcacagatttcaacttcgatggtccgtccagaatcccatttgctcacgggatgggtctcatatcggacgaaatatacgaggcatacgagaagagctgcagtgtgggtgacagtagacgccaaagcattgagtgcataaatagccttggcgccatagacgagtgcatcaaaggcataagcccgaaccacgttctggagcccctgtgcgctttcgcgagtcccaagccgaagctaataagttcaggtgcacgggagatgctccagctcccagtcccagtgcacactgaggaggaggaggaggagcttcgcttgtctgagatctcgctgcagtgcagaacggcaggatacatgatgtccagcatgtgggcgaacgatgcctcggtacgacaggctcttggtatccacaagggaacagttccttcgtggtcaaggtgcaactacgacataccttacacgaacgatattccgagtgcagtgaagtaccatctggatgtgaccaccaaaggctacaggagtctagtttacaacggtgaccatgatatggtcgtgccttttatcggcacgcaagcctggatcaggtctcttaatttctctaccgtggatgagtggaggccatggtttgtggacggccaagttgcaggatttacaaggtcatactcaaacaacctcacctttgcaaccgtcaagggtggtgggcatactgctccggagtacatgccaaggcaatgctttgctatgtttgtgaggtgggtttctggtgaccccctttgatggcgtacatagcagctccaagttccagtgatgcgttacattattacaagcgaaacgtattggttaggggctccggagaaggaaaagcagttgtggaagggcatcctgatatatacatgcaagttattcttaaatcttgtcagtttcaaacaaacgacctataagttggcttttaaaaaagctgtaaaattagcttcaacagaatggcccgctcgatttcctc

SEQ ID NO: 3113 - DNA, 715 bp, Zea mays
  Clone ID: 700241344_FLI
gcgaggcgctcaagaaggcacaggcagagatcgacgcagtcgtgggcacctcccgcctactcgccgcagaggacgtgccccgactcggctacctgcaccgcgtcatcagcgagaccctgcgcatgtacccggccgccccgctgctcctgccgcacgagtcgtcggcggactgcaaggtcggcggctacgacgtggcccgcggcacgctgctcatcgtgaacgcgtacgccatccacagggacccgctggtgtgggaggacccggacgagttcaggccggagcggttcgaggacggcaaggccgaggggcggctcctgatgccgttcgggatggggcggcgcaagtgccctggggagaccctcgcgctgcggaccatcagcctggtgctcggcacgctgatccagtgcttcgactgggaccgagtggacggccacgagatcgacatggccgcgggcggcgggctcactctgcccaaagccgtcccgttggaggccacgtgcaagcctcgtgcagctatgcgccatcttcttctggagctctgaatctgatgctgtaataacatcttggcatgcatatgatccctagtatgctttggctgatggtgtgtgctaaactaaataagcttgagtgcgtaataccctcgtgcgtgttatcttctgtaaaatgtgttgtacagtcgtttgcgtgaacaatcaatcagtagttggtttatagc

SEQ ID NO: 3114 - DNA, 598 bp, Zea mays
  Clone ID: 700241352_FLI
tcttctgtcagtcctccccggccagcgccgctgcccgtgagttcgtgaagaagaactatggtgacatcaaggcccgcaacccctccctccccttccttgtccgcgagtgctccggtgtcccgccccagctctgggcgcgctacgatatgggtgtggagagatgcgtgaacttggatggcctgacggaagcacagattgataaaaagctggaggagcttgccaaggccggcgagtctcttaaaaccaaatagttttggaactctatcctgccatgtttaactttcccaaataaatgatgccatatgggtgagcaattgttactctatcgttatctgtagttgtgcctggaattaagtctttaattggctcaactttgtgaaataatcactactcttttacttgccatgcattttctagattacatgctatattgaaaaggaaaaaaaatcaatgatttgataagaagaatatatacctagtagcttgtgcatgagagattgatcgtgcaatatttctgcgcagttatatacatcattgtatcacagttctatacttcagttctgtgcaagactgaaattgtgcagacacatgtacgatt

SEQ ID NO: 3115 - DNA, 1625 bp, Zea mays
  Clone ID: 700241387_FLI
gacaacatggaaaaaagaactttcgcgtcttcccctttccctagttggaagaatgtgctcgacacaccgggttccactcatgtcgttggttactgcaaacgtcgcagcactatcaaggacaacaaataagcccttcagacatcctacagtctcaggggacaagctgtgaatcttgcggattgacaagagagaaagagcatagcacctaggattagtaagctgggatcaatggagatggcaggcgccgcaggaacggaagcatggttgccgtacgtgaccacggtggcgtcctgcgccgtcggcgtcttcttcctgctctacttctacgcgccacactggcgggtcagggacgtgccggggccgccggccttgcccgtcttggggcacctcccgctgctcgcccgacacggacctgacgtctttggcctcctcgccaagaaatatggcccgatcttcaggtggcaaagccacaacgataagatcgagacttgatcttgcagaatcgagtgctctatttcagcacttcacctagtagatgttttcatcaggattaaaatgggaatgaggtttagccatggctgcaggttccatttggggaggcagcctctggtgatcgtcgctgacccagagctctgcagggaggttggcgtcaggcagttcaagctcatccccaacaggagcttgccggcgccaatcgccggctcccctctccaccagaagggcctcttcttcactaggtgacttttagtttgttcgttttcctctacacatttggaaccacgagcaggtgcgccacatagcattgcgatctcgtcagggatgaacggtggtcggcgatgaggaatacgatcatctcgctgtaccagccatcccacctcgccggcctcgtccccaccatgcagcactgcatcgagcgcgccgcggacgccataccggcgatggtggttcaggagaacgggcaggtcgatttctccgatctctcgctcaagctggccacggacatcatcggtcaggcggcgttcggcgtggatttcggcctcacggcgagcggtcccggtcccggctgcgaggccgcggagttcatcagggagcacgtgcactccacaacctccctgaagatggacctgtccgcgccgctctccgtagtgctcggcctcgtcgcgcccgcgctgcagggcccggtacggcacctgctgagccgtgtcccggggaccgccgactggagggtcgcgcggaccaacgcgcggctgcgcgcgcgagtggacgagattgtggtgtcacggacgcgcgggcgcggccagcacggcgaaaggaggaaggacttcctgtcagcggtgctggacgcccgggaccgcagtgcggcgctgcgggagctgctcacgccggactacgtgagcgcgctcacctacgagcacctcctcgccgggtctgccaccacggcgttcacgctctcgtcggcagtgtacctagtcgccggccacccggaggttgaggccaagctgctggcggaggtcgacgctttcgggccgcgcggcgccgtgccgaccaccgacgacctgcagcaccggttcccctaccttgatcaggcaagtgacacgacaatgcagcgtcacgtgtaggattag

SEQ ID NO: 3116 - DNA, 655 bp, Zea mays
  Clone ID: 700241392_FLI
tcatgatggagttagtaagaatacaagtcatgatgaagtggcaagtgtccaacctagcagagaagcggaaatgagacccagatctgcacctccaagccaatcaacccaagcggacaattcaggttggtctgtggaaactctgatggaactcttagatttcactccacaggaaataaccaaggccatttcggcgaccgagagtaaccgtttcgtagcatctgtcgtcattgctttcctggtggttctgtcaaactggggccttgacattggtggtgccatcaccagagtattagttggtacaaggcctcttctatttctcattgtaaccaacatcaccattgtcttcacattgttgatggagaacaaagaccccaatgtgagaagcagacccgttggcgtcaatctgggttcagctgatagcttagggcagatgctagagatcgggttgctgctacagaaagcactaggtgctctgctgattgactgcagcgtttgcgctgttattatgatatgttttcttggattctgagggagcctgggtagaagtctcacagaaacctttgtaattttttttgtctcatgctctggactgttattccattttgtaacatctcattttggctgagttctaatttatgcacccatgttttctgtt

SEQ ID NO: 3117 - DNA, 1569 bp, Zea mays
  Clone ID: 700241432_FLI
ttaccccattccatcgtcctcttcggcggcgctggcgcccacaccaccgaaccctcttccagcttccttccacccgagcacgccggtcacccatcatcgccgaagccctccccctcctgcttcagctgtgctggtattagattagatcaaagtggaccgcgtcgggttgggtccagtcctttcgctgattgcggttgcagattcctctcctgcgaggcacgagctgagtcctatccctatccgcccttgttgcagcggtgcggaaggcaatggtggggttgggatggagagtcggctcaaaggtgcagagatgggtccggagctgcctccggggtttctcttctgctgcagttccgtctcagctggagaatgtcggattcatcggacttgggaacatgggttcccatatggcaaggaacttgatcacggctggatataaagtgactgttcatgatataaatgaaaattctatgaagaaattctcagaggatggaatccctacaaaacagtctccacttgaagtatcagaatcgagtgatgttataattaccatgcttccttcatctactcatgttttagaagtatacaatggacccaatggcttgctttgtcggggcgaacgcttgggcccatggttatacatagattcatcaacagttgatccacaaacatcaagaaagatatcgacagccatctcaagatgccttttaaaagaaaagaaaggttacgctgaaagccctaagattctggatgctccggtgtctggaggtgttcctgctgcagaagctggcaagctaactttcatggtgggtggtcttgaggaagcgtatttagcagccaagcccttacttcaagcaatgggggaaaaaacaatctactgtggtggtgctggaaatggctcggctgcaaagatatgtaacaacatggcaatggcaatcagcatgcttggggtctccgaggcctttgttcttggccagaaccttgggatcaaagcaaccactctcacagacattttcaactgttcaagcgctcgctgctggagtagcgatacatataatccagttcctggagttatggaaggtgtaccatcatcaaggaactatagtggtggtttcacttccaaactaatggccaaagatttggatttggccatggcttctgcatctggagttggcttcaaatgccctatgggttccaatgcacttgaaatttaccgaaaactatgcgaggatggttgtgaactcaaagacttctcgtgcgcattccgacattactattctggcaagaatgaagagtgatcttggagttacgctgcaaaatttcctcctttcgaaatcaataaaacaacaaataaagttaggacctgtttatatcccatgaattgaaaccaatatctagaaagtgtgtttccttgtttcattattagattactttctaattggtctaaattcctggaatcgaacaggaccttggaaagtttacagtgtaagctgtgtagcattgtaccagagacatggtggttgtttgttgaccagtggtgctgatctgatcatctgtttaaaactgttg

SEQ ID NO: 3118 - DNA, 1376 bp, Zea mays
  Clone ID: 700241443_FLI
gggatgaacagctgcataagctatatgctccatatatatagattaaccaaacccacttcctgattggcccatcaaaatcccctttaattccgatcatctaagagcttgctatggaagcatggatggcagatttccaccacaactatattgttagccccagtaaagcgatgacgagccaacgcagaatttgatagacaacccagtaaagttgtatcttacaagacacaataaattccctagttcgttcaccaactggtgatgacccatcgaaattccgcgccatcatttaaaaatagcgatggcggaatttcaccacgaatgctgctcacatgaatgacgacacgacacaaacgagaagggcggttgcttaacttgcttcaagctgggcgaacgccaccgtcagaagcccagaagcgctgctgtgatgccattcattttcaaggcacgaactttctagaagcttggcacgaccccgtaggccccggcgtccacgaagaagccgtccctggcgtcgtcggagaaggagagccagaacttggcagcagcgtcgatgctgtccgatgtgccggcgcccgaggaggaggaggaggaggtgccggcggcgcgcttgacaaagcggcccttgatcctgggccgcgcctcggcataggccttgcggacgcgtagcggatggtcttctggaacttgcgcctctcgcgcttctcgcggtacctttgcaccttcgcctccgctccgccgccgccgcggcgaccacggcggcgccctggacgacgacagtgggcgaccacgtggccgtccatgcggcggcgggcagaccgggctgcgcccacagaggtgcagcgccgtgatggacgacgggcgccacgccgtccggcaggtagccgccgccgcccgtgacacaggccgcgaggtcgacgtcggacagcaggtcgaacaggcccctgccctccgcgccgctgtcgccggtggtgaagctcgccgacgagctcccgttctgggagcttccctgcccttgcctctgaccctgcgcaggcgccgacgcccacgacgacgccgcgtcgatgtcgtcgggcgcgaagaggtcgtcgtcgtacacgccggatgcagcagtcaccatggaaaggggcacgcgctcgtggcgcgacgccagcaggttcgcagcgtgcacagcggtgtcgcaggggctgcagagcgccgcagcgtccgccgcgcagtacaccaccgcggcgccgccgcagaccgcgcacgcgcaggcggctcccccaggcgctgggcttgtgctgccttcgcttcttcccatctctccttctaggcttttttttccttcttctggacttgcctcagctttcttgagcttctttgtgttttgttcgtgc

SEQ ID NO: 3119 - DNA, 1456 bp, Zea mays
  Clone ID: 700241453_FLI
cctcatcgtcgaacttcatgctgtactggggaacaggtggtctcagattgcaacaaggttgcctggaagaactgacaacgagatcaagaatctctggaactcgagcatcaagaagaagctccggcagaaaggcattgaccccaacacccacaagccgctccttgtcgaggttgaacgcagcaaagcagctccaacgaccagtaccgagagaacctctgagtccaatgatgttgacccttcaagtggcgccgcacttggcaactcgagccatcttcttctcagcgagacagcacaatcaccacagctgccagcgctcggtaagcatcgcagagaaactactagcctggcacatctaagggtgccgcccaaggagttgttccttgaccagctggcttctggtcatgagaacctcactggctgccgcacagcaggcccagttccaaatttccctttccaacagctgatgtgctacaacaatgaatttggcaacaagaatggtgctagtaacaattcactctggtttaaccacaatgagacaagtggcagcaccatttccactgtgatgccaccagtttcgccatcaactctctcgacatcaacagggctcaataggtcaccagacaacccacactcgggaggcactgccattcagagcacccagttctactgggacgctgctaatcctagcagctgcagcagtagaggaagcagcggaagcaacggcttgggatttgagctgcaaagcacaagctcgcttctggagagtagtgttttcccatggacagaattaacaccagataagaatagccaagttcagcttggggaagaactcaagtggcccgacttgctccacggaacattcacagacacacatgcaaccatgcagaaccttagccagtcactgtacgaagatgttatcaaagccgagagccaattcaacatagagggcctctgtgcagcctggtctcaaaatctgcagccacagcaacacctgcaggtatcagatttgtatgacaaggatttgcaaaggatgtccttgtcttttgagaatatctagacagcatgtttcagcatgcagggaacagagaaatagcagaaagctgagtcaatgaagccttaaaaaatacaatatttcttcacagattcatttgaaggctatgtggaggtgtgttttacgtaggtacattcttatgatgaaacagagatcaatactgataactgttcaccagtgtaaatgaaaaaagggaaaaaaatgaatctatattacagcataatgtatagactagagaaagtacatcctaggagtttacctcctttcatttaaaagttgctgtctttatctgtacatgcatgtagctcggcttttttgtataagtgagtcatggttgatctttctctacaaaataaatgaggcaagaatgtgaaatactgcacttgtcagtagctcttcggaacc

SEQ ID NO: 3120 - DNA, 999 bp, Zea mays
  Clone ID: 700241481_FLI
gctacatcgaggtgctggagggcgagccgcagatggcgtcgcgctacgcggcgcgcggcggcgaggagggcatgctcccggaggtgccgtacgagcggttccgcatcgggtcgcagttcttcgcgctggcccggcgccacgccgtgctggtggtccgggagcgccggctgtggcgcaagttccgcgcgccctgcgtccccgagatggcgcaggactcgtgctaccccgaggagcactacttcccgacgctgctggacatggcggaccccggcggcgtggcgcggtacacgctcacgcgcgtcaactggacgggtagcgtcgcgggccacccgcacacgtacgccgcgccggaggtctcgccaaggctcatcgcagacctccgcgcctccaaccacacccaccacccccacatgttcgcgcgcaagttcgcgcccgactgcctcggcccgctcctcgccatcgccgacaccgtcatcttcaaggactgatggcgggcggctccatccaggtactacttactactcggcagcagagggctgggcctggggctagtcaaggccgccgacgacggacggcgcggcaccggaatcagtggcgttcttctcccgtttggaccccccctgcagcgtcatgcatgttcatcagctccagtgtttctgtgtagtagattaggagtgtagagaagaggaggacgacgacgacgacagcacgcggcgacctaatgcgaagcggcaggttgtggttgcgtgcgtgtacgcgtcctcgatcgtcgtccatccgtgaaaaaaaaagaagaaaaaatatcgcgcgcgtgtgtggcttttgcctagcgtagccagccaaataaggttctactgcaagtaataaatcctagtgttgtacagcataggtagccgccactcctgctctgtgggtttcgtgtctcgatgtttttgtgctttgcagtgtactacgtacatactaatacgtgcttccaacttccatccagttaagttgagc

SEQ ID NO: 3121 - DNA, 1093 bp, Zea mays
  Clone ID: 700241489_FLI
cctccggttgctgacgtcaagtcgttgacacactatggtgaaccatatgatggcaatacacgattttttaagagtactctatttgttgcagcggttcgagcctgctatggtgaatcctgcctcctccacggtgttgaatggatgccacccaagggtggaataacagaaggacaaatgcttaaattcatgggtgcaaacatacacttatccccaacacaagccaagattctgttggaggatgaaactgctggttttgcatacttgaatcttcaggaagcttgtccaccattatattcgattattgggctcagggagcatattaagaaacggccaccgttggctacctccgagaaagttcaacaatttgtgagggcacggggcagagaatcaatggttgcaggattttatcatgaaggctatgaagatccgttgcttatgctgatgagaaggagaactgttcatgctggactagttgtaaagggtgaggaaggtgcgctttcaatgacaaccaaggaaagatcagctcatgcatcaaaaggacttcctgttaaccactgttcagggttccggacacccaacagcataaattcctctaaaactgatggtattcctagagaaagtttcagggtcattgtgaatgcccaggaacttggttttgaatccaccgaaactcccagaactgatagatcaattctaaagaacttggagctcggcctggcagcactaggtggcgagaaaggagcagcctacgaccggatagttctcaacgcagctatggctgaccacttgctaggctgcatcggagccgaggacatcgacgctgcgctcgaccgtgcgagggaagccattgatagcggcgaagctctgagaaggctcatgagctacataaagatctcgcacagagtctcctaggctagctgattgattgtacaattttggcttcgaaccacgactcgggtatcttcttcgcggagcccgagtgcctttgccactcggtgtcggtgtttacaagccagcgtgaaatgttccctcgcctcctcaacgacctgtcaaaaagaaaaacagttgaaatggaacagtgccttgttgtttc

SEQ ID NO: 3122 - DNA, 1194 bp, Zea mays
  Clone ID: 700241504_FLI
ctactctccggccttcctccgctgggcgctcaagccgccgtccttcttccgggcctggcacatcggcgttcgcgccaaggagtccaagaagctcgtcgccttcatctcgggcgtcccggcccgcatccgcgctcgggacgacgtcgtccgcatggccgagatcaacttcctctgcgtccacaagaagctccgatccaagcgcctggcgcccgtgctcatccgggaggtcacccgccgcgtccaccaggagaacatttggcaggctgcatacaccgcgggggtcgtcctcccaacccccatcaccacctgccgctactggcaccgatccctcaaccccaagaagcttatcgatgttgggttctctcgccttggtccacgcatgacaatgagccgcacggtccggctatacaagctgcctgacgcgccgctcacccctgggttccgcagaatggaactgcgggatgttgctgcggtcacacggctgctgagggcttaccttgcgaggttcgtggtggcaccggattttgatgaggtggatgtggagcactggctgctgccgcaagaggatgtcgtggacagctaccttgtggagagccctgagacgcatgaggtcacggatttctgcagcttttacacgctgccctcgtcggtgctgaacaatgctaactatgcaacgctcaaagccgcatactcatattacaacgtctctaccaaaactgcattgcagcagctgatgaatgatgctctgattgttgccaagcagaagaattacgatgtgttcaatgctctcgatgtcatggagaatgagtccttcctcaaggagctcaagtttggtcctggagatgggcagctccactattacctctacaactaccgtattcgcaatggcatcaagccctctgagcttggtcttgtgctactatagggcagtctaatcaggacagtcctgagtttacaccttcccttccgcagcagtggtttctcattttgcctactgtggtagtgattctccttgatatgattgccatggtcactgataggagtcccaagatgatttgcaaacaagggagactggaattagagatatcctttcctcaatttaaggttactgttcccattagtgacatttcgcgtgcatcgtccacaatgtgtatgctggcaccgattttaccgagaaattttgatgtgtattcg

SEQ ID NO: 3123 - DNA, 1430 bp, Zea mays
  Clone ID: 700241512_FLI
aaaggctaaaatccaaaaaagttggccttcctcgagctagcggctagcgccggtgactcgaccggtgaggccaggatccttggctcgaagaagcgatcgagcaccacacggggttatagatcgacgaaggatccaggatgcggatgagctgcaacgggtgccgcgtgcttcgcaaggggtgcagcgacaactgcgccatccggccgtgcttgcagtggatccgcagccccgacgcgcagggcaacgccaccgtcttcctcgccaagttctacggccgcgcaggcctcatcaacctcatcaccgccggccccgaacacgtccgacccggtatgtgtatcatcagtgtacgtacatatatatatgcacctatctaaaagatccgtatacacatttctcgcggatcctgcttccctgtgtgtgctccaagcctccatgttgtgatctgatgatctccgtttataactttatatatgtgcagcaatattccggtctctgctgtacgaggcttgcggacgcatgctcaacccggtgtacggctcggtcggcttgctctggtccgggaactggcagctttgccaggcggccgtcgagtcggtcctccgcggcatacccatcgcgcagccgccgcccgccgccacggctgtcccgcctctccggtcgtgcgacatccgccacgtcgccaggagggaggcaggccgcggcgccgtggatgccggcctccaccgaatggccaacagctcgcgggggcagttcaagcgatccggcgcccagcacagatccgcagactccggcagcatcgagctcgtcttctcccagccgtcggcggcttcgtccatgctggtcgacatccgacaggcgcagccactgaactgggcgccacgccatccaagcccccaccagtactactccgcaagccatgacgacgacgccgtgcgtgagagcgacgacagcaaagcctcggtggacaccgtggatgtctctcatgtcagtcagtcggaacccgcggagccaccgagagaaagcaatgagcgggcggatggtctagacctcacactaggtctgccaccgactgcgcacaaggtcgagccgtcgtcagacgttgacgacgaccagacttctcacagaggcgagccgacgaagctcggcttggccatggcggattctcgagctagataatgaaatcgttggatatactactcatccgatcgatcgacagggagttttgattgcctggaactcgtttatgtcttcatttgtagttctgtaggggtggctatatatggtgttttctagttttggaaactgtaacaacagtgtgtgccctctttttttttgcattttttatgtatgatacatcgtttcttgatgtgttcttcccactatattttaaggggatgtttggtttatagggactaatgtttagtcccttc

SEQ ID NO: 3124 - DNA, 995 bp, Zea mays
  Clone ID: 700241542_FLI
ctctgagtctctgaccgccccttccgtcgtccccgttcgaaggcgcggcaagcgagcgattcagccagattcgattcgacatgaatcccgagtacgactaccttttcaaacttctgcttattggtgattctggtgttgggaaatcatgcttgcttctcagatttgcggatgattcatatttggacagctacatcagcacaattggggttgattttaaaattcggacagtagagcaagatgggaagaccataaaacttcaaatttgggatactgctgggcaagagcgcttcaggaccatcactagcagctactaccgtggagctcatggaatcattattgtatatgacgtgacagaccaagaaagcttcaataatgtgaagcaatggttaaatgaaattgatcgttatgcaagtgacaatgttaacaagctccttgttgggaacaagagcgacctaactgccaacaaagttgtggcaactgagacagcaaaggcatttgctgatgagatgggcatcccgttcatggagacgagtgccaaaaacgccaccaacgtggagcaggccttcatggctatggctgcatccatcaaggacaggatggccagccaaccagccgcggccaacgcaaggccagcgacggtgcagatccgcgggcaacccgtcaaccagaagacgtcttgctgctcgtcttaagcttgcctgatttctctggttccttgtgactattactaccgtttgtgcgagcacgcaaatgtatttgttgcattattgctgatagcatctgttcgttggccagatgagtagagagctgaaaaaatgttaagaacaccatagagagaagtccatccgttctctctcaacttaaggagcaaacagcaacacttaattttttttctgctttactgtttattagtcgcgttacatttgtgaacagttattgtaatatctttttttaactctgtattcgtagtgagatgaaattcgtgtgtgggcaac

SEQ ID NO: 3125 - DNA, 1824 bp, Zea mays
  Clone ID: 700241632_FLI
tagatccaccacccctccccttgtcgcatcaccttttctactgcaaaggggcacaaaaggtcctctaaaccccaccagcagcttcccctccgatctcaccccaccgccgccggcgagatctccaggatgccgttggccgggcggcgggacggccccctaatgctgcgaggcggcggaggcgggaaacccctgtcacgcgggtcccgcatcgcggtggccgtcgctgtcggcgtcgcactcggctgcgtctgcgccttcctctaccccaacggcctcttcttccgcccgtctgcctctgccctccaatggacgcaccaggttgattcaactgcttgcgaatcatcaagacaagttaccaaccttaagtcccaggtgtcatcattggagagagagaatgttgaacttaggaggcagattaatgaattatccatgaagcttcaaatcgctggacaaggggaaaatgagactttgtacaagcctggtccttttggagctgtcaaggctttgagaacaaatccaacagtaatccctgagaactctgttaaccccaggttggccaagatattggaagaggttgctgtgaaaaaggaactcattgttgcgttggcaaacaccaatgtgagggagatgcttgaagtttggtttagcaatatcaaacgagttagtattccaaactacctggttgtggcattggatgacaatatagaaagcttatgcaaatctaaaggggtgccagtctaccggcgtgatcctgatgaaggcatcgacaacattgcaaaaactggtggaaaccatgccgtttctggactcaagtttcgtgttttaagggagttcttgcaacttgggtatagtattctcctctgtgacattgatattattttcttgaggaatccatttgatcatctttatagagattctgatgtggagtccatgagtgatggccacaacaacatgacagcgtatggtttcaacgacgtgttcgatgaaccttctatgggttgggccagatatgctcacacgatgcggatttgggtgtacaactctggatttttctatataagaccaacggttccttctattgaacttcttgatcgtgtggctggccgtctttctcgtgagccaaagtcatgggaccaggcagttttcaacgaggagctgttcttcccgtcccatcctggttatgaaggccttcatgcatccaggagaaccatggatttttatcttttcatgaacagcaaagtcctcttcaagacagtgaggaaagacgccgggctcaagaagctaaagccagtgattgtgcatttgaactaccaccctaacaaactagagcgaatgaaagcggttatcgagttctatgtcaacggcaaacaagatgcactggatcatttccctgatgggtcggaatgaggaaattacagatagttgccggtaaagaaacctataccctctgtatcctactcattttggggtgttctggcgtttggatctacatgtcgcagatgtgggatctccacacgtgcgagaatgtttggcgagtgcaacatggatggatgcattgactttgaggtatttggatatctccttggtctctagtccctactaacctcaaccgttctgtagcaaatttgtacaagcttagatagatggctcatcacgttttccccccttttccgtacgattttttgaggttcgaattttggaagtcgaggcggtttgttctggactggtgatacgttttgatgctggtgtttcttgtgtggtggtttgcttgtggtttgagaaccttttacggtttcatttttttaacgaaacaatattgtgggc

SEQ ID NO: 3126 - DNA, 1554 bp, Zea mays
  Clone ID: 700241691_FLI
ctttgtcactcttctctgtgtaacgacttcctccctttcctgccgcaccacgcaatcaccggggcggaggcggctgccggcgagcacttgggcgtctccggccaccgcctgcctcgttgtggttagtttccctcaccttccccttacctcactgccatattccttctcccgatccgtcagtttcgccagctgaagacgatcccaatctcagatccaactaggaactcacccagcgctatctcccggcaggctccccgttgactcccgcgatttgttacccgctggcgctgccgcacacagctcaaaaggagtagcagcgcccctggttgccggttggagcgtcaaggatgagcgggaggaagaatgcgggcaaggtttccccctggttgctcgtcctcatctgtttagggtgcttctttgtgacctacaacctcctgacgatgcccagccggggacgggatgggccgcgcaagttcctcggcggcggcggggatcgccactcaactgcctcgttggggtcaggctctgattcggaccccgcgaagcggttccacgtcgcgcttacggcgacggacgcactgtacagtcagtggcagtcgcggataatgcactactggtataaggagatgagggaccgacctggttccgacatgggtggcttcactaggatccttcactcgggcaagcctgatggattgatggatgagatacccaccatggtggttgatccccttcctgaaggcaaggatcagggatatattgtcttaaataggccttgggcttttgtccagtggatccagaaagcaaagatcgtagaagagtatatattaatggcagagccagatcatgtctttgtgaagcctttgccaaacttatctcatggtgatgagccagcggcatttccatttttctacatcaaaccgactgagaatgagaagatattgaggaagtttttcccagaagaaaaagggcctatttcaaatattgatcctattggcaactctccggttataatcaagaaggctcagcttgagaagattgctccaacctggatgaatgtttcattaaaaatgaaagaggatcaggagacagacaaagcattcggatgggtcttggaaatgtacgcatacgctgttgctagtgcactgcacggtgtgcaccatagtctccataaagattttatgattcagcctccttgggacctgaaaacggacaacacattcatcatccattatacgtatggatgcgattattcaatgaagggtcagcttacttatgggaaaatcggtgaatggcgttttgacaaaagatcttaccttcaatctcctccaccaagaaatctttcactgccccctccaggagttcctgaaagtgtggtcacccttgtgaagatggtcaatgaggccaccgcaaacattccggggtgggaggacgatagatgattgatggtctggctgagttgtagtttattccagcacccagctggtatggcttttgttcaaaaacatggaagaatatcattggtcaataaaagaaaagcatttgattaatatc

SEQ ID NO: 3127 - DNA, 741 bp, Zea mays
  Clone ID: 700241716_FLI
gcttctcctccccctcttaccaagtcctccttgggttagggttccttagggttttgtggaggggcgatggcggcggctgatgtggagtaccgttgcttcgtcggcgggcttgcctgggccaccagcaacgagtcgctggagaatgccttcgcctcctacggcgagatcctcgactccaaggtcatcaccgaccgggagacggggaggtctcgcggcttcggcttcgttaccttctcctccgagaactccatgctcgacgctatcgagaacatgaacggcaaggagctcgacggccgtaacatcaccgttaaccaggcccagtcccgtggcggtggcggtggcggcggtggctacggcggcggtcgcggcggcggcggctatggtggcgggcgccgtgacggcggttatggcggcggtggcggctacggcggtcggcgcgagggtggtggcggcggctacggaggcggtggcggctacggcggtcggcgcgagggtggtggtggcggctacggcggcggcggcggcggctggagggactgatgtgtgggcccatcctggcttcggccgagttatcttatctatctatagtatcgtgttaccgttcgcttctgtcaccgtgttagtgtccgttctacctttggattaggtgttggtacccctgttgttccctttgtttgctcccgctatgaaacgagacgagagaagaatgagcaaggtttttgttcgcagctatttttgtcc

SEQ ID NO: 3128 - DNA, 532 bp, Zea mays
  Clone ID: 700241732_FLI
cttcagaattccctgatcacgttccagctgagccgccgtactagccggacaggaggcgacaccgcgagagcagagcagggacaccggaccgtgccatcatgttggaaggaaaggcggtggtggaggacaccgacatgccggcgaagatgcaggcccaggcgatgtcggcggcgtccagggccctggaccgcttcgacgtcctcgactgccggagcatcgcgtcccacatcaagaaggagtttgacgcgatccatggccccggatggcaatgcgtggttggctccggcttcggctgctacttcacgcacagcaaggggagcttcatctacttccgcctggagtcgctcaggttcctcgtcttcaaaggggcggcagcatgatgacaagccccacggctaacatcgcgagttcgcgaccaggcaaagcaggtggaggatggggttgttttttttttcttttctttcaccggcctttgtggacggcttgcctcgctgtatacgatatcaccatggtaataccaaccagtagattg

SEQ ID NO: 3129 - DNA, 1288 bp, Zea mays
  Clone ID: 700241738_FLI
gggggaggatgggcaggcgcagaggaggaggaggaggaagaagaagaagggggacggggtggtgctcttcaacttcggcgactccaacagcgacacgggcggcgtggcggcggtcatggggatccgcatcgcgccgccggagggcagggcctacttccaccaccccacggggcggctctccgacggacgcgtcatcctcgacttcatctgtgagagcctgggcatgccgcacctgagtccgttcatgaagccgctgggctccaacttctccaacggcgtcaacttcgccattgcagggtccacggccatgccgggagtaaccaccttctcgctggacgtgcaggtggatcagttcgtcttcttcaaggagagatgcctcgactccatcgagagaggtgagagtgccccgattgttgagaaggcgttcccagatgctatatacaccatggacatcgggcacaacgatataaacggtgttctccacttgccctatcatacaatgctcgaaaatctccccccagtaattgctgaaatcaagaaagccatcgagaggttgcacgagaatggagccaggaagttctggatacatggaacgggagcattagggtgcatgcctcagaagctttctatgccgagggatgacgacagcgacctcgatgagcatggatgcatcgcaagcattaataatgtctgcaagaagttcaattccttgctgagtgaagccttggacgagctgcgtttgacactgaaaagttcgactatcgtctttgtggatatgttcgctatcaagtatgatcttgttgccaaccacacgaaatatgggattgagaagccattgatgacatgttgtggtcatggaggccccccttacaactatgaccccaaggagagctgcatgacttcggacaaatacctgtgcaagcttggcgaaaagttcataagctgggacggggttcacttcactgatgctgcaaatggcattgtggcttccaaagtactcagtggtgagtacaacattcccagggtcaagctggccagcctggtccccgttccaaaatctgacgattaatggtgatgcagcaccttaattggcctttagtttggcctatcaaggatgatgaagatgaaactactaacaaaactgacaccaccgaagtttaattattttgaggttcttacgttacatccattgtagaagaagactttccttttgtttacttctctttttgtacaatcggcgcatatgtatatcctagggttaatatatggcgatgcaggtgtctgtacc

SEQ ID NO: 3130 - DNA, 1647 bp, Zea mays
  Clone ID: 700241792_FLI
cctagctgcggctgctctgactgcagatcggcgctggtgtctcactggtacaccaattcagaacaatttggaggatttatacagccttttccggtttctgaaagttgaaccatggaggaactgggctttgtggaataaacttgtacagaaaccatatgaagaaggtgatgaaaggggcttaaagctactgcagtccattttgaagccaataatgctgagaaggactaaaaattgcacagacaaggagggcaggccaatccttaatttaccccctgcaaacattgaagtaaaatactgtgttttatctgaggctgagaaggatttctatgaagctctatttcgaagatctaaggtaaaatttgatcaatttgttgagcaaggaagggttctgcacaactatgcttcaattttggagttacttttgcgcctaaggcaatgctgtgatcatccattccttgttatgagtcgtggggatacaaaagagtatgcagacctaaacaagcttgcaaagcgttttctgcgtggtggtaatggtgctgttaatggtgattcttgcatcccctctagagcttatatcgaacaggttgtccaagaattgcaaaaggatgaaggggagtgccctatttgtcttgaagcctttgaggatgcagtattaactccctgtgctcatcgtttatgccgagagtgtctcttatctagttggcggagtgcgacagcaggcctttgtcctgtctgtagaatgtcaatgagcaagcaggaccttataactgctcctactgataaccgctttcaaatcgatgtcgaaaaaaattgggttgaatcttccaagatatctgctctcctgcaggagttggaagctcttcgcagttcaggcgccaagagtatcgtgtttagccagtggactgcttttttagatctgttgcaaattccactttctaggaataatttctcatttgctaggctggatgggacgttgaatcttcagcaaagggagaaagttataaaggagttctcagaggacaaaggcattttggttctgcttatgtctctgaaggctggaggtgttggaatcaatcttactgccgcttctaatgcatttgtcatggacccttggtggaatcctgctgtggaagaacaagctgtcatgcgcatccatcgaattggtcaaacgaagactgtttctatcagaagattcatcgtgaagggcactgtcgaagaacgaatggaggctgtgcaggctcgaaagcagcgaatgatttctggagctttgactgaccaagaagtccgcactgcacgtatagaagaactgaagatgcttttctcctgagactacaaaagggctgttgtgcatcggatggtcggcaattcggcatggctaaaacaagatggctggtagccagaatgttggaaggtaagacgagggtaggaaattgcacgcccaaatatcttggcgtttagctgctgttgtgcgcacgatttgtacatcatgaatggttaatggctgacaagagtccaagacgcttcattgagtgaaaatcgaaagcatcatctcaaaattgaatatttctgtttgggttttgtataagtagataaactgaacatttgcagtaatacgaaggcagctacctgctcgatcattaatttaac

SEQ ID NO: 3131 - DNA, 1308 bp, Zea mays
  Clone ID: 700241793_FLI
cccttcttcccgattatatgttgctgatttttcttacaactttcttgtcggaaaaattccatcctgcttgaaatatcttccaaggtcaagtttccaagggaactgcttccaggatgagtactctgtccaacaacgacctttgcaaatttgtacaagtggttctactggccagcaaggtgtcatatacggatccaaacatcctggccataaacatgaaaaaatgcagcaaccaatttggcttcttgttttagaaattgcaacgggtgttcttctggttgtttttgtgattactggtatagttactgcttccagaagttgcaagctgaagccttctataagaatatcatcatggaatcgatcgaaaagttggagcgacgagataacagtgttgattgattctgatatgctgaaaagtctaccaaaattaagtcgccaggagcttgaagtggcctgtgaggattttagcaacatcattggctcaactccagagacagtagtctacaaaggaaccatgaaggatggacctgaagtttctgtgatatcgttgtgcgccttcgaaggtcattggactagccaccatgaactcttttaccaaaacaaggtcattgatctggcaagattgaatcatgagaacatagcaaagttcttagggtactgcagggagagtgatccattctctcggatgctagtcttcgagtacgcaccaaatgggacgttatttgagcatctacattatggagagggaggccaattttcttggctcaggcgaatgaagatagccattggaattgcccaggggttaagatacctgcacacggagctgcagcccccatttgctatatctgagctgaattcgaactccgtgtatgttacggaagattttactccaaagctggtggattttgaatgctggaaaatgatgttctcgagacactccatctcgagagacgagaagactcgtgggcacttgaacagcaagtcctcttttcccggccacggggattctgcagcggatagacaagccgatgatatccaggccaacaccttcgctttcggagtgattttactggagatcatcagcgggcggcttccatactgcaaggataaaggctatttggtcgactgggcgagcaagtacctccagcaggcagaggagatcgggaagctggtggacccggagctgggcagcgtgcggagcgaggacctggcggtgctgtgcagcgtggtgagccggtgcatcgacccggacccgtcgaagcggccgtcgatgcagatcatcacgggcgtgctggagaacgggatcgacct

SEQ ID NO: 3132 - DNA, 257 bp, Zea mays
  Clone ID: 700241801_FLI
gccatggagctgtccgggccaaggtgaccgaccatctggtcgcacaggacaggacgcataggaaagcctatggttgtattgcattggagtcggttaggtgtagagagccccccgacacaagggaaggcgtcaaattttctggtgggttgtagggtgtgatctgtctgtatatagctgtgttggcattcattgtagtgttgtacatacagcagctacttggtcttggtggcaaagagatgagatgaatgagtgtatag

SEQ ID NO: 3133 - DNA, 1161 bp, Zea mays
  Clone ID: 700241855_FLI
cccggtccatccatccaactgcaccgcacctaccttttcaatccaatcctgccgcattgcataattcgcatcgaagatcgatgtgaatccgtggaagggagggcggaggaggaggaagaaggaggggtcgaggccgaatccgccggtgagaaggggagcgatggcgaggctggcggtggccgcgagggcgttctccgctgcggcctccggcggcggcgtgtccatggtgcagggggcgtcccgggggatcggcctcgagttcgtgcggcagctgctgcggagaagcgatggaggccgcgtcgtcgctacgtgccgcgcgccgggttccgcggccgagctccagaagctcagggaggagcacgcgcccgggcgcctcaccgtgctgccgctcgacgtcaccgacgagagcaccatagaggcagctgcggcctcaatcacggagacccacggttctcttgaccttctgatcaactccgccggcatcctctcgatcccgaacctgatacagccagagactacgctaagcaaggttcagaagtcgtccctgatgctggcatacgaggtgaacgcagtcggccctatcctagtgatcaagcacatgtggcctctgctgaagatcggaggccgctccgagactgggagagggttcgcgctggttgcaaacatgagcgctagagtcagctccataggagacaacgctctgggtggctggcatgcgtacagagcttctaaaacagcgctgaatcagttgaccaagacagtgtcggtggagttcggcaggaaggacaacatcgcctgcgtcctgctgcatcctggaaccgtggacaccgacctctcgaggccgtttcagaggaatgtccccgagggtaagctcttcacgagggagttctctgtgcagaagcttctctccgtcatcgacagcatcaagaaaggcgacagcggcaagttcttcgcgtgggatggccaagaaatcccttggtgaacggtcatcgtaactcgtttgagtctactacagcacagccacagcagtcaacaacgcccctggttttaatccaacgttgcttttttttcaacaagccaagcgaacagatgcattctagctaaagggtcctttttttgtgttatgaccgacctaaagttcaagatgttttttccccttct

SEQ ID NO: 3134 - DNA, 897 bp, Zea mays
  Clone ID: 700241860_FLI
atcagtggacagcccaaagggttaccatgcaccacaagattcacaacaacttaacatagcaaattttcaactaaacctgagcattcaccttcaacttccacatcaactaatcaacgagcattgccgacttgttagtcaagcatgtgtggtgccatgtgcggtagcaactttggatgcctgctagttgaagtttgggctcttcgttacttatttccttcattggtgtccgttattgcagggcgtgtattcattgatttcacgccgtggtcgcccaaggacaccaactcctggaagctatcttggccatcggtacgagcgtagggagcgtgggaggttccatagaggctatggtggtgggcgtgatgagtattacggcaatggcggcggcgggtatggctaccgcaggtctccgcctcccatgtactcttcctacagggagagtcgggattattatccctcctacaaggacagccgggactaccctccctacagggacggcagggactactctcctccccacagggaccctcgggactactacgaaagcaggggtggccggggctactcgccgcctccttatggtggtggtaggtcaaggagggaccgatcggtttcaccgtatcggatgccagaaaggggctacggtggaggccgccgggtgggtggcggcggatatgacaggtaatgtagaggttttctctccgccggtggctgctgctgcgatggctgcgtatggctctcgcagctctggtgatatggttagactgctgcctgtagctgtgtacttggtgtactgtcttcccgcgtatgtggatttggtgaaaacttctgtatgagcaccttttatttgtagcctgcaatgattccttcttaagacagactggggactttggctcc

SEQ ID NO: 3135 - DNA, 647 bp, Zea mays
  Clone ID: 700241870_FLI
ggcttaagcaagtagcttcattcaccgagcgtgcaggcacaggcagcagcttgccatggcgtctcccaccttgatgcaatgcctggtcgccgtttccctcctctcctgtgtcgcccacgcacagctctcgcccacgttctatgcgtcctcctgccccaacctgcagagcatcgttcgggcggcgatgacccaggccgtcgcaagtgagcagaggatgggcgcctctctgctcaggctcttcttccacgactgcttcgttcaaggctgcgacggatcgatccttctcgacgccggaggggagaagaccgccgggccgaacctgaactcggtgcgcggctttgaggtcatcgacaccatcaagcggaacgtcgaggccgcgtgccccggcgtcgtgtcgtgcgccgacatcctcgcgcttgccgcgcgcgacggaaccaaccttctcggcgggccgacctggagcgtgccgctcgggcggcgggactcgacgacggccagcgcctcgctcgccaacagcaacctcccgcccccgacggccagcctcggcacgctcatctccctgttcggcaggcagggcctgtcgccgcgcgacatgacggcgctgtcgggcgcgcacaccatcgggcaggcccggtgcaccaccttcc

SEQ ID NO: 3136 - DNA, 420 bp, Zea mays
  Clone ID: 700241877_FLI
ggatggatcccacggtggttccgcttgacccagtcacgccggcgaccttcgacaaccagtactacaagaacgtgctggcgcacaaggtcctgttcatctccgacaacacactgctcgacaacccatggacggccggaatggtccacttcaacgccgcagtcgagaaggcatggcaggtcaagttcgccaaggccatggttaagatgggcaaggtccaggtgctcaccggcgaggagggagagatcagggagaagtgcttcgccgtcaacccacactactagtcaagtttaattatctaattaccccgcgcgtgttatgtttgtttatacgttccatacatcaacattatgtagagtgtttttcgttctcttcaaggctgtgaaatcaaacaagtttatcaagtaaaatggtgttatttgc

SEQ ID NO: 3137 - DNA, 1044 bp, Zea mays
  Clone ID: 700241888_FLI
aaaacgtttttatggtagttcgtgttcatgtccgatctgaaatggcttcagcgacttcgcgtgcttgattgaaacgcacccagtccccgctcctgtttcgatctcccgaatcccgatcccgctaccggaggcggaggcgatggcggcggcgccggcggtaaggttcccggtcttcgggctcgtgcggctgctgggcttggccgccgcggcggcgatcctcttctgggccgtccacttccgaggcggcatggcgctctccaccgaagaggagagcaagctccccctcttcaacgttcacccagtgttaatgctgattggtttggtggccttgaatggcgaagctcttttggcttataaaactgtgccaggaaccaagaaactgaaaaagctagtgcaccttgccgtgcagttccttgccatgtttctgagtctaattggtctgtgggctgtatggaagttccatgatgaaagaaaaatcgatcatttatatacacttcactcgtggttgggccttacttgcttcatcttcttcagcttgcagtgggctgctgggttttggaccttttggtaccccggtggatcaagaagtggccgtgcatttttgcttccctggcatgtcttctttggtatattcatctatgttcttgctatcgccacaagtgtgactggactcctggagaagtcaatctttatgcagagcgccaaaatgattgagcgcttctccacagaagccatgtttatgaactccctgggaatgctgctggtgttgttgagcagccttgttattcttgcactcgttagtcctggacccagcatgatcgacacatacagaggctcttctgagtgagaggaaatgattacagcctagtttcttaagctacatttttaatcagtagctgagcaatttttgtgtacatgtacccagaattatgcttttcttcttttgacatggagttagtcagtgttgaggataatttcatccctgttagagtggcttcattcaagtcgcagtaataaaattgtggatgaggctgacaatgaaac

SEQ ID NO: 3138 - DNA, 1554 bp, Zea mays
  Clone ID: 700241904_FLI
caaagcgcagcagcccgccagagagacaagcagccaaatcaggcctttatttacgatccggccggccggaatctagaccacctctctctctctctcctcgtacgtagtcgttgagtctttgaggtcgaatggcgcccgtctacgctgccgcggaccacggcaccaacggcggctccggcctgaccctgaacccggtggcggcgcgccgggcgctcagcctcgtcggcgcgcccacgccgtcgtcgtccacgccgccggcgtacgggagcatcgtcaccgtgctcagcatcgacggcggtggcgtgcgcgggatcatcccgggcaccatcctcgccttcctcgaggagaagctgcaggagtacgacgagcggccggacgcgcggctcgccgactacttcgacgtgatcgccgggaccagcaccggcgggctggtcaccgccatgctcacgggcaagaacaaggacggccgcccgctcttcgccgccaaggacatcaacggcttctacctcgaccactgccccaggatcttcccgcccggcggcggcggcggcggtcctctgggcctgctcaagaagctgtcggggcccaagtacgacggcaagtacctccacgccctcgtccgggacctcctcggcgagaccagggtcagccaggcgctgcagaacatcgtcatccccaccttcgacatcaagctcttgcagcccaccgtcttctccaaatacgatgccatcaccgatgtttccaaggacgccctgctgtcggacgtgtgcatcagcacgtccgccgcgccgacctacctcccagggcaccagttccagaccacggacaaggacggcaaggcccgtgccttcaacctcatcgacggaggcgtcgcagcgaacaacccgacgctgctggcgatgacggacgtgagcaagcagatcctgctgggcaacccggacttcttcccgatcaagccggcggactacggcaggttcatggtgctgtcgctgggcacaggctccgccaaggccgaggagaagttcgacgccgtgcagtccggcaagtggggcctcctggggtggctcagcagcaaggacaccacgccgatcatcgacagcttcagccaggccagcgccgacctcgtcgacatccacgcctccgtgctcttccaggcgctgcactcggagaggcagtacctccggatccaggacgacgagctcacgcgacagacgtcgtccgtcgacgtgtccaccgcggagaacctcaaccgcctcgtcgacgtcggcagggggctgctgaagaagccggcgtgcaaggtgaacatcgagacgggcaagaacgagcccgacggcaagagaggcaccaacgaggatgaactcgtccgcttcgccaagatgctcgtacgggagcgccgggcaaggatccagaaaaaagaagccagcaacacactctagacagagctagctagcactagcagagacaccaatgcaacacaaagtgtctactacatcatagcctaattaagcctcatgtgttctacaatcagtcatgcatgttatgtgtatccacttc

SEQ ID NO: 3139 - DNA, 1308 bp, Zea mays
  Clone ID: 700242053_FLI
gcggattgaacaggtctacaggcgcgctcccgcacgccccgcgaaggcttttctcgacaagcttcagcagcggcgcagtcgaccagccgaccaccaggcaccagcccaccgccaaacgtaggatggcggcggagactaaaccggctgcggccagcggggttgccggcgagatggaggtggaggcgtaccgccgccttttcccggtggccttccttgagcgccacctcggcgagtccgtccgcatcgatgcccgccgcctcagagaggcccgccccaccaccgtcgccctcggcgccgtctcctccgcgcatggttccgctctcgcccgccttggcgacaccgccatgctcgcgtcggtcaagctcgaggtgatgtcgcccccggcggagcacccagacgaaggatccgtcgctgttgagttccacatgccgcctatctgctccccgctggttaggccaggccgacccactgacgttgcacccgtcatctccaaggcccttgaagacgttttgacgagttctggaatgctaaatttgaaggacctctgtttgatcactgggaaggcttcttggctagcgtacctggatatctattgcttgaatgctgatgggtctctgtttgatgctgcacttatttcagcagtggctgccttcacacatttggagattcctttagtttctgttggtgatgatggtagattatttactgttggaggcaatgatggaaaaaacaaatttgaattagtaaacagagaaaagaggaaactgacacttggtgccattccattgtcccttacatgtgcacttcataaagatgaaatattagcggacccaacttctgaagaagaatcgataatagagacctatgtgactgttgttgtagattcttcagaccgcctagtgtcattacaaaaacttggaggtgcagtgacatgcatggcgactattaaggagtgcattagcttggcgaaagaaaggagacggagcctaagagaaattctgttagactctatcaaagccatggaagtcgaccaaactgaataattctacaaatagattcagttaatctaaccggattacatcttgatggtttctctctgcctcggctgtactggttgtaacagcagttttgttgatttaggcaaagtatgtagctatttgtactctacagtctacacataattcttcacttaagtagcctggcgattttgtttgacgagcatgtctgcaatgcatctttttcgcgacttggcatctttgtaacaccctaattcacattttgcaatattttattttattttttataatc

SEQ ID NO: 3140 - DNA, 1114 bp, Zea mays
  Clone ID: 700242093_FLI
cggtcgcgtgggagcagagctcaagtacctgcgccggccagctatagacaagaggcggcttggagaggcaggcaccatcatccatggcgccctccggtgacaccattgccctcgtccacagcggcatggacagcagcaacaagacgctgctcaagagcgaggccctctacaagtatgtcctcgacacgtcggtgctgccgcacgagccagagtgcatgcgtgagctgcgcctcgtgaccgacaagcacgagtgggggttcatgcagtcgtcgcccgacgaggcgcagctgctgcggatgctcatcaagctcaccggcgcgcgccgcaccctggaggtgggcgtgtacacgggctactcgctgctggccacggcgctggcgctccccgacgacggcaaggtcatcgccttcgacgtgaaccgcgactactacgacatcggccgccccttcatcgagcgcgccggcgtggcgggcaaggtcgacttccgcgagggccccgcgctgggcaacctggacgagctcctcgccgacgaggccaacctcggcgccttcgacttcgccttcgtcgacgccgacaagcccaactacgtcaattaccacgagcagctgctccgcctggtgcgcgtcggcggcaccatcgtgtacgacaacacgctctggtgcgggaccgtggccatgccgccggagacgcccatgtcggacatcgacaggaggttctcggccgccatcagggacctcaacgttcgcctctccgcggacgagcgcgttgaggtctgccagctcgccatcgccgacggcgtcaccatctgccgccgcctcgtctgatggagtcagtgcgtgcccagggcatgcatgcatggctcgcgtgtggatattccgtcgaccagttctccatccgatccgtttgttgttgcatgatgctttcaataaagatctgttttcctttccttcgttctgttttcttttttcacttttggagttgggagcgtcaggtcgacagatgctgtgctcatttatgttacctggtttggaacaactacaccacattaaggccttatttggttattcacaatacacatgattggatgaaattagaaaaaattaagaagaatttt

SEQ ID NO: 3141 - DNA, 1233 bp, Zea mays
  Clone ID: 700242096_FLI
aacccacccatggcttcaatcaacacagtcctcggtgcaatcttcgttgcttccttctacttctgtggctcccttgccttcttccctcctggtcctggtcaccaccacgagggagcccaccaccctccaatcggaagtgctccaatcccaggtctttctacagactactacaggttgacatgcccgcaagctgacgagactgtggcgcccatactgaagaaggctatcgcaaaggaaccacgggtagctgcctcccttctcaggctcctcttccatgactgctttgtccagggctgcgatgcgtcggttcttttggatgacgctgaggaagtcgtgagcgagaaaaacgctatccccaacaaggattccattagggggtttgaggtcatagacgagatcaaagctgcactcgaggaagcatgtccgcagacagtgtcctgtgctgacactgtcgccctggcagccagaggttcgacagtgctgagtggtggaccgtactgggagcttccattaggaaggagggactcaaggacagcaaacatgaagctagcaaacaagaaccttcctccaccaaacgcaacactgcaccgtctcatcaagttcttccgaaggcaagggctggacaaggtggaccttgtggcactatcaggaagccacaccattggaagtgccagatgcgtgagtttcaagcaacggctctacaaccagcacagagataacagaccggacagcacgctagagacgagtttctaccacacgttggcgtcggcgtgcccacgcgccggtggcgacggcgagatacggccactggatctcgtcagcccttcgcgatttgacaacagctattataagctggtactggaggggaaagggcttctcaattcggacgaggttctgtggacaggaagagaccccgaaattgcaggcctagtcaagagttatgccgaagacgaggcgctgttctttgagcactacgtgagttcagtaaccaaaatggggaacataaatcccctcacgggtcacgatggagaaatccgcaagaactgccgtagggtcaatcaggagatctagtcgttgaaaggcttcagtttcagtcaggttcctttgcttatgacgggaaatttcattcacatgatgtcaactgtaaggccactattttcaatgaaatgtatctcatcatcttcttttgctctaaaatagtgcgtttattaagacaacgtttggttccagagt

SEQ ID NO: 3142 - DNA, 389 bp, Zea mays
  Clone ID: 700242128_FLI
ctggaaggagactccagaggcgcacgtgttcaaggcagacgtaccggggctgaagaaggaggaggtcaaggtggaggtcgaggacggcaacgtccttcagatcagcggcgagcgcaacaaggagcaggaggagaagacggaacctgcgcaggaatctcccgcccacgcgtccgctcctcgcggaccccgaaggccgccgtgcctcccgccccgcccctcgccggcgaccatcggccgccggcgacgcccggcatgccgcccgcccgcttcgtccacctcatcctcctcgcgacgctctcgctcctcctcgcgcagaccctggcctcctcgtcccccgcgcccgcctccaacgccacggcgggggagcccggcgacccctgcgcggccgc

SEQ ID NO: 3143 - DNA, 487 bp, Zea mays
  Clone ID: 700242131_FLI
gtcgaccggcctcgcccgccgcgccattgtccaggtctcctacgccatcggcgtgcccgagcccctttcggtgttcgtggacacgtacggcaccggcgcgatccccgacaaggagatcctgaagatcgtgaaggagaacttcgacttcaggcccggcatgatcatcatcaacctcgacctcaagaaaggcggcaacgggcgctacctcaagacggcggcctacgggcactttgggagggacgaccccgacttcacctgggaggtggtgaagcccctcaaggcggagaagccgtcttctgcatgaggcgcctcctctgttttggaagaagcttttggtctggtctggtctggtctggtgtgcctgcgctctatcatgcttttttatggctcctacttgtgattcttgatctgccccttgcttatcatttgtactgtactgtcactgtcctaataagtggtacgtgtgcggggtcgtattgtgtctgct

SEQ ID NO: 3144 - DNA, 420 bp, Zea mays
  Clone ID: 700242195_FLI
ggtgggatactacaaccacgtcaagctgcaggtgctcaaggccaaggaggcgcagaagaaggcggcgcaggccgacgaggaggccgggtcgctgctgcaggagcgcgactcgcacggcgaccgcaagactgacaaccaggcctagcgagtgtgccggatctcatgatccaattcgctcggttctgaacccagtgtactccaaatatgtgatccaacccttacacgtttgatgcaaaatttgttcatttcttgtctttgacttgatctggtggtaccaaggaaataagcacgggaaagatgcaagctttgtgtcgaacatgtgaaaaaaaatatatatgtatgagcaattttttgtcttttttttggggccagttgtagctgttactaccattaaacagtaagcaaaactgtttgcatttt

SEQ ID NO: 3145 - DNA, 695 bp, Zea mays
  Clone ID: 700242203_FLI
aggccggcggtgagacattccccgcgcataggtgcgtgctcgcggctcggtcgccggtcttcgctgcagagttctttggcgcgatggaggagagtaaaagcggcagtgcggtccacattcacgacatggaggctcgggtcttcaaggctttgcttcatttcatatatactgacttgtgttggaaaacgaatgaagttgaagaggaagaagaagacgatgtcatggctcagcacctgcttgttgcagcagacaggtataacttgccaagattgaagctcatatgtgaagataaattatgcaagtacatcgatgtgggaacggtggcaaccatattggcactagccgagcagcaccattgccatggattgaagaaggcatgctttcgtttccttagctccccggagaatttgaaggtagccgtggcaagtgaaagcttcgatcatttgagcaagaattgcccctctgttatgaaggagttggttgccatgctcggcaccttacttgagtaaggctgggttttgtgtgttcttgtgttggtgtgtgctaatgtgatgtgatgaatcaaatgctcctgatttgtctgggtttctgctacctggtttctgtatgtgttgtttgataccaatgaatccaggtattcaagtcaagaaaactctgttcagtttgcactttcagtatttccggaactgactacc

SEQ ID NO: 3146 - DNA, 383 bp, Zea mays
  Clone ID: 700242227_FLI
gtgcaaggtttttttccatcgatggtcgctacacacgtctatctatggtacgaaaccaaccaaagaaaaagacagtagcatgcatgaaacatcggctgatacgccacgcatggttaacacaacgggtttgctgtcaaactccatctgaaacggtcgaccatcatgcaagtaaccagccaaaactaggttttctaggtaaacgcagcctactcttctagacatgaacagggtagctcgctaccctgttcatgtctagaagatcaacggccagcaaactgcccatctaagtctaaggcgctgctgaaccagttgaccccttgagtttcctcggacggctgcgaggctcaataagcgcttcgtatagaagccttttgcttcccatc

SEQ ID NO: 3147 - DNA, 1866 bp, Zea mays
  Clone ID: 700242232_FLI
gcgacgacctctacctctacctcgccgccaccgtcaccgtggcccgccgccatataagtaaaccctcgcctcgtcctcctcccaggctcgccaccctccgcctccgacacatggcccacccgcacctcgtgctcccctccccgaagtccctcctccccgccgccgcaactccatcgcgccgcgccgtcgccatccgcgcggcgctctccaccgctttgtctccggccaaggcggcagctggagcagaggcggtgcgatcgatccgcgcgcggcagatcgtggacagccgcgggaaccccaccgtcgaggtcgacctcgtcgccggggacggacgcctccaccgctccgcggtgcccagcggggcgtccacggggatctacgaggcgctggagctccgcgacggtgacaaggccgtatacggcgggaagggcgtactccaagctgtgcgcaacatcaacgaggttatcgcgcctaagctcataggcgtcgatgtgaggaaccaaagcgatgttgatgcagtcatgctagacattgatggaactcagaataaatcgaagttgggtgccaatgctattctcggagtctccttgagtgtatgtagggcaggcgctggtgcaaagggagttcctctgtataaacatattcaggagctagcaggaattaaggagcttgtcatgcctgttcctgcttttaatgtaataaatggaggtagccatgctggcaacaatctggccatgcaggagttcatgattttacctgttggagcaactacatttgctgaagctcttcgtatgggcagcgaagtttaccatgtcctgaagagcatcattaagtcaaaatatggtcaagatgcatgcaatgtcggagatgaaggaggttttgctcctaatgttcaagacaacagagagggtcttattttgcttatggatgccattgagaaggcaggctacactggaaaaatcaaaattggtatggatgttgcggcatctgagttccttacaaaggatgggaactatgatctaaactttaagaatcagcctaatgatggagcccatattctctcagcccagcatctgggtgatctgtacagagattttgtcaaggatttccctattgtatcaattgaggacccttttgatcaggatgactggagttcatgggcatcattgcagtcctcagttgatatccaaattgtgggtgatgatttactcgtcacaaacccaaaacgtatagcagatgctattgataagaaggcttgcaatgctctgttgctaaaggtcaaccagattggtactgtcactgaatcaattcaagctgctctcgattcaaaagctgctggttggggtgtgatggtcagccacagaagtggtgaaaccgaagacaacttcatcgcagatttggctgttggcttagcaagtgggcagattaaaaccggggctccatgccgcagcgagaggctggccaaatacaatcagcttctgcggattgaagaggagcttggcaacgtgcgctatgcaggggaggcattcaggtctccatgagaaatacagacttcagagtttcagtaaagcctaaagtatgtgtactgcccagtagaagaaataaaagaactagatcatgaccagtcatgctttcatccttgttaccacgagttatcccaattttttgcggttttttttttcttgatacatcttattatctgcgagcaattgaagacatagtcatcatccggaaagatgcttcctgtgcacccgcgcgagtctgagaaagtgacagctttatatggacatgaccattaacatttaacaatcatgcttgtaatggtgcgttatggtcatacaataaattaagggacatttacattcc

SEQ ID NO: 3148 - DNA, 657 bp, Zea mays
  Clone ID: 700242361_FLI
ggcgccaacaacctacccagcccattcgacccgctcgacaagctccaggagaagttcaggaacttcaacctggacgacaccgacctcgtcgccctccaaggagcacacacttttggtaaagtacagtgtcaattcacacaagagaactgcacagctgggcagccagaggaaacactagaaaacctagaccaggtcacccccaacgtgtttgacaacaagtattacggtaacctcctgcatggcgccgcacagctaccgtccgaccaggtcatgctgtcggcggaccctgtcgcggagatgacgaccgctcccattgttcatcggtttgcaggcaaccaagaagacttctttagaaactttgccgcatctatggttaagatgggcaacataagcccgctaactaggaacgatggagagatacgcaaattttgccgaaggattaatagcgaaggctattgaaaacttctttttcaatttgatcgatttggattccttaatttttctgtgaccaattgtgaagtatgtgtaaaaattcattcgatctttcagttttttttcttctcattctttgtttttcttatgaggttttcctcattgtttgtaaaatgttccgcttttatctttctagaagtaaagcaaatgtgaaaatgttttacc

SEQ ID NO: 3149 - DNA, 1650 bp, Zea mays
  Clone ID: 700242384_FLI
ggccggacggtggtggcatcgccaattcaactccgcatctgaatcggcactcggcagcgcgccagctccataggaggaggagatggcgctcacaagaatcggtcttgctggccttgcggtcatggggcagaaccttgccctcaacattgcagagaaagggttccccatctctgtgtacaacaggacaacctccaaggtggacgagaccgtgcagcgtgccaaggcagaaggaaaccttcccgtctacggcttccatgaccccgcgtcctttgtgaactccattcagaagccacgggtggtgatcatgctcgtcaaggccggcgcgccagttgaccagaccatcgcgacgctcgcagctcacttggagcagggcgactgcatcatcgatggggggaacgagtggtacgagaacacggagaggagggagaaggccatggaggagcgcggcctcttgtatcttggcatgggtgtctctggaggagaggagggtgcccgcaacggcccgtccttgatgcccggaggctcgttcgacgcttacaagtacgtcgaagacattgttctcaaggtggctgctcaggtccctgacagtggcccgtgtgtcacgtacattggcaaaggtggatcgggcaactttgtcaagatggttcacaacggaatcgagtatggcgatatgcagctgatttccgaggcttacgacgttctcaagtcggtcggtaagctcaccaacagtgagctgcaccaggtgttctccgagtggaacaagggcgagctcctgagcttcttgatcgagatcacggccgacatctttggcatcaaggacgagcatggcgatggctacctagtggacaaggtccttgacaagaccgggatgaaagggacagggaagtggacggtgcagcaggccgccgagctgtcggtggccgctcctacgatcgaggcgtccttggactcgaggttcctgagcgggctgaaggacgagcgggtggaggcctccaagatcttccagggtgactactactccaccggctcgccggtggacaaggcgcagctggtggaggacgtgaggcaggccctgtacgcgtccaagatctgcagctacgcgcagggcatgaacatcatcaaggccaagagcgcggagaaaggctgggggctcaacctcggcgagctggccaggatctggaagggcgggtgcatcatccgcgccatcttcctggaccgcatcaagaaggcctacgacaggaacccgggcctcgccagcctgctcgtagaccccgagttcgcgcaggagatcatggacaggcaggcggcgtggcgcagggtggtgtgcctcgccatcaacaacggcgtcagcaccccgggaatgtccgctagcctggcctacttcgactcctaccgcagggacaggctgcctgccaacctggtgcaggcccagagggactacttcggggctcacacctacgagagggtcgacatgcctggctctttccacaccgagtggttcaagattgcgcgcaacatctccaacaactgatgagctgctcaacggatggcatgcccggtgttgactactccagtcggtaatgagatttcctgcaggaacttgtctattgatctttgtaagttaattatttatatgaataaaataagagc

SEQ ID NO: 3150 - DNA, 1016 bp, Zea mays
  Clone ID: 700242392_FLI
caaacttgcactgtacacacactcactagtagcagcatcgatcgccggccggccgtttccgagcaacatggggaaacgcttcctccaccagctgctagccgtcgccctggcactcttcgtctcgccggcgagatcggacgactggcttccggccaccgccacgttctacggcggcgctgacggctccgacacgatgggtggcgcgtgcgggtatggcgacctgtacgagcagggttacggcgtgaacaatgcggcgctgagcacggcgctcttcaacgacggcgcttcgtgcgggcagtgctacgtcatcaggtgcgacagcagcaagaccggatggtgcaagcccggcagcagcaacttcgtcgtcgtctccgccaccaacttctgcccgcccaactgggagctccccaacggcgggtggtgcggcccgcctcgcccccacttcgacatgtcccagcccgcctgggagaacatcggcatctacagcgctggcatcatccccgtactctaccagcgcgtcaagtgctggcgtagcggcggcgtgcgcttcaccatcgccggcttcgaccacttctacatggtgctcgtcaccaacgtcgccggcagcggctccatccagagtatggccgtgaagggcgccaacacggactggatccccatgtacaggaactggggcgccaactggcactgcctcgccggtgggctcgttggccagggcctcagcttcgcgctcgtctccaccggtgggcagaacatcgtcttccaggacgttgtgccggcgtggtggcagttcggccaaactttcaccacctaccagaacttcgactactaaacttcatgcatgcctttcttccttccacgacaatatatatatctaaagcccaatagatccttcttcattcattcttcttcagaaagagatattacacccgccgtgttgtcttcatttcatttcagttgtagtgtggaaattattttgttattgttatcatattcaaccgcaaactgatgattgt

SEQ ID NO: 3151 - DNA, 727 bp, Zea mays
  Clone ID: 700242408_FLI
taaaaatggaagcgaacatggatgtactagaagatgaccatggcaaggaaatgcttgaacaagtggtgagcaatcctgctctgcaacgtcacactgaggtcatggaggaaggatcactgtcaaaacaggaacttggtgatggcatagaggggactattccagcaactataggatctgggggtctggatgcacctccagaaattccccaacctgaggtggtggtggcaacaacagcaatcacacagtttaacaaggacatggaggatgtgttacctccagcaattgaggatggtgcactacaagcaaccctcgaacatgctgttggcatactggaagttacacctggtgatggcttggggaatgttgcaccttcttcaggtgatgacatggagattatgccctctgctatgacagaacctcgactaggcaaagaaactgctcctgttgctagccctcctgacagtcaagagaagccatccatcatgcatgattctgagacaggtatggaggttgataaagttatcgatgatattcatggggatggtagggtgagctctattcttggcaccaaacttgatgttgctgcaagtgatggggattctgaagctttgttggtggaaagtagggtaaatttaagtcggatacctaattccccagaaagtacacattgaacaccttttattccattttaatttctttttgtctgagggtcttctgccctcagcct

SEQ ID NO: 3152 - DNA, 1741 bp, Zea mays
  Clone ID: 700242416_FLI
ggtcgagcctgggtctggtttccagacctacccaaactgaaaaaattgttcttgcttcccgatttccagtcctctgtcgtttgttgtcccatactcccatctgttctccgcgaggcgcaacgaaggcacaaaacccttacctccatcaaaccctagcgctcgtgtccccgtttagctcccgtcgccgctaccatgggctcagatgcggatatggaggactacgggttcgagtactcagacgaggagccggaggagcaggatgtcgatatcgagaaccagtattacaactctaaaggtttggttgagacagacccagagggtgcacttgctggttttgatcaagtagtcagtatggagcctgaaaaagctgaatggggatttaaagctcttaaacaaactgtcaagctttactataagctgggaaaatacaaagaaatgatggatgcctatagagagatgttaacatacataaaatctgctgtcacccggaactacagtgagaaatgtataaacaacataatggattttgtttctggatcagctagtcagaactttagtcttctgcaagagttctaccagacaacactgaaagcgcttgaagaagcgaaaaatgagagattatggttcaagacaaacttgaagctttgcaaaatttggtttgatatgggcgaatatggtcgcatgagcaagatattgaaggagctgcataaatcttgccaaagggaagatggttctgatgatcaaaagaaaggcacacagcttttggaagtctatgctattgaaatccaaatgtacactgaaacaaagaataataaaaagcttaaggaattgtatcaaagggctctttccatcaaatcggcgataccacatccaagaatcatgggtataattcgtgagtgtggtgggaagatgcatatggctgagaggcagtgggatgaggctgccactgatttctttgaagctttcaagaactatgatgaagcaggcaatccgcggagaattcaatgcctaaaatatcttgtccttgccaatatgttgatggagtctgaagtgaatccttttgatggacaagaggccaagccgtacaagaacgatagtgaaatccttgcaatgacaaacctgattgcagcgtaccagaagaacgacatcatggagtttgaaaagatcctgaagagtaatagaagaacaataatggatgatccttttatccgtaactatattgaggatctgttgaagaacatcagaacccaagtgctgctcaagcttattaaaccgtatacacgaatcaggattccattcatttcgcaggaactcaatttcccggagaaggatgtggagcagctgttggtatcgctcatcctggacaaccgaatccaaggccacatagaccaggtcaacaagttgctagagcgtggagaaaggtccaaggggatgaggaagtacaatgccatcgacaagtggaatactcagctcaagtccatttaccaaacattgtccaacagagtttgatgagacgaatcgtggctgctgtatgctttgcacacctagaattgttgatagcctgttttggggatttgagggcaactgcaaaaaagagctgtatggcaacgcttgcagtagaatcttggatctgggtaaaatgagatgtccatgtaagcatttgatattagttttttcagttatattgactaggaggatgtccatgtaagcatttgatattagttttttcgttaatctcgag

SEQ ID NO: 3153 - DNA, 791 bp, Zea mays
  Clone ID: 700242418_FLI
gtagtcatcttcgtcgctcgagtactcgagctgaaaggggaagaccaagctccctttttgaagaaagtcctcgacaaatgttccatagtctcatgggggagagggacagacatagacacataaccatggaaggaattacagaggttttggctgcattggagaggattgaacagcaagcagagctgacctatgatcaattgctaatgctggaggctaatctattttttggcgcctttgcctcctatgatcggcatagagacatgcggatggatattgatgatatgtcctatgaggaattattggccctggaggagagaataggctctgtgagcacagctctttcagaggagcagttcacaaaatgcctcaaaagaagcatatatagtcaggtcgctctagaagtgaacaaatcaaccgttgatgacatgaaatgcagcatctgtcaggaagagtacgcggagggcgaagaggttgggaggctgccatgcgagcaccggtaccatgtgtgctgcataggccagtggcttgggcagaagaactggtgtccagtatgcaaagcgtctgccgtgccttccaagggctgaagcattggggatgctggaaaccccgttccggattacaaaccatccttgcttttgtctacgtacattgttcttttccctatatgcattagatatagatcatgtctagatgtatgacgctagaacagcttgcgatttgggaggaagctaagagagtaatagttagctggttaataatagttcatagctaatatttgctagataactatt

SEQ ID NO: 3154 - DNA, 1365 bp, Zea mays
  Clone ID: 700242430_FLI
gtgtcgcggaggaggcggtggtgccggcgcccgcgagggaggtcgtggtggggtacgcgctcacgagtaagaaggccaagagcttcctccaacccaagctccgggggctcgccaggaaaaagggaatcttgtttgtcgctattgatcagaaacgcccattgtctgatcaaggtccatttgacattgttcttcataagttgactggaagggggtggcagcaattgctggaggaatatagggaggcacacccagaagttactgttcttgatccacctggcgcaatagcaaacttgcttgatcgccagtctatgcttcaagaagtatctgaattggacctcacagattgtcatggtaaagtacatgtgcctaagcagctattcgttaatactgatccctcatcaataccagctgcagttaggagggcaggtctctcgcgtcccatgctccctaatcatatcgatgttgaaccctcgccggacgctcgctctcgccggggacaactcaatcccgaggccaggatggcccgctacgatcgcgcgatcaccgtgttctcacccgacggccacctcttccaggtcgagtacgccctcgaggccgtccgcaagggcaacgccgctgtcggcgtccgcggcgtcgacaccgtcgtcctcggcgtcgagaagaagtccacccccaagctccaggactccaggtccgtgcgcaagatcgtgagcctggacacccacatcgcgctggcgtgcgcggggctcaaggccgacgcgcgcgtgctcatcaaccgcgctcgcgtggagtgccagagccaccgcctcacagtcgaggaccccgtcaccgtcgagtacatcacgcgctacatcgccggcctgcagcagaagtacacgcagagcggaggggtgcgccccttcggcctctccacgctcatcgtcggcttcgatccctacacccagaagcccgcgctgtaccagactgacccctcagggaccttctccgcttggaaggccaacgcaaccggccgcaactccaactccatgcgcgagtttctcgagaagaattacaaggagacgtccggtaaggagaccatcaagctcgccatcagagcactccttgaggttgttgagagtggtggcaagaacatagagattgcagtgatgacacacgaggacggccttcatgaactcgaagaggctgagattgatgagtatgttgccgaaattgaagcagagaaggccgctgccgaggctgcaaagaagggtgcaccaaaggggaactgactccgcacaagcttagattccgcctcttgttccagagcatgtcttatgattcacctcttagatggatgcccggatgtttggatacaggaatatttat

SEQ ID NO: 3155 - DNA, 989 bp, Zea mays
  Clone ID: 700242465_FLI
gctggcggcaggccgacggctacggagacggaagtggcgaccggttccggcgaggcgcaggcgacagataggggacagggcgaccatttctagcgaggcaggagcggggaagatccggaagctgcgatgtcgaagcggctgctgtcgcggctgctcggcatgttccaatcgcggacgcaggtgggcgtcgacaaggccggcaaccgctacttcacccgcgttgaggaggtcgacggcacaatgaaggagaggcgctgggtggagttcaagggcgcagaccaggactcgaccaccgttccagtcgagtggatttgctggctgaatggccaaaggaagaaagctccaacaccagaggaattggctgagctggaggcaagacgtgaacgtgtcaagcaaaacattcagcttctcaaaaagaaagaagaagaggaaagaaaaactggtatccaaccagtcaagaaaattgggaaagctgaatctccaaatctccaaagtttcgtgaagcagcagttctcgggtactcctccagatcagcagaaaggacctgaggataggcctaaggacacaactcatacagaagatgctacgacagacaatgagaggtatactgaaccaacgggaactggtgccactttcaagccagggacttggcagccaccaacatgaatgccaacatgaactttagaagatgaaggacggtgtaccggagcattttcctttcacctatctgtgtaacattttaacatttgctctgaaagaatcactagcctatgttccttctttcagatggttacccatctgatggagttatagccttaagttccttcttttagatgcttacccatctgatggagttataggtgatcgggggctcccacggtatgctgttttttttgtggctaaattgtcctctgtaatctttactgtgatagcaactgtaataaactggaccagtgttttgcatcagggctctcttagagacactgttc

SEQ ID NO: 3156 - DNA, 884 bp, Zea mays; identical to SEQ ID NO: 598
  Clone ID: 700242490_FLI

SEQ ID NO: 3157 - DNA, 1112 bp, Zea mays
  Clone ID: 700242506_FLI
gaccgaacaaacaacatgtatgatttcacaagccgcccgctgaaaccaaagccttttgccctgtcgtcaggggcgaggtttcatcaacctcagtacctcaccctcctctcccggagagcctctcgcctccgctccgctcctctgccctgcccttccccgccacaccaaccaaggcgccaaaaataaacgccgcctgtcacattgcttgccgcgcctcgtcttcgcggaggcctcgtcgcgcgacgatatggagctcgccgaggcgccggcgcccgtgcccgacgaggacgggctggacgaacgcggcgtggcgctgcacctcccgaggctgctggccggcgtcgtctccggcgccctcactggcctcttcgctctcgctggagctctgaccggggcagtcaccggcgcggtggcgggcagggcttccgacagcggcggcgtcctgcggggagctggactgggggcggtcgccggagctgtcctctccattgaggtccttgaggcttctcgcgcttactggtgctcgtcggaccggctaggctcgcacggcggagcatcgtccatggctgatttcattgagcagcttcttcgtgcccggtttgtgcaagagcaatttactgcttcaggatatgcatcatatcgatggcagctcagcatatcatattttggtcaggatgacctatacgacatctttggggacatttcatctgaagggctctcgcaagagtcactgaagaaactaccacatcatgtggtcagtgaccagacgcgggacttactcggcgaaatcctgtgttgtcctatctgtctacaggtacggtctgagcaagcgcgatcctaccactacagagtaactgtcaaagaaaccttctgccacaattaatacagtatgcactttgttttggttaaaaagtgttacgtacgttcaaataagagagagaaaactatatgctaaaaagtaagtaatcagcaattttctaggctacaactggtttcttcaaaaatggtttccgagcgagatagtagatgagaccatgaatgcaagtccaggcgcacgcaatggttggacaacgagacaatgaatgcatggttggagtgcaatcagagatttc

SEQ ID NO: 3158 - DNA, 1206 bp, Zea mays
  Clone ID: 700242510_FLI
cgcaaaggcttcattgcttcacctgcaatggagactgaaaggtccgcgcataataaagtgcatattcagtctggtaatgcttcaaggaaaactgagggatttatacaacagagcatcaatgccaatcgacaaaagaatgggacatcagtacaacattctgaaagcttcaccacttctgctcgaagaactgctggtggctttccaccagcacctacaacggaggataaattcaaagctgcaaggctttcatccagtaatgaagctgcacccagaaaagagggggttggacagcgaatcagtaacattagcatatcgcttcaaaagagaactgagaacacaaacaaagatgtcgcgaagaaagaagttggcacctcctctccattgcctccaaatcctgctaatgctatgcataagggaaatggcaaggttggtaggccaatggacaacacacaaggatccatgcagagatttggcagcccatcaacatcaagtgcaacatgggggatggatagaggagcacctaggtcatccatcccaagcccgagcattacaatacggagaccgaatggcatggtacgaccagctgaaaatctttctgtctctgctaagaaacctgatgcaggaggcctttcacctgctatgggtaaggaaaaggaacaaggtggaaggttgctgcaagctaatatttcaactgatcagaaactggcagctgaaagtcgttctgcctctgctaagaaacctgatgcaggaggcctttcacctgctatgggtaaggaaaaggaacaaggtggaagattgctgcaagctaatatttcaactgatcagaaactggcagctgaaagtcgttctgtctctgctaagaaacctgatgcaggaggcctttcacctgctatgggtaaggaaaaggaacagggtggaaggttgctgcaaggtaatatttcaactgatcagaaactgggagctgaaaaccgttctgtctctgctaagaaacctgatgcaggaggcctttcacctgctatgggcaaggaaaaggaacaaggtggaaggttgctgcaggctaatatttcaactgatcagaaactggttatgtcaaagcctccagctgtggagaaagctgcagatgggagagctgaaaggatggagaaggtcagagatggggcaccagatattgccaagaaagaggacaaaaagagtgatcggcatgag

SEQ ID NO: 3159 - DNA, 1650 bp, Zea mays
  Clone ID: 700242531_FLI
gtccctctaccatcgccagatcgcctgccttccctgctctccccgtcggctcaccgcgcgccccagatctccccgtccaaaggggacccaagcatcgcatcggatccgtcctgcgctttgccgccggcaactgcagaagcgaccagccatggcggcagccttcgatgcttacaccgacaagaacgccgtcttccgccgtctcaaggccaagcccgagaacaagatgtgcttcgactgcaacgccaagaaccccacctgggcctccgtcacctacggcatcttcctctgcctcgactgctccgccgcccaccgcagcctcggggtccacatcaccttcgtcaggtcaacgaacctcgactcatggactccagaccagctgaagatgatggcattcggaggcaacaaccgggcacatgctttcttcaagcagcatggatggaccgatggcgggaaggtcgaggcaaaatacacatcaagagccgctgaactttacaggcagatgcttaccaaggaggtcgctaagagcgccacgaccgataatgccctgccatcgtcacctgtcgcatctgaggcttccaagccgccatccgatgacttccctgaattcaaactcccagatgtgccagcaccaccggcagaggatctgaatgggaagcatgagcccaagtcccccaaagctgctcctcgttcaccaaaggccgctactcatcccacctttgccacttctgtgaagaagcccattggcgcaaagaaggttggaggcaagactggagggcttggtgttcgaaagcttactacaaagccaaatgaaagcctgtatgagcagaaaccagaagagccaaaacctgctgtacctgccttggctgcttcaactaaaaaaggtggtcaggccttgcattcacgttttgaatacgtggagaacgagccatcagctgattcgagaactgggggatctgtatctcgtgtgagtggccatgtagcaccaccaaaatcatcagacttctttcaagagtatgggatgggtaatgggttccagaagaaatctagcaatgcctcaaaaactcaggttgaggaaactgatgaagcaaggaagaaattctctaatgccaaggcgatctcgtcatctcagttttttggtactcaaaacagagaagagaaagaagctcaactatcccttcagaaatttgcgggctcttcatccatttcaagcgcggatctttttggccgcaatgatgcggacaactctaacctggacctaagcgctgctgatctcatcaacagaatatctttccaggcttcacaggatctgtcttcgctcaaggacatagcaggggagactggaaagaagctgacatctctggcctccaatttcatcagcgacctggacaggatcctttgagcagggcaggcgaggccagcagcagttttgctatcctcctacctgcaccacagagtatatcccttgtggtgcatcaccgacagttcttgcacagttacagctctgtagagggatagtagatgattcttatcatgcgttttgtattctgacctttgcttgttgtgagacccagtccacatgaagatgtttttttttttgttattgatactttcaagacgttgaagcatacaattatatgcatcaaggttgtc

SEQ ID NO: 3160 - DNA, 463 bp, Zea mays
  Clone ID: 700242539_FLI
gacatgggtcgttatagaaaatataactttgagtctattcgtgatcttctgaggtatatcagaaataaatcgggtcattacagagaactttcagatgatctcaagggcatacttgggtcactaccagaggggtttgatcgctattttgctagccgatttccaaagttgctaattgaggtgtacaaggtcttgtgggtgcactgcaaggacgaggaagctttcagtaaatatttcaaaggaagttagttatagctggagaggattgtcctttcctactgtacatactaaccctgatgtagaacaagtacatgtgtaccatatgactcgtattataggataaaaaagagctcaatctgtacattatgcaccggtatggtagggccgtgtcatttgcacagcctaatgctctgatggcttggacattgtgcatcgtggaatcttcgtaatcgttgtgtgtttgatg

SEQ ID NO: 3161 - DNA, 748 bp, Zea mays
  Clone ID: 700242540_FLI
gcaaacacaaagcagcatcacactgactccactgctctgcctctataataagcacagaagcgccccaagaagcagcagcgcaggagcgagcgatcgctatggctcagggaagaggcagtgcgacgcgggggcttgccctcggcgccctactcgccgccgctttcctcctcctcctcggcgtcgccgacgcggccacccacagggtcgactggtccttcaacgcggacagctggtccaagggcaagagcttccgtgccggcgacgtcctcgagttcaactacgacccctccgtgcacaacgtggtggccgtggacgccggcggctacaacggctgccggccctccggcacgtcgtacggctccgggagcgaccgcatcacgctcggccccggcaccagctacttcatctgcagcctcaacgggcactgcgggatggggatgaagatggtcgtcaacgccagctgagcacgacgcttatatgttagtactgcaaaaatatatgggctagtggtggtccgatagatcgtgcaagaactcaatcgtgtggcatactcgtaccgtgtgttcgatggacacggttcatgtgttgtgtatgcatgcgactgctggtaggtcaggcatgatgtacgtgtggctgatggcgtgttagtaaagcgtcctgcagctttgttgttactttgttcgatcgaagcagcggcttcttttgtttgttcatcaataacatctttcattaaattttttttattgtt

SEQ ID NO: 3162 - DNA, 890 bp, Zea mays
  Clone ID: 700242553_FLI
ctccccggcgctccatcgctgggcacgcaggcgacggcgacggcgctcaggctcgtgctctcaggaacggcgtcagctgcttcctttctcgcctcttgccagtcgcctcgcgccctcgcctttggtcctccgcacggctgacatacgtagaccgatggcaacactgaaagatgcagcggcaaggaagtctatactggcaacaatccgtcttgttgtcccagccggtgcagcccgtcctgcacctccagttggtccagcacttggtttctaccggctcaatttgatggccttttgcaaggacttcaatgccaggacccaaaaatacaaggcagaaactccaatgcaagtcaccctaactgcctacaaggatagcaccttcgagttcgtggtcaagtcgccctcggtatcatggttcctcaagaaggcagcaggaatcgaaaccgccagcactcgcccaagccacgtgaatgtatcgtccctcaccctccgccacgtatacgagattgcaaagttgaagcaggctgaccccttctgcaagcacatctctcttgaggcgctgtgcaagtccatcattggcacagccaactctatgggtattgcgattgttaaggatctatgagcagcaatgccagccttttagtcatgaagaaatctgtgacattttgtatgttcctagtttgtagttggtgctggagaggatacaactcatctgtctcacagagcttcctgccactgccatgtcaggagtatgaaactctatgcaattcctgggagagccttcagcgcagcctttttctcttcctttgttcattttgtgacttaactggtactatgtggttttacgttggtgctttaaataataaattgtagttttggtttcttccacttcg

SEQ ID NO: 3163 - DNA, 884 bp, Zea mays
  Clone ID: 700242574_FLI
cttcacgatctgtgactgtgatctatactataaggtgaacaagatctctttgtctactgtagttgcaacaccagcagcagaagagcagccccagagctccagcaataatggccgagaagggcgtgaaggtgttggggatgtgggcgagccctatggtgatcagggtggagtgggcgctgaggctgaagggcgtcgagtacgagtacgtcgacgaggacctcgccaacaagagcgccgacctgctccgccacaacccggtgaccaagaaggtgcccgtgctcgtccacgacggcaagccggtcgcggagtccaccatcatcgtggagtacatcgacgaggtctggaagggcggctaccccatcatgccgggcgacccctacgagcgcgcccaggcgaggttctgggccaggttcgcggaagacaagtgcaacgctgctctgtacccgatcttcaccgcgaccggcgaggcgcagcgcaaggcggtgcacgaggcccagcagtgcctcaagaccctggagacggccttggaggggaagaagttcttcggcggcgacgccgtgggctacctcgacatcgtcgtcgggtggttcgcgcactggctccccgtcatcgaggaggtgaccggcgccagcgtcgtcacccacgaggagctgccgctgatgaaggcctggttcggtcggttcctcgcccttgacgtggtgaaggcggccctgcccgacagggacaggctcctcgccgccaacaaggcccgccgtgagcagctcctctccgcgtagatggctagtaattctggagcagctagtttcaccgccgacgctcatatattgctgaataaggactggttgcacttttgcacgttgtgcagtgcagccgaggtttggatg

SEQ ID NO: 3164 - DNA, 873 bp, Zea mays
  Clone ID: 700242603_FLI
cactccgccaacgtgatccaccgcgacctcaagcccagcaacctgctggtgaacgccaactgcgacctcaagatctgcgacttcgggctggcgcgcccgtcctccgagagcgacatgatgacggagtacgtggtcacgcgctggtaccgcgcgcccgagctgctgctcaactccaccgactactcggcggccatcgacgtctggtccgtcggctgcatcttcatggagctcatcaaccgccagccgctcttccccggacgcgaccacatgcaccagatgcgcctcataaccgaggtgatcgggacgcccacggacgatgagctcgggttcatccggaacgaggacgcgcggaagtacatgcgccacctcccgcagttcccgcgccggccgttcgtcagcctgttcccgcggatgcagcccgtcgcgctggacctcatcgagcggatgctcaccttcaacccgctgcagaggatcacagtggaagaggcgctggagcacccgtacctggaacggctacacgacgtcgccgacgagcccatctgcacggacccgttctcgttcgacttcgagcagcaggctctgacggaagaccaaatgaagcagctgatattcaacgaggccatcgaactcaaccccaacttccgatactagctagctagctagttcggacacacatcttaattatacgtatgtatgattcctcgtacgtggtttgtaaatagaagatcgagccggccgccggtgttattagactgaacgttgcatttgtttgttcgttgacgttcgcgctcgcaggtttcaggctgtgtagtctgctgcaggtttcaggtgttcgtgtaatgagctgtaccaagaataaaatgctttggactc

SEQ ID NO: 3165 - DNA, 951 bp, Zea mays
  Clone ID: 700242618_FLI
agcggttggagcttcgacgtgcggtttccatttcctgccctgctctgatggccgtcgccgaagtggcgatcgagattctcccgcagcagcagcagcagcagccgccgccgccgccgcgggaaccggcggtagtgcctccgaacctctccgtgccgagagtgctccagtatctgtacctcttgagcgcgtgggtcgcctgcgcgggcgtggctgccgggaccgtggcgcgccgggccttgggcgactcttccccgttggtctacgggttcctcaaagtctcgatcggagccctcgttttccccgcgctgctcatcctcgtcttcgccctgcgggtcttgcgcgccatgcttgccgtggggttcagacggtcactccgcactcacgccagggagattcagatccaagccacgaagatatttagagcgttaacgtggaaggtgctgcaggaccctattgtgcttgcgtggctcgcatctttgcttttcatcctgcttcttgcagcaagtgttctggtgtttgtgggacttctaccaatggaggagtctcgcagagaaaggattggttatgcgctctctgatgtgggggtattgggtgcaatggcaatgtattgccttatcattatacccagttttgcgctgaagatctggaggagcaagtagggtggcgatgctgcacaaggcacaacactggcgatatctgaggcaaggacagttggagaaggtgcaaaagatggactcctagttaccgtgggtgaagccagctaattaatgttttagagaaataattctctcttggagactactactactgttctacctcagcatcaccggtgctggtgcgtgtgtaacgtggtcactgtgggtatcatcactaccctaccctaagccctatcagaacataagcaccccttggagatttgtgccgtctaaatgaatatagttggttcagcgt

SEQ ID NO: 3166 - DNA, 1388 bp, Zea mays
  Clone ID: 700242627_FLI
acaagcaaggaatcccccgatggctcatcgcgttctcctcctcctctctctcgcgtcggccgccgcggttgccgccgccgtcgacgcggaggacccgctgatccggcaggtggttcccggtggagatgacaacgatctggagctgaacgcggagtcccacttcctgagcttcgtgcagcggttcggcaagtcctacaaggacgccgacgagcacgcgtaccggctgtccgttttcaaggccaacctgcgccgcgcgcgccggcaccagctgctggacccgtcggcggagcacggcgtcactaagttctccgacctcacgccggcagagttccgccggacctacctcggcctccgcaagtcccggcgcgctctcctcagagaactcggggagtcggcgcacgaggcgcccgtgctccccaccgatggtctccccgacgatttcgactggagggaccacggcgccgtcggccccgtcaagaaccagggttcgtgcgggtcgtgctggtcgttcagcgcgtctggagcgctggagggtgcgcactacctcgcaactggcaagctggaggtgctttcggagcagcagttcgtcgactgtgaccacgagtgtgattcatcggagcctgattcatgtgattcgggttgcaatggtgggctaatgacgacggcattcagttatctccagaaggccggtggccttgagagtgagaaggattacccttacactgggagtgatggcaaatgcaagtttgacaagtccaagattgttgcttcagttcagaacttcagtgttgtgtctgtggacgaggctcaaatttctgctaacctcatcaaacatgggccattggcaatcggcatcaatgctgcctacatgcagacatacatcggaggcgtgtcatgcccatacatctgtggcaggcaccttgaccatggtgttctccttgttggatatggtgcttctggtttcgcccccattcgcctgaaggacaagccttactggatcatcaagaactcgtggggcgagaactggggggagaacggatactacaagatatgcaggggttccaacgttcgcaacaagtgcggcgtcgattccatggtctctaccgtgtccgcagtccacgcctcgaaggagtagactctggtcagcggtgataatcgtgattccatatattgtagaactataatccctgctagtaatccatttgtgctgtttatgtatcgaaggcagcaaagatgtgtgaagcggcaatgggatgcttgctgtaaggtaatatgtttggcttgctaggcatgctacacgctatttggatgtagcaacgttatcaccagctgtatacgctttttaatcgacaacatttgaataatatgtacataacattatgttgtgc

SEQ ID NO: 3167 - DNA, 1173 bp, Zea mays
  Clone ID: 700242632_FLI
catcccctttgcaagtatagtctctctgctaagcgaagcgaagcttcaagctagtctcggcggctctagaagacgatgggcaaggacgacgtgatcgagagcggcgctggcggcggcgagttcgctgccaaggactacacggaccctcccccggcgccgctgatcgacgcggcggagctggggtcctggtcgctgtaccgcgccgtgatcgccgagttcatcgccacgctgctgttcctgtacatcacggtggccaccgtgatcgggtacaagcaccagacggacgcgtcggcgtcgggcgccgacgcggcgtgcggcggcgtgggcgtgctgggcatcgcctgggccttcggcggcatgatcttcgtcctcgtctactgcaccgccggcatctcggggggccacatcaaccccgccgtcaccttcggcctcttcctggcgcgcaaggtctccctggtgcgcgcgctgctctacatcgtggcgcagtgcctcggcgccatctgcggcgtcggcctcgtcaaggcgttccagagcgcctacttcgacaggtacggcggcggcgccaactcgctcgcctccggctactcccgcggcaccggcctcggcgccgagatcatcggcaccttcgtgctcgtctacaccgtcttctccgccaccgaccccaagcgcaacgcccgcgactcccacgtcccggttctggctcccctccccatcggcttcgccgtgttcatggtgcacctggccaccatccccgtcaccggcaccggcatcaacccggccaggagcctgggcgccgccgtcatctacaacaaggacaagccctgggacgaccactggatcttctgggtgggccccctcgtgggcgctgccatcgcggccttctaccaccagtacatcctccgggctggcgccatcaaggccctcggctccttcaggagcaacgcgtgatgagcggggcttggctgtggagcaatggcgggcgacctacgggcggggggccgtgagcgaggagaatgccatcattcatcgatcgacttgggtgccggtggttggttcgggtcgccttattttgtttcagcagctgctgcgttgcgcgcgtgcgtgagatttggtttggtttcgttcccctgcaatgtaatcatgtcgtgactctctcaagggattattccgctc

SEQ ID NO: 3168 - DNA, 864 bp, Zea mays
  Clone ID: 700242667_FLI
ggaaagttttgtggtgctttatttagacactcatgagtcatgaccatagtattaaaccatgtttcgcttcgaaatttccagccttcaaagtttgattgcgattatgcctacgttttggggcatgtgtgctaccacatcatagctgccggattgaacggttacatggctacggtgacaaatcttaagaatccagtgaacaagtggcgatgtggcgcgactcctatttcgtctatgatgactgtgaagcgatggtcgcgtggcccttcagccacccaaattggaaagcccgctgttcacatggctagcgttgacttgaaaggaaaagcatacgatgtgttgagacagaattcttccagctttttgttggaagatgtctacagaaacccaggcccgctccagtttgaaggaccaggtgccgattcaaagcctatttcattgtgcgttgaggatcaagactatatgggcagaataaaaaagttgcaggaatacttggagaaggtgaagaggattgtgaagcctgggtgctcgcaggatgttcttaaagcggcgctgagtgccatgtcttctgtgacggaaacactgaacatcatgacttcatcttctaccggccagactccactgagtcattaggtaccatttcatggtatggatcataatccccacttttttcagtggtggcgattaacgagtttaggaacagcaaccctggtatcatacgggttattcttttgtagccttttggagagttctatcggttttggattcggtagtttatgaaggcttgttgatgagtttgagctcgaatagcttttgaaacagccggatgatgccatctttaataaaccaaattctgtgactgcattc

SEQ ID NO: 3169 - DNA, 2244 bp, Zea mays
  Clone ID: 700242766_FLI
cttggatcttagctggaaccagttgaaaggatctataccgactaataggctttcttcaaatattactacaattgatttatcacacaactttcttcaaggaactgttccatcaaacttctcagggctacctaatattcagtacttgtcagtcaatggcaacctcctaaacggttctgttccaccgacaatttggagtaacattactttcacgggaaatagagcccttgttctggacttccaaaacaactcccttgacactattccacctgtatttgagcctccacaaaatgtcacggttctactttatggaaaccctgtatgtacggcatctaatgcagcgagagcagctaatctttgtcaacctacttctgtaactgatgccccatctggagagggaaagcaagttagtacgacgtgttttccttgcccaacaaattttgaatacaatccatcatcccctattccttgcttctgtgctgcgcctctgggagttggatttcgactaaagagtccaggaatatcggacttccgaccctataaagaagcctttgagaatgacttaacctctctgctggaattgcgtgtttatcagctgtacattgaacgctacatatgggaggctggcccaaggctgaatacacatttaaagttattcccaaataatacaaatttattcgatatggctgaggttgtgcggcttagggaagtacttgctggatggcagatcactctattagatgtttttggtccatatgagcttctcaatttcacacttggtttctatgcagatgaatttcgtactgcggcgtcgccaggtttaaaaggtggtgcacttgctgggattttggtggggacaattgttgctgccattgcagtatctgtgttttctacagtttttataatgaaaaggcgcagaaaacaacgaacaatttcaagacggtcattactttcaaggttttctgtcaaggttgatggtgtgaaatgcttcacatttgacgaaatggctgtggcaacaagggattttgatatttcagctcaagttggtcaagggggttatggaaaagtttacagaggaaatttagctgatggaacaacagtggcaatcaaacgtgcacatgaagattctctgcaaggttcaaaggagttctgcacagaaatagaattgctgtcaagattacatcatcgcaatttggtttctcttgttggctattgtgatgaagaagacgagcagatgctggtttatgagttcatgcccaatggtaccctacgtgatcatctttctgctaagactgaaagacctctgagctttggtcagagggtccatattgcgcttggtgctgcgaaaggacttctatatctacataccgaggcaaatcctcctatatttcatcgtgatgttaaggccagcaatattcttctagattccaagtttgtagcaaaggtggctgactttggtctttcgaggcttgctccagtgcctgatattgaagggactttgccagctcatatctctactgttgttaagggcaccccaggctatctcgatccagaatatttcctgacccataaactgacggaaagaagtgacgtgtatagcctaggtgttgtttttcttgaactattgactgggatgaagccaatccagcatggtaaaaacattgttagagaggtaaacatcgcttaccagtcaggcgacgtttccgggatcatagacagccggatgtcctcataccctccggaatgcgtaaagaggttcctctccctcgcaataaggtgctgccgggacgacaccgaagagaggccctacatggccgacattgtcagagagctggagaccatccggagcatgctgcccgagggagaggacgtcctgtcctcgacctcggggtcgggcttgctggcgaagtccatgtcatcatcctcgaccaccaccaccggggccctctacgtgtcgtcgcatatttctggcagtggtcaggcggacagtggcatcccctccgggatggtggctcctcggtagcgttgctggcgccggaggttttgtagacacctgacgggcggctgtgatctgtagtgaactagcttgtaagtagtgacaggacaggagtaatggtggggtggtgttcccttgccctgcaggtgagttgttgttctgtacatgagttttttgtgaactgtgctggagcctgctgggaccaggttgtgctgtaatagtggcattggtaaagaatacagatgagggat

SEQ ID NO: 3170 - DNA, 406 bp, Zea mays
  Clone ID: 700242839_FLI
gcgtacgcgtgggcgcgaccggcagagccagagccacagccacagccaccccgccggcgagtggggccaggggaagaggccgctcaagtgccccgacctcaacctggacctctgcatcagcccgccgtgccaggaggaggaggaggagatggaggaggctgcgatgagagtgagaccggcggtgaagcgggaggccgggctctgcttcggctgcagcctgggactccccaggaccgcggactgcaagtgcagcagcagcagcttcctcgggctcaggaccgccatgctcgacttcagaagcctcgagatgaaatgagcgcgcttctaccctctctgtgtagcttctccccccccgtcgtcctcgtttttgttttgccacacctcacatggatgatgaattgatgat

SEQ ID NO: 3171 - DNA, 1263 bp, Zea mays
  Clone ID: 700242843_FLI
ccttcctccccaaacaaccggcggcggcgcgagggcttcgctttgcatccatggctctcgtcgccggctcctacgagcgcttcatatggggcttctcactcaaaaccctgacaaccccctccgccaccggcgcctcgctctccgagaccctcaccctcgcgccgctcttctcgtacccggcccacacgggcccggtgcgctgcgtggccgcggcgccgcgggcggggctggtggcctccggcggcgcggacgactccgtccgcctctacgacctcccttccgccgcggacctcggcccgctcctggacccctcggccgccgtctccgcgctcgccttctactcccggggccccgtgccgcggaacctcctggccgcctgcgacgacggctcgctccacatctacgacgccgacggcttcgcgctgctctccacgctccgcgccttcccgcgccacgaggccgccgaggcgctcgccgtgcacccgtcgggccgggtcgcgctcgccgtcggccgcgcgggggcgtttgccatgctcaacctcgtccgcggccgacgcagcttcgcatcccgcctcgagcaccctgcgtccgcgatcgcctacgctgaggacagggatggcggggaccgattcgtgatggctgccgagaacaaggtcagcgtgcacgactccgtggatgccagggttattcatgatatggactgtggcaagaaggtgctcgccatggcgcccgcaaagagtggggtcctttacactggtggcgaggaccgttgtattactgcatgggatctgtccagcggcaaggtctcctcacgcattgagggtgcccatgcaactcgtgtaaaaggggttgttgtttttggtaatagcaatgatggatcacagctctccaatctaatttcttctgcttcgtccgatggtgtcataaggatatgggacattcgaacaattgggaatggaaagcctactccattagcagaggctaatacaaaagcaaggctaacttgtcttgctggaacgtcactgaaatgactcaaggaacctacagtttgctaggcgtctgattctgcattgttagctgaattagaaaacctggaaatgaaagaagaaattgaaggtgaaagatctggcacgcgagcattatctgggtgcgtttggaacgtatccattatgtacaccgacatagtttggcatagtgtctgagctgcataacttatttatatttgattgcgcgacaagttttgcaatgagaaccgttttcagt

SEQ ID NO: 3172 - DNA, 621 bp, Zea mays; identical to SEQ ID NO: 2075
  Clone ID: 700242885_FLI

SEQ ID NO: 3173 - DNA, 1808 bp, Zea mays
  Clone ID: 700242927_FLI
gtgaaatcttgagaagacggcaatatgcattattactgagttattttcagtattgtagcagcattctggactctgatgtccctccatctgttcttcggttcttgctactggaggagcaagatggtgatgatgaggacatcactcttcaaaaggttctcaaggagcacaatgaattagcacatgccaacttttccatcataaggaaggaagctcaagctatcgttgatttggttactaaggatgctttccatggtagtgaagctgggaaagcactttccttttatgttcttgatgcattaattagtattgaccatgaaaagtattttctaaatcaacttcaaagtcgagggatccttagatcatgcctgagtgatgttgcaaactatttgtcaaaggattcgtcattggcatcagaatcttcacagcggttttgcactgtggatgctcagttttcattactgctgagattaagccatcattatggcaaacatggctctcagattctattgtccatgggtgctttacaaaatctttcagcatgcaacctcatgggtggccagaaaaaggtaaatccaagggcaatctctaaaattgtaaaagaacggactggtgaaattgacaagaggtcacttattacacctgtactgcgaatagtcacctcttttacatcgctagtggactcggctgattttctcgaggtgaagaacaagattgtacgagagatagtggacttcgcaaagcagcatcagtcagtttttaatagcattttaagggagaacatgactggaactaatttgctcacgttggagcagcttagcatggcggtttctattctcagcaaggtttgggcgtatgaggaaaatgaggaatgcagctacattcaagatctattttccttgatgcattctctttttagcgttgactttgggattctaaattttatgcaatcaccaaacatgattgagaatcagaagtcagaattgatagcatttggtctttgcttcagccttgtctcttacctttatgttctcgctacaaggaaaaacatgcgatttcaagtttcatatggccgtaacagtgatcagcagcacccaacactacaaatggtttctgatcttctgaattcagcaacacttgccctagaaagagttggtgaagaaaaatatatgcttttaaacaagatccgtgacttaaatgagttgtccagaaaggaggttgatgagataataaaagtgtgcatgaagcaagattgcatatctcctaacgataacatccgtaaaaggaggtacattgcaatgatagatttgtgttgcatggctggcaaccgagaccaactcattacccttctactccaaataacggaatgtgccgttactattctcctcattcattttcaggacgatgcttctgcaaaaggtctttcttcattttctgatgaactccttcctgtgctggagagactagagcatttgaaagaggacaaagttggacgtagtctgaagttgttccacagatccattactacactaaaggagatgaccatcagaaccataaccatctgaaggccgcagcctgtacaatgtacatgtttattaggatagtacacctcgctagatttgcagatgtaaaacattgttgtgtaagctctcatatatatatatacatacttttgccctgaggcaatgagctgtatgtcatgttttaagagtaaaatgtgatttttgaggggtttccatctaggaacattaacatttaaactgtattttttggcctataaactttcactggagatattactttttttgttt

SEQ ID NO: 3174 - DNA, 566 bp, Zea mays
  Clone ID: 700242940_FLI
gcacggggcgtcaacggcaggcggaaccacacgatcggcggcggcgggcgggagcacctggacgtggcggtggagtctgtcatccgctgggcgtcgtgcaccaacttctccacggcgccctcacttcgggcctccctcgtatgctagcactagcaacgtcgttccgcgcgccggcgccgccaacgccgggctgagggtgaggaggagaattccgacgagacgagcggtagagagtgtgcagtagcctcgaattgtataatatatatacagacacagtgctgttatagtggtgatgatagattagagagtgaaggtgaagttgctacggagggatggatgcatggagatggagagcgagtggcagagctggaactgatgtgttttattcttcgctgtcacgctgctggtcagataagatttgggaacgctgctggttagataagatttgggaacacacctggcgacggagagagaaggcgtctgataatttgatatgaacaagaagcaacaatgttcaggatgcatggccaggccacacataaaaggactgtttcagtttgtgtgtc

SEQ ID NO: 3175 - DNA, 778 bp, Zea mays
  Clone ID: 700242952_FLI
ggacccggcacgggacggcgtaagcctgctcaagatctggaacatgaacaagttcaccggcgtgctgggcgtgtacaactgccagggcgcggcgtggaactccgtggagaagaagaacaccttccaccagaccggcaccgaggccctgacctgcggcgtcaagggcggcgacgtccacctcatctccgaggccgcgacggacgccgaatgggacggcgactgcgccgtgtaccggcatgccgacggcgacctcgtcgtcctcccgcacggcgcggcgttgcccgtctccctcaaggtcctggaacatgacatcctcaccgtgtcacccatcaaggagttggcgcctggtttcaggttcgccccgatcgggctggtggacatgttcaatagcggtggggcggtggaaggcctgacctatcacctcctcggcggcgacggttccaccttgggctccgaggctgtcgcattggcgtgcatggaggtgaagggctgtggaaggttcggtgcctactcttcggtcaggccaaggaagtgcacgctcggttcagctcagattgagttcaagtatgattcttcctcagggctggtgattctgcagctggatgcgatgcccaaggagagggttcataagattgttattgagttgtagggtggtacaaagatttagtttcattggtaatcagagtaccctctgatgacgagtatgtagggactggagtggcgtatggtttgattgataggcaaatctgattcatgattcaagcttgtctggactctg

SEQ ID NO: 3176 - DNA, 1386 bp, Zea mays
  Clone ID: 700242965_FLI
gtttctcctggctactacctctcgctccctccggctccgatccagggtgcgagctgagcttgggctagtttagtctccccaagctcgtggcgcagcagcagactcgttggtggaggtggattagtagccaaggctttgcagctaggtagggttttgtagctagttcctcgcaggctcagctctctcatactagctagcgtcggtcagtcgggcgagcaggccaatggtcatggcgaacccggacatgctgccgccggggttccgtttccacccgacggacgaggagctgatcctccactacctccgcaaccgcgccgccaacgcgccgtgcccggtcgccatcatcgccgacgtcgacatctacaagttcgatccatgggacctgccatccagggctgcgtacggggacaaggagtggtacttcttcagcccccgcgaccgcaagtacccgaacgggatccggccgaaccgcgccgcggggtccggctactggaaggccaccgggaccgacaagcccatccacagcagcaccaccgccggcgagagcgtcggcgtcaagaaggcgctcgtcttctacgagggccgcccgcccaagggcaccaagaccaactggatcatgcacgagtaccgcctcgccgccgacgcgcaggcagcgcacgcctaccgccccatgaagttccgcaacgcctccatgaggctggacgactgggtgctgtgccggatctacaagaaggccagctgccaggtgccggcgatggcggcggtgccgcagctctccgaccacgaccaggacgagcactgcggcttcgacgacaacccgtacgccgccatgctcctgcagggcgcgtcgtactcgtacccggcgccgccgcatgccgcggccggcgcgcagaggatgccccggatcccgtccctcacggagctgttcaacgacccctcgctggcgcacttcttcgaggagggcggcggcatgcaggacatggcgcggctcagcaacccgcagcagcagcagcagcacgctcctctcctcgcccgccccgtcacgagccaacagctgctgctcaacaacggccacagcatgcccggcggggggcaggcgcagatggatcctcatccgcctgctgctgccgcctcgacgtcgtcggccgccgctggcaacaagcgcaagagatcgagccctactactgatgccggtgcgctgtcgtcgagccaggcgtctgaggccaagaaaccgaacgggtcctgtttcggcgcaacgttccaaataggcaacggactgcaggggccctccctgggccaccaccacatgccgcttcactctaacatgggcacgatgaactgacagattattgctgttgttctccgctgaaagctatacttgagagc

SEQ ID NO: 3177 - DNA, 1257 bp, Zea mays
  Clone ID: 700242966_FLI
cgacagtacgtcccaaactcgagtttgatcgaggcgtccgtgactggagtggttgcatacttgcatgcgttgttttgtctctctctccctctctgtgtcgctgaaatattggtcacgtccatcccaatctcatctcaaatctgtccatgggctgacaagaccccgcgcgctgaaagcatttgcgtggtggctgctgcacgcagctgggcgcggagttcgtgggcacgttcatcctcatcttcttcgcgacggcggcgccgatcgtgaaccagaagtacggcggcgcgatcagcccgttcggcaacgcggcgtgcgcggggctggcggtggcgaccgtcatcctgtcgacggggcacatctccggggcgcacctgaacccgtcgctcaccatcgccttcgcggcgctgcgccacttcccctggctgcaggtgcccgcgtacgtggccgtccaggcgctggcatccgtctgcgccgccttcgcgctcaagggcgtcttccacccgttcctctccggcggcgtcaccgtgcccgacgccaccatctccaccgcccaggcgttcttcaccgagttcatcatctccttcaacctcctcttcgtcgtcaccgccgtcgccaccgacacccgcgcagtgggtgaactcgccgggatcgcggtgggagcggccgtaacgctgaacatcctcgtcgccgggccgacgacgggcgggtccatgaacccggtgaggacgctggggccggccgtggcggcggggaactaccggcagctctggatctacctgctggccccgacgctgggcgcgttggcgggggccagcgtgtacacggcggtgaagctcagggacgagaacggtgagacgccgcgcacgcagcgcagcttccgccgctgacgacgcacactggccgcgggcgcgagacattgtccggccgtgtcacgcacgcccgcgtcctcctcctcctccgccgccgcgtaacgcacggccacgacgtgtccgtggtcgtaagtgctgtgtctgtgtgtaccaataaataagccccgttttgcttcgtccagaacggtccagtgctacgtgtagtgtatctgtgttgtgatttgcgaattggattattgtgggtcgtctcgtcgaggtctctcgggtgtcgggtgggtctgatgcgatccatcagcgtcgtgtccgaataaaagccacgccgatgcgccggctgacgggcatctggatgtgtgatttctgaacaagatttgcttaatttcacttgctt

SEQ ID NO: 3178 - DNA, 1267 bp, Zea mays
  Clone ID: 700243035_FLI
tgccccacccctccctctctatccatggcggtcccccgcgggtgcctcgggctccccctggtcgccgtgctcctcgcgtccctctgccgcggccaggcggcggtgagggagctcaaggtcgggtactacgccgagacgtgcccggaggccgaggacatcgtccgtgagaccatggcgcgcgcgcgcgcacgcgaggcccgcagcgtcgcctccgtcatgcgcctccagttccacgactgcttcgtcaacgggtgcgacggctcggtgctgatggacgccacgccgacgatgcccggcgagaaggatgcgctctccaacatcaactccctgcgctcgttcgaggtcgtcgacgagatcaaggacgcgctggaggagcgctgccccggagtggtctcctgcgccgacatcgtcatcatggccgcccgcgacgccgtcgtcctgaccggtgggcctaactgggaggtgcggctcgggcgcgaggacagcatgacggcgagccaggaggacgcggacaacatcatgccgagcccgcgcgcaaacgcgagcgctctcatccggctcttcgcggggctcaacctcagcgtcaccgacctggtcgcgctctcgggctcgcactccatcggcgaggcccgctgcttctccatcgtcttccgcctctacaaccagtctggatccggccgccccgacccgcacatggacaccgcctaccgccgctcgctcgacgcactctgccccaagggcggcgacgaggaggtcacgggaggcctagacgccaccccacgcgtcttcgacaaccagtacttcgaggacctcgtcgcgctccgcggcttcctcaactccgaccagacgctcttctctgacaacaccaggacccgtcgcgtcgtcgagcggctcagcaaggaccaggacgccttcttcagggccttcatcgaggggatgataaagatgggggagctccaaaaccccaggaaaggggagatacggcgcaactgtcgcgttgctaacaactcgccgtggcaaccaaggacggggatggcgtccggacagtcgacatctgagctccggtgatgaggttggtgtttcagaagaaatcgagccctgatatggtactaatatgttgacatgcattgttgtttttttggtcgtgtgtaagttttgcacctacctatggctgtggtgcccgagctgcgctcattgctgacgtggggaataattgagacattgtgccttagctccaataacgttcaatatatttatcctttatatc

SEQ ID NO: 3179 - DNA, 1371 bp, Zea mays
  Clone ID: 700243054_FLI
aaacaagggaggagacatggaggaggaaggccatggcatcgtcattgtcggcggcggcatctgcggcctcgccactgctcttgcccttcaccggaaagggattgctagtgtagtgctggagaagtccgagaccttacgatcagacggagccgcgattggtgttcacgccaacggatggagagccctggagcagcttggagtagctgcagagctcagggaaactgcagaccttatcaccgggactcatgacgtgtggcaggtggcaaacaagacagcccagcaggtaccagtcaggaaggaactccggtgcttgaaaaggaaggatctcatggagacgatggcgaagaacatacctgcaggatcgatccgcttcggctgccacgtggttgcgatccagcaggatcctggtaccaatggagccattcttactacagtcgatggtggcacgatcagggccaaggttctgatcgggtgcgacggcgggagctcggcggtagccaagtacctcggactgtctgagccgaaagcgatccctcgcacggttctgcgtggcttcactgggtatccgcatgggcatccgttcgggaccgagttcctgcggataagatcaggaggggagttcgccgtcggaagattgcctgtcacccgcaacctagttcatttcttcgtaaccgggcctaatcctccaacaggaatggtcaccaataaagacgtgagcgccacgaaggatttcatgctggagaagctgcgaggctgcgctcccgagatcgtcgagatggtccaggactcggacccagagtccctcaacgtcgtgaacagcatccggtaccggcctccgtggcaggtcgcgctcggcaccttccacaggggcgccgtcacggtcgccggcgacgccatgcacgccatgggcccgttcatcggccagggcggctcgtcggcgctcgaggacgccgtcgtgctcgcccgctcgctgtcacgggccgccgccggcgccggcggtcacggtgccgctgttcgggagtacgtccgggagaggaggcccagggtggcgctgctgtctctagagagctttctcgccgggacgctgctgcgcgccaggtcgctggtggggaagcttgcctgtttggctgtcctggcactcctaggcaccaggtcgcttcggcatgccgactacgactgcggtcgcctctaataagccatgcaatttccttgtggatcatggcatggcatctgtatgccgaacaaaaattgtctccatccttcatcccagatgtgctgaaacgatgcatctatttcttttttcctttttaactttgcatgttgaccactacactgaaagcaaatgaacaacattgctggtcagtttgtttc

SEQ ID NO: 3180 - DNA, 1221 bp, Zea mays
  Clone ID: 700243086_FLI
gttcagttctgagcgatcaacatcaccatcgacttgaactcaagcgactacagcaaacttgctgagactgcagctgatcatggggtcgatgacatggttggcggccgtgctggcagcactcgtcgtcgccgcctcctcatcggtggcatcacacgcctcgccgccggggaaacttgaggtcggtttctacgagcactcgtgcccacaggccgaggacatcgtgcgcaacgccgtccgccgcggcatagcccgcgagcccggcgtcggcgcggggctcatccgcatgcacttccacgactgcttcgtccggggctgcgacggctccatcctcatcaactccacgccggacaacaaggccgagaaggactccgtggccaacaaccccagcatgcgtggcttcgacgtcgtcgacgacgccaaggccgtcctcgaggcgcactgcccgcgcaccgtctcctgcgccgacatcgtcgcgttcgcggcccgtgacagcgcctacctcgccggcggcctggactacaaggtcccgtctggccgccgtgacggccgcgtgtccaaagaggatgaggtgctcgacaacaatgtccctgccccgactgacgaggtcgacgagctcatcgagagcttcaagcgcaaggggctcaacgccgacgacatggtcacgctctctggcgcgcacaccatcgggcgctcccactgctcctcgttcacggagcgcctctacaacttcagcgggcagctggggcggacggacccgtccctcgaccctgcctacgctgagcacctcaagatgcgctgcccatggccgtccagcaacgaccagatggaccccacggtggtgccgcttgacccagtcacgtcggcgaccttcgacaaccagtactacaagaacgtgctggcgcacaaggtcctgttcatctccgacaacacactgctcgaaaacccatggactgccggaatggtccacttcaacgccgcagtcgagaaggcatggcaggtcaagttcgccaaggccatggttaagatgggcaaggtccaggtgctcaccggcgacgagggagagatcagggagaagtgcttcgccgtcaacccacactactagtcgtcaagtttagctaattaccccgcgaattatgtttgtttatacgttccatacatcaacattatgtagagtgtttttcgttctcttcaagggtgtgaaatcaaacaagtttatcaagt

SEQ ID NO: 3181 - DNA, 1587 bp, Zea mays
  Clone ID: 700243094_FLI
gcataaacaaaaaccagtcctttgttcttcttcccccggcacgcccagcgccagtcaccaaccttccactccctccctccgtcgccatggcgcgcaagaagatccgggagtacgactccaagcgcctcctcagggagcacctcaagcgcctcgccggcatcgacctcaccatcctctccgcccagatcacgcaatcaacggacttcgcggagcttgtgagccagcagccatggctgtcaaccatgaagctagtggtgaagcctgatatgctgttcgggaagcgtgggaagagcggcctcgtggctctcaacttggatttcaatcaagtcaaggagtttgtcaaggagcggctgggggttgaggttgagatgggtggctgcaaggctccaatcacgaccttcatcgtcgagccatttgtgccacatgatcaagagtactacctttcgattgtctcagagaggttgggcagcaccatcagcttctcagagtgtggagggattgagattgaggagaactgggacaaggttaagactattttccttcctactgagaagccaatgacgtctgattcatgtgctcctttgattgcaacccttccattggaggcacgcggaaaaattggtgacttcattaaaggagtgtttgccgtcttcctagacttggatttctcatttcttgagatgaatccgttcaccatggtcaatggggagccatatcctctggacatgagaggagaactagatgacacagcagctttcaagaacttcaagaagtggggaggtatagaatttcctctaccttttggaagagtactcagccctacagaaagtttcatccatgaactagatgagaagacaagtgcctctctgaagttcacggttttgaacccgaaaggtcgcatctggaccatggtcgctggtggtggtgctagtgtcatttatgctgatacagttggagacttgggatatgcatcagagcttggaaactatgcagagtatagtggtgctcctaatgaggaggaggttctgaattattctagagttgttcttgattgtgcaactgctgatcctgatggccgcaagagagcccttctcattggaggtggcatagctaacttcactgatgttgctaccacattcaatggcatcatccgagccttaagggagaaggaatccaagttgaaggcttcaagaatgcacatttatgtccgccgaggtggtccaaattaccaatctggactggctaaaatgcgtaagcttggtgcagaactcggcgttccaattgaggtgtatgggccagaagcgactatgactggaatctgcaaacaagcaattgaatgcatcatggctgcagcgtaatcagagcgtagctctgggtagtttgggatctgcaaacacgcaattgaatgtgtcatggactcagcataaatgagagatggatagtagttgcattatatagttcacacatggtgtttctgttttttgtttcagatatgttgtagcgtgttgtttgaacgaaaccttcacagatcattactgcaaagaaattgctgtgtgttaaaataaattcaaagtctagttttgtgcc

SEQ ID NO: 3182 - DNA, 1153 bp, Zea mays
  Clone ID: 700243095_FLI
gtacgagagggggaaacggggggacgggaataggcgtcgtcggccatgtcgtcgtcgtggaactcggtgggtctggcgatcctgtaccaggtgctgggctgggtcgccttcgccgcgtggtccttcagcttctacccgcaggtcctcctcaactacaagcgcaagagtgttgtgggcctgaatttcgattttctggtgttgaacttgacaaagcactcgtcctacctcatatacaatgctgctctcttcttcagcccattcattcagcaacagtatcatgacaaatatggtgacaaagagatgattccagttgctgcaaatgatgttgctttttcactgcatgctgtagcattgacagcctttaccgtttttcaagtattcatatatgagcgaggaacacagaaagtctccaaagtttgcatatcaatttctgctattgtctggatcgcggctcttgtttgcctcattattgcttggccaaaaagtgactggctttggcttattgatgtattcaattcaatacaagttggcatgacagcaatcaagtacatccctcaggccatcatgaacttcaggcggaagagcacaattggttggagcgttggcaatatattacttgatctcacaggaggggtgctgaatttttgtcagatgggtgtgcagtctatagatcaacatactttggtgaatttctatggaaacattgggaaaacccttctttcattggagacggttttctttgatgtcctgttcattatccaacactacgtgttgtaccctgtcaagaaggacgagaatggtaaggcaatcatttctgaaagggtagccccccttatcaggccttcggacaagcctgaagaagataacgtatgatctagctgtagttatattgcgcacattgcattcacgcgctgtttgcacacaggccacacacgcatgcgaattatttgttcaaaaggaattgctagcgcgtcttgattatattgctacttataacttttactacttggtgcactggcgagagatgtctcatataccaggttgcgggtttcaagtggccccgtttttattatcgtgatttgtgaaggttattagatatcatctcggccaacatttacgatcaatgctcatgtaaatatttggttgcattaca

SEQ ID NO: 3183 - DNA, 1062 bp, Zea mays
  Clone ID: 700243109_FLI
accggcccaaccccgtctcggattgcacggcaccggtacccctcgcctaggtttaggcttccgaccgccgcagcgtccccgccacgaccacgagctaaagaaggtcgccggaagagggggcgcggagatgagcgggagcgcgttcaacgcgttcaagtcgcgggttccggtggcgtggagtccccggctgtacatcacgctggtgcggggcctccccgggacgcggcgcctccaccgccgcacgctcgaggccatgcgcctccgccgctgccaccgcaccgtcgagcaccgcaccacgccgtcgctcctcgggatgctcacccaggtgaagcgcctcgtcaccgtcgagaccgaggagatgtacaacgcgcggaagcaggccgaggcggagatgcgcgcgcccagacccccgctcgtcgtctcccaccagccacagccgccggctccgaagccggcagccgccgccgcggtgggtgccgctaccactgcgcagtagcctctggtgagctgctcctcgagtcccgatttcgtcctggtgcggtctggttttccattttgtttgtttgtccattcaagcgtttgatgcaatgactcaagtcagtgcgcgtagattggcagtcaatatacacaatgaaatgtcttagtttcctggtgggttattatagttcttccttagttctccatgtaacaaaatggaaggtgcagctctaaccacattagagcaactccaagagttagtctaaaattattagcctctcttggttgttggtgtgatttgctagagtatccaagcagctgatgtggatatatcaattattatttctaattctttggcaccctgctttgggagcactcatccagtcaggtcaatccagccccagctcctcagatttgaatgcctaggattagtgctgcctggctgggacaggcttcctagggcttgatccaagaaaggcatgcatcatgctttgaattttgtaattgatatgagaggaaatttcctacagtgttttgacatgttctattaactggcatagagtaatttaccatctgttctatgcc

SEQ ID NO: 3184 - DNA, 919 bp, Zea mays
  Clone ID: 700243123_FLI
agcggcaggaggccgagacccatcggaagacgtcgaccaggagtcggcggcggcggtggccggggagcagcagcagcagcaggcggccgaggccgaggaggaggaggagcggcaggcgcccgtgccgcgggagaagatcctgcagcggatcaactccaagaagggggccaagtcgtaccagctgggcaagcagctgtccttcaagtggaccacgggggccgggccccgcatcggctgcgtgcgcgactacccgtccgagctccagcagcaggcgctggagcaggtcaacctctcgccgaggtgcgccgccgcccgggtcgcctcgccactcgcgcgaagcttcaacaaccacccagcgcccgcgacaacagcagcagcagcaagggggtgcgaggcgtccacgccgagtgaggcgctccggtcgcctctgcagcacggagcactggccgtggcagccgcagctgagtctgagtgacgcacgcagttgcgcctgcagcagctgaaacatttcttgaatagtcctcggataattcattattgaagatgtgaaaagttttgaaaaaatcatcagacagttcgatgatgaagtggtgtacagtactaggtaggtaggtgtgagcagcgtgccaccaggactggagtttgaagaggtgggccgtccaagtaacaaagaggatgaagctgggccaaagaaaggaggaagaattcgcaagccaagtgtccgagtgagcgggcctgactgggtgacggcctagaggtcgtgtgttgcagccaagcgtggtgtgatggtgtgtggccttctcaggcgtgtaagcgaggggagataagtatctgggaagagagagcagagggtatcaagaaaagtgtaacagaattctgttttcccacctaataccaaaccacctctgctccccgttct

SEQ ID NO: 3185 - DNA, 1285 bp, Zea mays
  Clone ID: 700243150_FLI
caatatttaaatgacgggatcatcatgagaggaatggcgatgcttagtcaagttgagttgccagtgtccaagcaaaatactgtcgttgttggtgggaatttgattgtaaatggctcagctggatctggagcagcaaccactgtgctgcgacaccagttgtctcctgtttcctctattgagtttatggccacagctggactacgttctgttattggtgggcagatgtttcgtcaaatttcaccacattctacagcaacttctggacttgctgtttctttgagagatgggtctatcaacttgtcaaatgcctggactcgccaattgtctgacaatactgttggaaatatacagctagtccttggcgatgaatcaagtatttctgttggatggcaaaagaaggatgaaaaacgtactgcaactggagaagtaaagtttggaactaatttttttggcgcatctgctcattatacacatcgcttctcctccaaatctcatgcacgcatcgctggtagagttggaagcacaatccttgattttgaaattggaggagggaggcgaatatcagaatttagtactgtaaggatgatgtataacataggaattcagggcgtatcttggaagtttgagttacatcgtgctggtcaaaagttaatcatcccagtcttgctttcaactgatttaaatccattatttgttaccagtgcatttgctattccttcaacactgtattttctacttcagacatatgttgtaaagccttactaccttaagcgagaaaagcagaaaacactagaaaagatggaaggcttatctacacagctaactgaagccagaaaggcagctgaaaaagctcaaaaattactggaacctgtctccaaccgtaagaagaatagacagctagagaacaacggattggtgataacaaaggctctatatggcagtcgccaaaaaaatcaaaatgagcagtgaattgaatgatatacacaatgacatggcttcacaagtatttgatgtgaccatcccactgaatttcctcgttactgaggcaggccagctcaagcttcatgacgggataaagaagtctggaataatgggtttctacgatccttgtcctggagacccgaagctattacttgtcgagtatacgtttcatggtcataaatacaaggtcatggtagatgactatgaggcgctgttgataccacaagatatccatcaattttgaacggttcctgatgtaaaagccacatcaaaacgattttgggtcatcagctccctttctcac

SEQ ID NO: 3186 - DNA, 1299 bp, Zea mays
  Clone ID: 700243160_FLI
gatgaatctcatggcaaccacctcagattgtatgaaaatgcaatcaaaatctgtaaagcaactttgcagattgtttccaatgcgacgagtaattaaagagggagaaaagaaagacggctacaatggtccgtatgattcaatatgtggggttcgtcttcctcgtggtcttgatccacattctatttcatcagaagaactgtcggcatctttggggcacatgctacatttcatcaatatagcagttcgtatcttatcagcacctgctcttcatgtatcaggctgtaagggctcatgctcaaatatatggcagcggagttcctactggagcacacgacagtcccagagcaaggtttaccctctttttatacctaggaaaaatgtttgcacaggtggtgaagaaacttcattgacagaaagtggctcgagtaactttggggttgactctgtggattctgtcaagaaaccgtcttttgatcccaagagaagcaatagctttaacttttctggtgcatcttcccactccatggagaggcatcaatatttgcagagaggaatatcactattaaagacaagtgttacagccattactacctactattacaactcactgggcttggatgtgccatccaatctttctacttttgaggcgtttgctaagttgctccatatgttgtcgtcatcaaaggcccttcgaactgcttttgaattggacaattgcttcaaggtcagagaagcaagcgcagcagctgaacagatcgatttggaaggcaagttctgccatatcatcggacagcagttttatggacagcatgcacacaaccattatgcccagcactctggacaacctcctcatgaactcagacgagagcctgtacactggtaagctggtgaagcatggtggcgtgccagatagcatattcgacagctgggacatggtagagcgtgaggttctaccaccaccaccctcgcgggttgaagacgtcgctcagtgggaatgggccatgtatgctggcagcacaaaaaagaaatgacctctatttacaagtcctccctgaagtccaaactgttagacactgcaagagcttcagtttagatatgtaagtacttggtcactaggctctaaaccgggaaatgtggaatttggccacgttcctcatttctggaacgtgggaataatctcgttcccgtagttttaaaacctaatttaaatagcgtaccacgtacaatgttcctatttctcgatcccattgatttgatcctggaacctggttacttagatcaggctccggtcccatgtac

SEQ ID NO: 3187 - DNA, 679 bp, Zea mays
  Clone ID: 700243186_FLI
caaaagagaggaccttgagcaggaagtcatgattgatggctggtttcacactggagatattggcgagtggcagccagatggatccttaaaagtgattgatagaaagaagaatattttcaagctttcgcagggggaatacgttgcagtggaaaatctagagaatgtgtatggtgttcttcaagatatagattcgatatgggtatacgggaacagcttcgaatcttctctcgtcgccgtcgccaacccgaaccagcaagctctcgagcgctgggcggaacagaacggcgtcaccggaagcttcgctgagctgtgcgagcatccaagggccagagaacatattctcgcagagctcaccaagatcgccaaggacaagaagctgaaaggctttgaggccataaaggctgtccatctcgaccctctgccgtttgacatcgagcgcgacctcatcaccccgacgtacaagaagaaacggccgcagatgctcaaacactaccagggagtaatcgacgcgctctacaagggcatgaagtgagacggcacgtttgcagagtcgcaaggggtactgttgtgaattgtgatgcacatatttgtctatatgttgtttcagtatctgtggtgtgtggagtcactcggaaggttgtgtattgttgtattgagataaggggaatataaataaaat

SEQ ID NO: 3188 - DNA, 1064 bp, Zea mays
  Clone ID: 700243188_FLI
ctcaagcatcatttcctactattgggaggtgcaagactcgaacgccgtgctctatagccgacagaagtctgcggaggcgaaattgtacgagacttggatgatgccgaccatgtgttcgttgaaatcccctcaaggtagttcaaggtgccagattggttcctcgacaggaatgactacaaggacaacaggttctcacagatcatctccaacgccctcggtatgaagctcagggacaacctcaacaagctcaaaaagatcagtcccttgttggatttcatttctagcctacccgatggtgagagcaagtgaacgcatgcgcacttggaggagacaacgtcacatgataaggttgttcaaggcgttgatcaagtggacgtagcggcttatcgacaagcatgttttggtcctggagagctacaacaagaaagtttctttcgctcagatacatctccattttgttctgaagctcatatttgggaatacaaaagaatcgaaaggggaaaaggcagagaggattgttggtctcaactctcaagtcagtaccagcagcaaagttgaatgtttggtaatttgggcttgttgcacaccttgactggcctatcctgagtcatgacccagatatgatcaagatgctatgtggcagttcctatccagccattttgtagtgggagaagcctggagagtacgtgttgtatgagcaacaacagcagaaacgacttttgcttcaacaacaccaacaagatctctatacatcaactgcattcaccgccacaggatcaatcacttccatccatggaacctattcaatagcttccctaggcagaaagacaaacacaaatgaatatgaaacaacagattctggcaaacaattgtagcttggctggaggcgggcatcagcggcgacttcccactcgattcgctgtataataaatactatgagaggatactggtgtttcataagataatcatgcaactcatgaaaatccatgtaaaatatgtagctgactatggatggcctgatgctataattttagccatgtttgtcttatgcgtgtgattcaagt

SEQ ID NO: 3189 - DNA, 1123 bp, Zea mays
  Clone ID: 700243193_FLI
cacgatgccgccccaccgtgccggaggggccgcaggcggcggtgacacgagcgcgttcttcgcggcgacgctagtgctctgggctgtgtctgtggggttcgagatcggcgtccgggggcgacgcgagctggcgcccgtggccgccggcttcgccttcttccaggccgccaacgccgcggtccgcggctcggtctcacgcgacccgcgcttcgtcaacaccgccgtatcgctcctccactcctccctcacatccgtctccgttatctttgttcttgtcaatcaatggcgtaataagggccttgagaacatgtttgagcatgaagaactatttggtggcagttggattggagcatattctgctttgtgcttttcttgtggctactttgcatatgaccaactggacatgctccgttaccggctgtacaatggatggattcctggaattctcatgcatcacttgatcctactcatttgctttacactagctctgtataggaatgtcacaatcaactacctaattctctcccttgtatgcgagctgcactccatatttttgcatgtaaggaaagtgaggcgaatggttggatttcgagatttcgacagaacaatggtgaagctggaatggttactcaactggactacctttgtgacagcaagggtgatatgtcatatcttgataacttacaagctcgtcgctgatgcccacaaatttgggaagggcattgagcttccactagctcttcttggtatggcaggaatgaatctgctcaacatatttctagggcttgatctacttaaagcattcacacgagaaagaaaccagcagagccatcaggattgaatgtgcttttcttgatggtggtgtactcaaaattttgagaaggctgtagttccgttcaagtagggcagagagatatgtttaagtcttaattagcaactacactggaggcaatttttgtatgcattctttatgtataccaaaatgtactaatgctaagatctctaccagaaagggttgttgctagtattttcatccatgtaggtataatattcattagcagaatgcaggcgggtacctggatgcaggatttacatacatattgcaattagaaagaagtgtgtc

SEQ ID NO: 3190 - DNA, 1309 bp, Zea mays
  Clone ID: 700243238_FLI
cggatggtggcagtggcacgccgcagctacctctcccctccccatcgccgccaacgccaaggccaacagcacaaccatcgcaccacccaagaaatggagctgagtgtgccccttctcctcctcgcggctccccaagctcctgctccgcgcgcgtagccgcgcggcacctcccagtcccaacacgcccgcaagctccgctcaccgcgaggtgctgtttgaaccgtgaagatggcggcgatgactgcttacaagtatcaagctcaggccttgatgagggactatctgctagctgatccactagttccgtacacctctgtgctcattggcattgtcctctgcaagatggcttacgatttcactcgaatattgagctccttttatttcaagggctacactttactgacaaaaatacagcgcatcgaatggaacaataggggtatgtccagcgctcatgcaatttttatcacggctgtatcattatatcttgtcatgtcaactgatcttttctccgaccgcgtcaagggacctattacattccgttattcgataatatccacctctgcgttgggggtttctgtcggctacttcatcactgatcttgcaatgatcttctggctgtatccttcccttggtggaatggaatatgtcctccaccatactgtttccctggttgcaatagcttacacaatgttgtctggggaagggcagttttacacatacatggttctcatttcagagacaaccacccctgaaatcaacttgcgatggtttcttgacactgctggactgaagaaatcaagtgcttacttggttaatggaattctgatgtttgttgcatggctggtggcaaggatatttttgttcatgtatgtattttaccacatctatttgcattacggtcagataatgcagatgcatgcctttgggtactacctgacatttgttgtgccatcagtgctctttgtaatgaacacaatgtggttcatgaagatcttaaaaggtgtgatgaaaacactggcaaaatggccatgacgtggatgacgccaagaggatctcagaactatcaacaggatttcgtctttctggcatcattacgtgaccttaatctgtgaagttatggatatcagggtaactagagaaacataatatgtaaagtattagcaaacaagctatattaggtgaaattgccctattttcagtcgagctggaagttcataaccggtttggtttgtaccggagatccagcacgctgttctgcttaccccacctgtgccatgtgtatatctgaagagaattttaatgggtggtt

SEQ ID NO: 3191 - DNA, 1208 bp, Zea mays
  Clone ID: 700243248_FLI
gacggcgaccaccacctgcggatcccacccaaagtttctcgtgtggatgcgaacgaggactccatggagagctctgaggagatggtcaccccccgagctgccgcgtcggagccggatgaggaggagactaaggccattgcggccgaggtgcccgtggagcgcaccgtcgacgcggacgtcgccggttctggggaggtcatagtggacgcgtttccgccggaaaccgttggacaggaaggtgagggcaaagtggatgaggcagaggtggaggtgcacgccgtggtggcgcaggaaccggaggtaaaggatgtgttggtggccgaggaatccgtggttcaggagccagtgtctgacgcaccggtggcagaggcttcagaggtgaaggagttggccaaggtgcattcggtgcttgaatctgagccgagggttgatgaagggcgtgatgaagtggtggtggtcgacgaaacacctgtagtgcctgaggtacaggaaccagaggtgaaaggcgttgatgctaccgttgtgttgaaggaacaagagaagaatagtggcaatgtggtggccaaggactctgctgaggtttcgcgatctcaggaggctgctggtgtgcatattacagaggtggagcggggacctgcagtggcagtgattgcttcagggcagcgggcaatatggtggaatttctgtggcctttttgatgcctttactggttcagggagatagatgaagggttggaacttgaagccaagaagacaaatgtggtgacgttcagtttaaagctgatgagcagttgtaactagactttttgtttgcatagtcacatgaatgtatgatgaagcagcaggatttcggataacatcgcgctgatgtttacttcctccctgtgtctctgcatgcgtgcaaagctacacccccctggtcgtggactcatggttaatatccttaatttccttagtatccccaacgcctagtgccctttgtctagtgtcgtctaggtactgcctggtcttgtagcataagagttgaggtgggtcaaccgtaaagaaaattttgttgtttctgcctttatacttattttttctggggtgtcgtctgctatgccccttcctctcatggttgtcacttgtaagatatttattcaaacaatttgagatggttctttgaaaagcctcaattcgagattgctgagtgtcagccaggtttgtcat

SEQ ID NO: 3192 - DNA, 956 bp, Zea mays
  Clone ID: 700243281_FLI
ctcagctcaatcccgagacaaaggaacccacctccactcccaccagcaagctcaagcaagcagccaccaccagcagcgatcagcggcagccatggacatgggccggcaccagctccagctccagcacgcggcctcctcgtcctccacctcggcgtcgtcctcgtccgagcaggacaagccgctctgctgctctggtcccaagaagcgccccgcggggcgcaccaagttccgggagacgcggcacccggtgttccgcggcgtgcggcggcggggcgccgcggggcggtgggtgtgcgaggtgcgcgtccccgggcggcgcggcgcgcggctgtggctcggcacctacctcggcgccgaggcggcggcgcgcgcgcacgacgccgcgatgctcgccctgggccgcggcgcggcctgcctcaacttccccgactccgcgtggctgctcgccgtgccgcccccgcccgcgctctcgggcggcctggacggcgcccgccgggccgcgctcgaggccgtcgcggagttccagagacgccgcttcggggcggcagccgccgacgaagcgacctcgggcacgtctcctccctcctcctcctcctcggcgacgaagccggcgccggcgattgagcgcgtgcctgtggaggccagtgagacggtggcgttggacggcgccgtgttcgagcccgactggttcggggacatggacttggacttgtactatgccagcctcgcggaagggctgctcgtggagccgccgccaccgccaccgcccgccgcctgggatcatggtgactgctgcgactccggagctgacgtcgcgctctggagctactagcaagctatagcagcaataagctccaccaactcatctgtactgtagtgtacttgtaccttgtaccttgtaccaaaatccaaattgatttgtagcgaattaacttaccaatcccccttggcaactc

SEQ ID NO: 3193 - DNA, 577 bp, Zea mays
  Clone ID: 700243371_FLI
gatttcaaatccttcgatcgcgcagcgccgcccgccctctcgcagctctctccgatggcccgcacgaagcagacggcgaggaagtcaactggcggcaaggcgccgcggaagcagctggccaccaaggcggcgcgcaagtcggctccggccaccggcggcgtgaagaagccgcacaggttccgccccggcaccgtcgctctccgcgagatccgcaagtaccagaagagcacggagctgctcatccggaagctgcccttccagcggctggtgcgtgagatcgcgcaagacttcaagaccgaccttcggttccagtcctccgctgtcgccgcgctgcaggaggccgccgaggcgtatctggtgggtctctttgaggacaccaacctctgcgccatccacgccaagagggtcaccatcatgcccaaggacatccagctcgcgcgccgcatcaggggcgagagggcctgattgctgctctgtcttcctgtttctgtaatgtctgaactaggcgatggactctatcgcttcttgtcctgcaatcgtgtaccgatgttcttggcaaatcaatttggctgttatg

SEQ ID NO: 3194 - DNA, 1526 bp, Zea mays
  Clone ID: 700243404_FLI
tgaattccttgtaacaaacaagacaaagatccttagctcctttcccaatttgattccacagttctatccattgttgttaaagcttattgcatcaaacggtgagagactggagaataagttttcggaagtacttccattaatgatgtcagcagggatcttttcttcccctcttcctatcccttatggatttgccaatgttggtggtggcactggaaaaggtggaaagaagttctggaactcttattggtagtagtatagctacaatccagaagagcgctgctcctgagatgcttcttgcactgatggacgaggcatatactggttctgccgtagaagaacctagtggtaattcaggttctgatgatagtggtcccctagaccttactgacccaatgttcttagaccttctaaaagatgagaatgatggcattgccgcaaaacattggatatcccctacgatatcttcaacgttacaagcagcatttaacagcccacagtcggacagattgaaacagtcactggaaatggcacctcgctttcttactttatattttgcaacagcattgcgagacgttaatgactcactgctgtgtgctcttattccagtagttatgtcaagatatgctgcaatgttcccagacaaagttttctctttcaaggtgagggaaaggctttcagacttcattttggctgcattccagcggtctcccaacatcattgcagtactgaagaaacctattactgacagacttggtgaggctcatgataatcttgccaagacagagttagcattgcacttgtgctgggccattggtgagcatggagctggaggggtgggtcacaaggatgtagctcgtgaactatttgaaaatttggagttattattgtatgaaaacctggcaactagccgtttgggattaagccaagagccaggatctgattccatgggtgcatcatctagaaagtcatcccaagccaggcttctctgctttgtggtgactgctattgcaaaattagcaacatgccacagtgagttgcttccgagggcacgcgtgtcattgggtaaggtcgctcgttcccgaacctcagacaggagggtctggcaacgggcctgtgactatttagggctcatgaatgaaccagccatctgtttatctgtactgggaccgtccaccgcccaaggaaatggtcctggtattgtgaattggagtgaaggagaacaaagatggtagctcatgttcctttttaccttttagcccagcaaaaaggtccaccgtctcataatttttcatttgccgacctcctcccaacagaatgaagaaaatatctgcatgagtgcattggtgcaggcatgatttctctagcagaaggccatataacgattttgttttgaagatccaagttcctttttaaaaaaggggctggtctgaacattcaggcttatttctctagcataatactcataaagagtcctgtacttttaggtcttgttcggttattcctataatacatggattgatggaatt

SEQ ID NO: 3195 - DNA, 544 bp, Zea mays
  Clone ID: 700243408_FLI
aggcttgctatagctggtccatggcaccatacatgtaagcacgcacacaggcgcacacacacgcacgcaatgatctacgtatctagcagcagcttatcatgtcgtcatcatgcatgcatggacgacggcggtcgtcatcttatctgggagcgtgtgtgtcttggcaatgggaagctgcatgcgcctctcggccggacggcgcgtagctgtagggcggcgtgccatagagctgcctcctgccgctcaccttgctgttgaggacgactgatggtggccatggccactcggcgtcggtggcggcggcgccgagttttacctctctactaaggtagggcaacttgtatcctttggcaattgttctcatctatctgggtctatctgttggctgcccggtgacggtatacggtgatgttctaatagtactcaattggtcttggagttcatgctacggctcctctgttatatattacacggctgacggctcctccttattaatgtgtactttgatgatgtcattaataatatgaatctgatgatattgaat

SEQ ID NO: 3196 - DNA, 766 bp, Zea mays
  Clone ID: 700243427_FLI
cttacccaatggaggagcagcattcaggattccggcagtggcaatggcagtggcgcctcttctccctcctctcatcccagccggagctgctcccgccgccgcggccggccaaccatgtcaggtgggaggagaccgccgccgcgcacctcttctccgcaagcctcccgggtaacccaccccactcgatccctgactcgcgcgtgctgctcgccgtcgtcggtctttgcagccagccagctgagctgactgctgagcaaggccttcttcttctgtgtgccgtcaggagtgcgcaaggaggagatcagggtggaggtggaggacgccaggtacctcgtcatccgcaccgagctggacgccggcaccggcaccggcggcgccgtcgcggacgcgaggagcttcgaccggaagtttcggctgccggggatggtggacgtggacggcatctcggcggcgtacacccacggcgtgctgaccgtgaaggtcccgcggatgcacacccgggccaggcctgtagttgacatcctcggtgcgggggcggggccggccagcgaccacgcggcccgggcggcctgattcgtgatttatagcatcaagcatgtactcgctctatcctataaaaaaattatatttagagttcaaattttatttcaaaataaatacacatttagaaataagatcatatggctttagttgtttttcctacttcctctcatctcgaagtgtaattatatttttatagaaaaatagatggaaataatttctcgct

SEQ ID NO: 3197 - DNA, 1623 bp, Zea mays
  Clone ID: 700243456_FLI
gtctttttccagcccaaatccgcctcttccgctgctgccataaagtccggactttacgaggctttcacgacgtgcgagatttctgttatcgatctccacgaacccgatagcctgccataaagtctgcacagacgcttcgcattgcttcaaccaaagatccatccaaactctgcaccccagaaagctagtacgatctcggggggacatgaagcgcctgcagtgcttcaagaagagcagcggcggcggcaatggtggcgggccggggaagcgcctggagcggcggctgtcgctgggcgagtacaagaaggcagtgtcgtggtccaagtacctcgtagcgccgccgggggctaggatccggagcggcggcgaggagctgtggagcgccgacctgtccaagctggagatccggggcaagtttgcgtcaggccggcacagccgcgtctactccggcaggtacaccggccgcgaggtggccatcaagatggtcagtcagccggaggaggacgccgcgctcgccgctgagctagagcgccagttcgcctccgaggtcgcgctcctacttcgcctccaccacccaaacatcatctcgtttgttgcagcatgcaagaaaccaccagtattctgcatcatcactgagttcatggcagggggctcccttaggaagtatctacatcagcaggagcctcactcagttcccctcaacctagtgctgaaattagctctagatatcgctcgcggaatgagctacctacactcccagggtatactccatagagacctgaaatcagagaacatacttctgggagaagatatgtcagtcaaagtcgcagatttcgggatttcatgcttggaatcacagtgtggaagtggcaaggggtttacaggaacctacaggtggatggctccggagatgatcaaagaggaacatcatactaggaaagtggacgtgtacagctttggaatcgtcatgtgggagatcttgactgctttggtcccgttcagcgacatgactccagagcaggctgctgttgctgttgccctgaagaatgcaaggccgccactgcctgcttcatgccctgtggcaataagccacctgatcatgcagtgctgggcgaccaaccctgacaaaagacctcagtttgatgacatcgtggcgatcctcgagagctacaaggaagcccttgatgaggacccgtcgttcttcttgtcgtatataccacctccaccggaccacggccaccaccaccatcatcagagccttctccggtgcttccctcgctccatgcgaaggtctgcatctctgaaagtatgatcaggccgggatgttgcctctgctcatcgatgctgtgtacaatatgcaccccctttcgactttctttgttttctatgcgcgcgtcggccctctattatgcggcattagcatgctatatgagctagtttatgctctcattttctccttgttggttaattatttccgtcattgatgccttgagtaatgtagagatgacaggcaggcatgcagcttccggttattatctatggatgccatttgcttttggtgatgggaaacatgaaagagccccagtaaatgtaatataattaagctctccattcaattgtgtt

SEQ ID NO: 3198 - DNA, 1138 bp, Zea mays
  Clone ID: 700243466_FLI
atccgttcgactgcgccgtgtgcctgtgcgagttctcgcccgacgaccggctccggctgctgccccagtgcagccacgcgttccacctcgagtgcatcgacacgtggctgctgtcccactccacctgcccgctctgccgccggaacctcctcgctgatctctcgccggcgtcgtccagccccgtcgtggtggtgcagctcgggtccgggagcgcccgcgacatggccgcgtcggcgggtggtgccacccacgacgatgccgacggcggcgagccaagcgaccgggccacgccggcgcaggagatggtcgaggtgaagctggggaagttcgtgtgcgtcgaaggcaacagtgacagcgcgagcgccaccgccacggacgcagcaggcaccagcggcgacggcgacggcggtgccagtgcagaggaaggtctcgggcagagaaggtgccactccatggggtcctacgagtacgtcatggacgaccgcgcctcgctccgcgtggcgatcaagccggagcccaagaagaagcccgcggcctccaagtcgcgccgccgaggcgccatgtcggagtgcgagttgggcgcgtccaagcgcggggagacctcgctccgcctgccattcccagcaacggtgcccaagcagcagcagcagtccgactccgacgcgaccatggcgaagctcgccaaggacagcttctcggtgtcgaagatctggatggtgccgtcgtccaaggaagaccccgacgcggccggcgagaggcgcacggtgtcgttccggtggccggtgaggagcaaggacgagggagacggcaggaaccggaagagcgggagcgaggccgactgggacgtggaggccgggagcggcggcggcggcaacagcgccgcgtcgtcgctggcggaggagaggccctccttcgccaggaggaccctgctctgggtcgtcggaggccggcaacagagcagagtcgggagctgttcatgatcggcgcaccactgtttgaagacacacaaaacacacacaaaacaaaggcaaaggaattcttttgtgctcttttggcacattggtaagtgcgagtagtgattgcaatagctagaaatttgtaaaacaggaaagactctgaaaaaatttctttctttcgc

SEQ ID NO: 3199 - DNA, 1129 bp, Zea mays
  Clone ID: 700243467_FLI
atcgtacgtagagaggcgtagagctagcaagctgtagctagctaggagctagcgatcgagctcaattcgttttcagtcgagctcgtcggcaatcgacgatcagtagtccgttaggacaacaatccatggcgaacgcgggcatgaggccggtggccggcctcctcctggtgctcaacttctgcatgtacatcatcgtggcggcggtgggcggctgggccatcaaccacgccatcaactacggcttcttcatcggcgccggcctgcagctcccggctcacttctccccgatctacttccccgtcggaaacgcggcgaccgggttcttcgtcatcttcgccgtgatcgccggggtcgtcggcgcggcctcggcgctcgcggggttccaccacgtccgcgcctggaacgccgagagcctgccggcggcggcctccgccgggttcattgcctggacgctcaccctgctcgccatggggttggcggtgaaggagattgaactgcacggcaggaatgccaggctgatatgcatggagtccttcaccatcatcctgtcagcgacgcagctcttctacctgctcgccatatacggaggcttgagatgaaatcatcatactggatggaggaagagactgcattggaatgaagatttgtcgtttccgtacgtatcgaattgagctggtgtgcatcggtttcacgggacagagtgtggctttcctcgtgttttcgttgtgggtttcttccaagctgctgaggcagtacgtatatgtgtatctgtttgtgtgtatttctgtgtgttaattacgtacggagctaaatgcatcggtgaagtctaaacttgtaaggttttatttggatactttagtatttgtcctaatacatatcctaatccacctcaatccatgtgtattaggatatatactataatatccaaacaagccttagaggataccacttagacttaccgtctttgtaaatatatttctgttctctaaatttattttatggtgcgccacacatatctaaactagtaaaatggtgtgtcctagttccatttccgaaccataacgaccattgtggtacaccacttcatgattttagggacattggaatatgttttcaaagctcatggcat

SEQ ID NO: 3200 - DNA, 989 bp, Zea mays
  Clone ID: 700243474_FLI
ggcggcaatgacgccagaggaggcggagttcatgcagctcctggaggctgagctcgacaaattcaactcttttttcgtcgagaaggaggaggagtacatcatccgtcagaaggagctgcaggaccgggtggccagggcggccgggcgggaatccaaggaggagctcatgcgggtgcgcaaggagatcgtcgacttccacggcgagatggtgctgctcgagaactacagcgccctcaactacacaggattggttaagattctcaagaaatatgacaagagaactggagccctgatccggctgcctttcattcagaaagttcttcagcagcctttcttcaccactgatctcctgtataagcttgtgaagcagtgtgaagccatgctggagcagctccttccggttagtgaggcatctgtctcaagtgaagatggaaaaggagactctaatgatgaagagaagctggcgaagccaagttcttccttggtaaatggtggtggcatgccagagttagatgagatcgagtacatggagagtatgtacatgaagagcaccgtcgcggcccttaggtcactgaaggagatccggggcaagagctctactgtcagtatgttctcgttgccacctcttcagggcaacaatgcacaggacagctaccagatccgggcagagcaactagatgaggagccggagaggtggagcaaagtaacggtgatagagcaggcggccaaatgacagacttaatgggcaaaacatctgatggctgaacttaaaaattttagacttggacatttgctggagatgggactgggatcccaatctcccattcagaaatttgtatgaattcaggattcctaacagctgcaaaatggtggacatgttaaatcatagaattcccagcacaaccatcggacagaattgggctgattttattcactactgtgaattgatcatgtgtttttactgatatacaaccttatgattcgatgtt

SEQ ID NO: 3201 - DNA, 830 bp, Zea mays
  Clone ID: 700243475_FLI
gggaccttcagcactactggtgcacttgaggctgcatatacccaggcaactggcaagcccatctctctctctgagcaacagcttattgactgtggttttgcattcaacaatttcggatgcaacggaggccttccatcccaggcctttgaatacatcaaatacaatggtggccttgacactgaggaatcttacccttaccaaggtgtcaatggaatctgcaagtttaagaatgagaatgttggagtcaaggttttggactcggttaacatcaccctgggtgctgaggatgaactgaaggatgctgttggtctggttcgcccagttagtgttgccttcgaggtgatcactggtttcaggctgtacaagagcggagtttacactagcgaccattgtggaactacaccgatggatgtgaaccacgctgttctggctgttggctacggtgtcgaagatggtgtaccctactggctcatcaagaactcatggggcgctgactggggtgatgagggttacttcaagatggaaatgggcaagaacatgtgcggtgttgctacgtgtgcatcctaccttattgtcgcatgaggcccttacgaagtgttacatggtctgtttggcatcaataatgcatgtttaacctgagcttggcgatgggttatacagaacggaaactctgtttgtgaatagaaaatcatgaagggaaggagttgaccggacccctgcttgtacgtctccccgactgtgtaggtagattgtcagttggggttccgaagtactctactcatacgtgtgtatgacagtttatttatgaaacaaaatacgcattgatcgtt

SEQ ID NO: 3202 - DNA, 832 bp, Zea mays
  Clone ID: 700243481_FLI
ggacccgttccgggtgcccaccaaggacaacatccggatggcgatgcagtggctggtgcaggggtgcagcagcggcgactccctggtgttccacttctctgggctgggcgcgcaggtcgccgacgcggactgcgacgagcaggacgggtacgacgaggccatctgcccggtggactcgttccagaagggccccatcctggacgacgagatcaacgagaccatcgtccggccgctggtgcccggcgccaagctccacgccgtcgtcgacgcgtgccacagcgattccgtcctcgacctccccttcctctgcaacatgtccaggaccgggaactggcagtgggaggatcaccgtccaccgtcgggcgtctgcaagggcacgagcggcggccaggcggtgcttatcagcggctacagcgacggcaaaagcaagttcagcatgacgccggaggcctgcgcggcggtgggggccatgacccacagcttcatcaaggcggtggaatgcgagccccagggggtcacctacggccgcctgctcacctccatgaaagccatcatgaccaacgccggcggctgcaaccagcagctgcagggcgcctgcgcacccgcccgcaaggtcgtcaacttcagcggcgtgcaggaacctaacctgtcttgctcggaaatgttcgacgtctaccgcaagccctttgcgctgtgaacctcctctgcattgccattgcctttgcagactaccacagattcccgtctggactctatatataaattcccgtgacggaataataaaccagacggatttatattatatatgatgatatgtcataatgtgtgcctt

SEQ ID NO: 3203 - DNA, 825 bp, Zea mays
  Clone ID: 700243517_FLI
aagggcggcgctctggaccccgccggcctggtggccatcgccatcgcccatgcgttcgcgctcttcgtcggcgtctccatggccgccaacatctccggcggccacctgaaccccgccgtcaccttcggcctcgccgtcggcggccacatcaccatcctcaccggcatcctctactgggttgcccagcttctcggcgcttccgtggcgtgctttctcctgcagtacgtcacacacggacaggctatcccgacgcacggcgtctccgggatcagcgagatcgagggcgtggtgatggagatcgtgatcaccttcgcgctggtgtacaccgtgtacgccaccgcggccgacccgaagaaggggtccctgggcaccatcgcgcccatggccatcggcttcatcgtcggcgccaacatcctggccgccggccccttcagcggcggctccatgaacccggcccgctccttcggccccgccgtggcggccggcaacttcgccggcaactgggtgtactgggtcggccccctcgtcggcggtggcctggcggggctcgtctacggcgacgtcttcatcgcctcctaccagccggtcggccagcaggagtacccatgaaagtccggagctagcccgatcgatccgtctgtgttgatttcaccatcgtcgtcgtcgtgtcatctggcgcttcgtgctgtaatcatgtttggtcctgtttgcatttcccaacgtctggttttcatttccattcaccaacggtgccaagatgccgtactgtaagcgagagaagtgttcggtctgtatctgtataaatgcaatgcacagttcggcgtt

SEQ ID NO: 3204 - DNA, 833 bp, Zea mays
  Clone ID: 700243529_FLI
ccatttacatatatgcccttgccccggttcctttccccggccccaactccattatttgcttgatccttgacgagcgggagagagagagagaggaagacgagaggcagcgaaggaaacagtagttcttcagttaggcaggagggcacaggaggaggaagatggcgtcgaagaggatccagaaggagctcaaggatcttcagaaggaccctcccacctcgtgcagtgcaggtcctgttggtgaagatatattccactggcaggcaacaataatgggtccatctgatagcccatattctggtggagttttcctagttacaatccattttcctcccgattatcctttcaaaccaccaaaggtggcattccgcaccaaggtgttccatccaaacatcaacagcaacgggagcatctgccttgacatcctgaaggaccagtggagcccggcgctaaccatctccaaggtgctgctgtccatctgctccctgctgaccgatccgaaccccgacgatcctctggtccccgagatagcgcacatgtacaagacggaccggaacaagtacgagaacaccgcgaggacctggacccagaggtacgccatgtagggagggggtaccctacctggccctttgggggtccgccggaattgccgctgctgcgttgtgttcctggacctggacctggactggagactggacgtgtctccgtgtattcgatcctgtgctgtataatgatgcatcagattgggtttgcagtgcagtgcgccgtgtggtgctgaatgctgtattgtgccgcttggaggctgtaattctgaatgccaaaaaactggtgattgg

SEQ ID NO: 3205 - DNA, 1366 bp, Zea mays
  Clone ID: 700243546_FLI
ccgacagcgaagacctttgccgtttttattcttcctccgtctctgcctgtacagcggcggcttggccacctctgagcctcaagccctcaacctccctcttcggcgcgtaacgtcagtcctcaggtattggcagcataaagtgttagatttgtccttgattgaggtaccccttcaaaggtcaagatgttgtggcgcgcagtacgcagtatggatgtaataatgcattcttcgagtttccttcttccgaaactgtatcaacctgtcaacaaaccagtcaagaactatgctttagttgttctaaaccagcatcttccacgattcatgcctcgactctgggatcatgcaaacttgaggatctgcgctgatggaggagctaatcatatttttgatgagatgtatcagataaccaatgatgaagacaaaaaaagcaccagaaataagtatgttccagaaataattgaaggggacatggattctataagacctgaagtaaaactgttctactctagtcagggatccaaaatttctgataagtcacataaccaggagacaacagatctacacaaatgtatttctcgaatccatcattgtacgcctgatgatgaaaaaccaaatctctgtgtacttgttactggagcactaggtggaaggtttgatcacgaggcggcaaatatcaatgttctgtatctgttttcggacatgaggattgtcctcctatcagacgattgcttgatccgacttcttccaagaacacatcgccatgagctttatattgagtcgtctgttgaaggaccccattgtgggcttttccctgttggagcaccatcaacaagcacaacaactactggcctgaaatggaatctaagtgaatcaaagatgagatttgggagcatgataagcacatccaacattgtgcagtcggagaaagtaactgtagaatctgatgcagatctcttgtggacaatttctctgcgaaatctgacataagcagttcctagtttgttatcttttttcttctctttcctgtcaagtggcaaccaagctcttgtacagccacttttgtgtttatgagttgtgtgtctggtaaataaataccatctgatgacaaatcgatgaggtctcatcattagacaggatgtctaccacgatcttgaactgctgatgaattatgtgaataacacgagcaggcatgatggttgtatcctctctagttgtataactgtattgttgtacttgcaacggggtttcttgtataaaattgttctcaacagttcacactgtatggttggattttgtaatgagtctggcaattgggtacagtgatatatgctaatccatctgttctaatgtaagacattttagattt

SEQ ID NO: 3206 - DNA, 1161 bp, Zea mays
  Clone ID: 700243548_FLI
gctagtacgatttcttctctcctccaaaccggccaagccaccaaccagcgccccccaccgccgcctttttatttcatccacgctgctcgtgctcgctgcctgcttctcgcgcgatcgtctcggcctctcgggattctagagtggcggccggctctccgcctgttcttgtcgtcgctgctcctttcccaggatgtcggaacgttctgagagcgcaactgaaaagattatgagcagcatcatggataccattgctgacaaccttcctaagcagaagtctgggaaatttgatccaggttcagtctctgacaaagtgaagaataagctgtttggtcgtcagaagaccttgcatggagttctgggtggtggaaaacctgctgatgtgctgttatggaggaacaaaaagatatcatcgagtgttctggctcttgcaacagctatttgggttttctttgagtggctcgactaccacttactgacaattgtttcatttgcccttgttcttggaatggttgtccagtttgtttggtccaacttctcaaacatgctaagcagcggatcccgttctcaggtgccccgagttgaattgcctgatgagttatttgtgaacattgccgttgcaatcggtgcccaaataaacaagttcctgtgcttccttcaggatgtttcttgtgaaagaaacttgaagcattttgtagtggcgatcgcaggactgtgggctgctgcggtgattggaagttggtgcaatttcctgactgtcatatatgtcgggtttgtttgtgttcacacgcttccggtgctctatgagaagtacgaagaccaagtggacgatttcctctacagccttcttggtctgctgcgagatcaatatcagaagctcgaccaaggcgtcttgagcaagattcccaaggggaacatgaaggctaagaagaacgagtagtttagcaggtggtttctcgtgaatgagatcaatatcgttttgacttgtgtcgattattacctaaggcgtgtgtgccattctgaacctggctgctagttcatcgcccgccgggggtttaaactactaagctgcaatgcacaagtaatgaagtgtgctagttcattgcccacacgggtactagttcttcgactcatttaaatttctgatccgatcatttgcgggat

SEQ ID NO: 3207 - DNA, 1271 bp, Zea mays
  Clone ID: 700243577_FLI
agcagtatcagcgtatcatatggagctcagccccaacaacagcacggaccagagcttgctcgatgcgcagctcgagctctggcacaccaccttcgcgttcatgaagtccatggcgctcaagtccgcaatacacctccgaattgccgatgccatccacctccatggcggtgccgccagcctatcccagatactaagcaaggtccatctccacccgtccagagtttccagcctccgtcgcctgatgcgcgtgctaacaaccaccaatgtcttcggcacccagcagccggctggtggcagtgacgacgacagtgagcccgtctacactctcactccagtgtctcgcctcctcatcgcctcacagtcgtcgcagctggcccagactccgttggcggccatggtgctcgatccaaccatcgtctcccccttcttcgagctcgccgcgtggttccagcacgagctcccagacccgtgcatcttcaagcacacgcacggccgaggcatctgggagttgaccaaagatgacgcgaccttcgacgccctagtcaacgacgggttggcttccgacagccagctcatcgtcgacgttgccatcaagcagagcgcagaggtcttccaggggataagctcgctcgtcgacgtcggtgggggcatcggtgcggcggcccaagccatctcaaaggcgttcccgcacgtcaagtgtagcgtgctggaccttgcccacgtcgttgcgaaggctccaactcacacggacgtgcaatttatcgctggcgacatgtttgagagcattccaccagcagacgccgtactgttgaagtcggtcttgcatgattgggaccatgacgactgcgtgaagatactgaagaattgcaaaaaggctattcctccaagagaagccggtggaaaggtgataataataaacatggtagttggagctgggccatctgacatgaagcacaaagagatgcaggccatattcgatgtctatatcatgttcatcaatggcatggaacgagatgagcaggagtggagcaagattttctccgaagctggatatagcgattacagaataataccggtcttaggtgttcggtctataatcgaggtctatccataaccatttgtgtaagatggttcatatatagtggcatggatcggagcttgtgtggtgtggacatgtaatctaaataagtgggtaccccgctgtgatgctgatctatatcgtgctctctgtcgagatatctattcagtaaacgtatattctatatgcacct

SEQ ID NO: 3208 - DNA, 683 bp, Zea mays
  Clone ID: 700243602_FLI
cggcgcgcggcgaggaaggcggagtccggcggctgacggagggcgagtggatcgacacgatgcccagctggtccccggacgggagtctgatcgcgttctcgtcgaaccgtcacgacccggcgaacccggccgtgttcagcatctacctggtgcggcccgacggctccgggctgcgccgcgtgtacgtggccggggcggagggcagcgcggaggcggacaaggagcggatcaaccacgtgtgcttcagcccggactcgcagtggctgctgttcacggccaacctgggcagcgtcgtggcggagcccatctcggggcccaatcagttccagccgtacggggacctgtacgtgtgccgcctcgacggatcggacctgcgccgcctcacctgcaacgcctacgagaacggcacgccggtgtgggggccagcaagcgccgggctcgggctggagtcgctgtccatgggcccgcccgccggggaggacgccttgggccagttcgacgagccgctgtggcttacctgcgacgtctgatggtccttttgtaattaataatgtaagaataatgacgctgcattgctgttgaggacggccttttgtttgtttcgttgctgaataaaaaaggacgtgctgtacgttcaaaaaaaagagagaaggaataaagaggtgtttgcttgtgtggactcc

SEQ ID NO: 3209 - DNA, 1381 bp, Zea mays
  Clone ID: 700243659_FLI
gtccaagttcgtggttagtgattacgaccagcaagtcacaagtgagggcgggagaggttgaggttgaggaagagcagaggaatccattccaggagtgtttaatggcgggaggcaaggaagcgcacgggtgggcagccagggatgtctctggtcacctctccccttaccacttctcacggagggttcagagagacgacgacgtcaccatcaaggtgctcttctgcgggctttgccacactgacctccacgtcatcaagaacgagtttggcaacgccaagtaccccgtcgttcccgggcacgagatcgtcggcgtcgtcaccgacgtcggctccggcgtcacaagcttcaagcccggcgacacggtgggcgtgggctacttcgtcgactcctgccgcagctgcgacagctgcagcaaggggtacgagagctactgcccgcagctcgtggagacgtccaacggcgtgagcctggacgacgatgacggcggcgccaccaccaagggcggcttctccgacgccctcgtcgtccaccagcgctacgtggtgcgggtcccggccagcctgccgcccgccggggccgcgccgctgctgtgcgccggcgtcaccgtgttcagccccatggtgcagtacggcctgaacgcgccggggaagcacctgggcgtcgtcggcctcggcggcctcggccacctggccgtccgcttcggcaaggcgttcgggatgaaggtcaccgtcatcagcacgtcgctgggcaagcgggacgaggccctcggccgcctcggtgccgacgcgttcctggtcagccgcgaccccgagcagatgagggcggcggcgggcaccttggacggcgtcatcgacacggtgtcggccgaccaccctgtcgtgccgctgctggacctgctcaagccgatgggccagatggtcgtcgtcggcctgcccaccaagccgctccaggtgcctgccttcagcctcgtcgccggcgggaagcgcgtggccgggagtgccggcggcggcgtcggggagtgccaggccatgctcgactttgccggcgagcacgggatcaccgcggatgtggaggtcgtcgggatggactacgtcaataccgccatccagcgcctagagaggaacgatgtcaggtaccgcttcgttgtcgacgtcgcgggcagcaagattggaggctaggcatcaccattcctagtgttctgtcgatcgacgtgtgatttgcttcttcctcgagcgtgtcttattgttctggttggagcacgtatgcggccatcacacgcaggcgtggacaataaacaaggtagagtttcgggttgtgtcgtttctggatgtatggtgccggtggataataaacaagcttaattggcgtggtcgacccccgg

SEQ ID NO: 3210 - DNA, 861 bp, Zea mays
  Clone ID: 700243667_FLI
gcacgctcaagatcaacgcgctggcgcggcagatcctcatcaacggcgacggcgtcatcgagtccgggttcacccctggccgctactgcatggagatgagctcgttcgcgtaccgggagctctggcggctagaccaggagggcctccctgccgatctcatcagaaggtacacaaatcaactggaacatctatgaagttgtagtgcttcgtgcaatgcagtgcatggaaaactggaaatacgagccgcattcaggctgacatggtgttcccttgtcacagaggaatggccgtggaggacccgacgcagccgcacggtctccggctgctcatcgaggactacccgtacgccaccgacgggttgctgctctggtcggccatcaggcggtggtgcgacgcctacgtggccatgtactacccgtccgacgagtccgtgcagggcgacaccgagctgcagtcgtggtacagggaggccgtgcacacggggcacgcggacaagcgcgacgcgccgtggtggccgcgcctgtcgacgcccgcggacctggcgtcgctgctgacgacgctgctgtggctcacctcggcgcagcacgcggcgctcaacttcgggcagtacccgctgggcggctacatcccgaaccggccgccgctgatgcggcggctggtgcccgccgagggcgacccggagtacgcgcacctggtggccgacccgcaccgcttcttcctgtcggcgctgcccagcctgacgcagaccaccacgttcatgaccgtcatcgacacgctgtccacgcactccgccgacgagcagtacctcggggagcggcctgatgaggcgtggacggccgacccggcggcgttggcggccgc

SEQ ID NO: 3211 - DNA, 1010 bp, Zea mays
  Clone ID: 700243695_FLI
aggatgaccaagtatacgaggaacaaaaaaagttcatcttctcacagtagttccagattcaaaagagtttccagaaaggagatgtcatttgcagtggagaaatacgcatggacaaatgcaacttgtccagtatgcatggaattcccacacagcgctgttcttctactctgttcgtcacatggcaatggctgccgtccatatatttgtgcgtccagctaccagcactcaaattgtcttgatcagcttgtaatgtcatgcagaaaagaagcctctgaggacccagatgcaatagagcttatgtgtcccctatgccgtggcgaggtcaagggatataccttggttgagcctgctcggaagcagctgaatcgcaagaggaggagctgcatggaagacggctgttcgtacatgggcacatacagagagctctgcaagcatgtccaaaagaagcaccctactgcaaacccacgagctgtggaccccttgcatgcttacagatggaagcggcttctatttcgaagttcattgcatgatatgatttgttcaactacttcagaggctatgcgaaggttttgttctcacatgctgcagattgaggaggttgtggctgctttgcgagagggtggtgatcatcgtggcgctaccgatgacgatccactgatccatgatctcttgacctctcgctgaaatgtgagaacctgtgttgatcctgcaggcaatctttgcatgaatccccaacttggcacccctgccggttcacaatttctgacccgacaaagcaaactagtcttcatctgtcctcaatgaaacagactgttaaagctttgatggatttattcattcacagtgataatggctggttgaatggcacggggcttttttttctactcatctagcctctagtgtgtcatgcgatgcactgttcctgtgcaccctcccactgtatgactatgacataactgtttcttatggaacgcaatgtgttcctgttcataaaacgaaatcttgccccc

SEQ ID NO: 3212 - DNA, 1013 bp, Zea mays
  Clone ID: 700243723_FLI
gatcagactagcgagccaagccaccgacggccgacgtcgagcctccgcggccgagcctccgcctagcaccaactccgtcgtcgatcgtcctatgcgaccacgcccccgtccgccttccgtctcctgcctccactgagtcgcgggcgcgacatcggggaacgccaaggctgagcttcgcccagacgcctaccgccctgttatgccccaaaccgccgtgctgaggtccgcccaggccgggccaggagcttctcccggcagacccacccccgcccaacggagctccatgcctccgcccagggccattgtccgagctacgccccacgctcctgtccagtgccctggccacttagatggttctgctcagtcatggtatttttagtgtctggttcaacaacttcaacttcaaccaagggacgcatctatcacaagacgtatggttgccaaatgaatataagtgacatggagattgtgctttctatcatgaaaaatgaagtgatacgggtctgccatctctatatgacatttggctgtaaatggattatgatcatagttgaataagttggagcgtcaggtcaatggtccccccaataattaaactagatggtggagtggagtgtgacggaacctcccaagtaactaggcccacctacagttgtccttgtctaacagacatcagacaccctgtagatgttcctaagtcacttgacaagctcggtatctttccttacctcaccaggaacgtttcacccgtcttgcagacattacagaacatcggagataaagaaatgcggaagcaattacataatcttacatttatttcaaaagcaagcttgagttattttattacagaccagaactaaaagtgagtgcagagtagtaatattatacaaaccaagggaggcacagactcttcccgataagttataagcaaaagatcctaagtggaggaccgagtcctcccgcacttcagtcttgtttttcctcatttggtaccaccttggagcaaaagcaac

SEQ ID NO: 3213 - DNA, 582 bp, Zea mays
  Clone ID: 700243762_FLI
cacaactgacgcgagcccaggggcattccagaggtctggagctccacggtggagcccgcagatgcctgattcctcggacggcaggcgttcgtcttccagcaggcgccactcatctaaccccaagaactacgagtctaccattaggggcatgcagggcctaaactttgatggcgatgacagggtgcactattagcatctcatctgtctgggagggtgcatcgcctcccctccccatagatggatgtaccaaggacggccagataataagaggtttgggtgagtgagcccgagcagtccgggtgacgtctcgtaggaactgtgtatgctgcttagcctctgttgttgtacaggcttgtcatttgtttggtctgcgcttaccggtagggcgcgccttgtccggtgaacgatgatggtgtattatgagagggatttcttaaggggttcacgtttggtgtgcttgggttgctttgatagaaacatttgggagaggtttatcgcgcctgctctgctctctcatgtaactccagattgctgagctggcacctgctctgctctctcatgtaatgtaactccagattcctg

SEQ ID NO: 3214 - DNA, 1269 bp, Zea mays
  Clone ID: 700243771_FLI
gtttgaattataaatatgcaacatataaatctcgtaccgaataacacattcctgacgaatgaactctctcctatgtagagagaatatctcctagatgagattatagttccttgatgggacttttcctgaagaaataaagtctgtgttaaacatcaaagtttgataatccctataaagggataaagacccatatagacccgaaaaggaataagatgaggtaccaaaggacttgaagttcaccgaataagcacatgtgcattccatgagttttactcatggtaatttccactagatgtggaattatggtatcctctaaagccctgatggcagaaacctataaggtttaggtgttactggcaaaatatccccattgtgccagaatgacagactataacgatgtatctcatcgatgaaaaatccctgatggattacgatctttgatttacttttgttacaccatcatagatgttgcaatggatgaacgcctggagcgatgtgtcataattagaatatgtactattgcaactatattatcccctaagtcctattgaaggacatgttatttgctttgcacaactatgtataaattgtggtgtgagatagaaaatgatagcaccccaacctcatccattctcgttattccagatgaacaatgagacatataacttgaagaatatgcttgagttataagggataacgactttgacagatgtcatcgtcaggggagcgaatgcttatattgatcacaatcgtgagacaataaatgtcatattctatgccctgaaggcgtgagcttgatgatcaatatgtgaacctttatggaactttctatcaaatatatagatccaatcgatcgaacaccattagtcaaagtggcttatttatattgatacgtgcacttgcctcgtatatcctagaagtgagtagaggtaaagttcctgaaatagtccttgcaaggatatgcactccgtttgctaaatctttatgtacatatacttccagaagaagatgttttgccttattgatacaattttgcaaggatcagagggagcacatttctaaagttagcccttgtagaagattcgatagaatctagatcccagaggattgaaatttgtcccgatgacagctgttgtactctttttcccttggtgagttttcttgaagtttctcacatgagagttttaacgaggcaacaaagtacaaatgcaatttgcgtcaccatgtactctttctccatattttttccactgggtttttgggagtttt

SEQ ID NO: 3215 - DNA, 581 bp, Zea mays
  Clone ID: 700243794_FLI
ctcagaattacacaatataaaattattgtctgaattatgtaaacgatagcgacgacaaatccctttcatcaactacaaaagaaccacctgcttcatgacaacaaagaatttataaaagctgctgctgaattaatctctcttccttctcaaaaaagagctatatctatggggcctaggcaggacccaatcatactttctttttcactccagtgccgaagtgatggcacatctacttggccttgccatttgcggcggcaggggtcgacgggttcagctcatcccaggcctcgatccaggtgaccatggcgtcaccgagcttgacaaagtaggggtcaatcgtgcccagcttctccttcacttgtccagagaggtagatgtagcacttttggacggtgtcgcagtccttggggatggtcacgttctggaagaaggggatgatgtcctcctgccagaagatgcccttgtattccttcttcaagttaacgaaggtcatctgcgaccacctgagcctgggagtcaagactggcctgccatacatctggcacagcaaggctagcaaccccttcaagttaacgaagggg

SEQ ID NO: 3216 - DNA, 1053 bp, Zea mays
  Clone ID: 700243806_FLI
ctcactccggttcgtacctcgcacaggggcggcggcaaggcagctctgaggggatctcggcggcgacgacgcggcgacagcgaccgccgggctcgaggattcgcacggagtgaacaaggctgagcgtcgcctcattccgacttccgatccccaacggaaagcggagccaggaccgggagctggagcagttgtcttcccccctcgtctccgtcaactggtctttaattctctctttacacatatcttggtatttaattctctcatcaccagcgtaagaaaaaaccatttgaagctaaatttttcaacaagccacttgagaactaccattacatggctgttatatttgggaatcatcaagcaactggactatttgcaaaatgcaccagtgatcccctaggtttcgacacatctgaaagtgcaggtacatatggtgtgggttattctggagacttggctggtcatgagagtaacaatgcaagtccaactcgtgatagtggagaatcattgaacccaagtggtccaattcgtgatggtggagactcatctactcgaagtggtgcaagaaggaagagagggcgcatgatgatggaagatgaggatccattgatatgcactgtcactgaagcttttaagactctttcagatgcaatcaagcagtcagcaccacaaccacgtccgataatcccacccaacctatggactatgatgaaacagattcctgtttttgaaagagaacatatagcacactactatggctacttgtgtgagaatccagcccttgcttatgcctttctagagatgggactagatgatcaaatggtatgggtgtctaggtacatcaagactcatctttctgattgatgcatcaaaaaagcagattagcctaaaacttgtgtctgaaactttttagttatttctatgatggatggagtctatgaaacttatctttgaacattgatatggatgttggataacttctcaattttatttgtatgctggataatgttgaatatgtatgttggataaattctcagtttttaatgtatgttggat

SEQ ID NO: 3217 - DNA, 1044 bp, Zea mays
  Clone ID: 700243829_FLI
atgagtggaacttttggtgcaaactctggtttcatcagtaactccaatgggaggcaaatgggttcatacttcaatggaagttcgaatagattgagtagttctattgggtatcttggttatgactcaggatcgatgttgagttccatgtctaggaattttaatgcaggtgtaaactacccgatcaatcctacaaacatgagtgcttttgctgcccttggaaatgggggtggcgtcaattatatgggtctcccttctattgcccctgagttggcccagttgggcaacatttcaagccttgggtcagggaactttagccgtggagctggagttaataacttaagcttaccttctggctcctatgggaggagcaattcaactggtacaattggtgaacctttttctgcatcaggcaatgcatatgaagtgaacaacccagatacatatgggaacaactctatttatggtggaacatcctggaggttcccttcatctgaagttgacgtgccttctttcagtcatgatcttggaaatgttgatccgaatatgaaatcagacatatcagcaaattacatgggaaattattctgttagcaacaatcagccaagcagaggtatcacttcatagtgggagtattactacacattcatatatgacttgggatagatgaagcacccattcagtcaggcagccaggtgcgtgcatggcactgtgaatgggtgatatgtcaggttagttttgtctagctgaccagcggtgtggtttacaacaccaacatgctagagggggaggaagcggatacagaaacattttctgaggggcttcttttctttgagtcatgtttttagttttgattcctgcgcgtggctagctccttttggtttttgaatgagatgtgtagtggtgattattgcggcgcatattttagagatcgtggttcttccaacataagctggaaaaagaagtctgtatacggatgaacatgtataccaaccaaagggatgctgtattatcttgcccatttgttactacattagcctgtgtttt

SEQ ID NO: 3218 - DNA, 918 bp, Zea mays
  Clone ID: 700243853_FLI
tagggttttgctgctctccgaccccgagctccgaaggccgcagcatcaggcgcggcccccctcgcgtgtgaccgagatggcgctgccgaatcaggggaccgttgattaccccagcttcaagctcgtcatcgtcggcgatggtggaactggtaaaactacatttgtgaagaggcatctcactggagagtttgagaagaaatatgaaccaaccattggtgtggaagttcatccgttggatttcaccactaactgtggtaagatcaggttctactgctgggataccgcagggcaagagaagtttggtggcctcagggatggatactatatccatggccagtgtgcgatcatcatgtttgatgtaacttcaaggcttacttacaagaatgttcctacgtggcatagggacctgtgcagggtctgtgaaaacatccccattgtcctctgcggtaataaggttgatgtgaagaacaggcaggtcaaagccaagcaggttactttccacaggaagaagaatctgcagtactatgaaatttctgccaagagcaactacaactttgagaaacctttcctgtaccttgcaaggaagctggctggtgatccgaaccttcactttgttgaagctgttgctcttaagcctccggaagttaccatcgacatggctatgcagcagcagcatgaagctgagcttgctgcagcagctgcacaacctcttcctgatgacgatgatgatctgattgagtagaaaggatcatgagtcttgaacttgagcaggagttgtgccttgcgtgttttaagttgttctagggtgaactcttgagttctcattgtctggatcatctttttctccttggatgtgttgcatcttttgagtgtggaaatggatggtactcctcgccatgaatttgctggctactttat

SEQ ID NO: 3219 - DNA, 1065 bp, Zea mays
  Clone ID: 700243863_FLI
tgcagcagcatcagctgccacctcctgcctctcctccttccttcctgcctgcataggttgttgctacacgtatatattctgaagaagagatcgagatgaccagcgtgtggaagaccaaggttctgcctggcctcaacaagatctttgacaaggatggcaagaaggctgcagctgcaggcttcttgaagtccttcaacaaggaggagattgacaaggagattgaggacaagaagacagagctggagcccaaggtcgtggaggcctacgaagcatctcctcctgaggtcaaggctctgttcaaggataagaagccagtcaaggtcagcaagaagaactcggctgcagtcaccaagttcctcgatgagctggctaagattgacttccctggagccaaggtggtgagcgaggcggtggccaagtccggcacctcgcccctgcttccggcgatcaccttcatcttggacaaggtcgcaccgtttatccccaaggaggagcccaaggcggagccggcggcggaggccacctcccgggaagtcgccgtggaggagaagaaggaggaggccgagccagctgcagcgacggaggcggcaccggcgccggcagagacaccgtcggaggaggcggtggtagaggagaagaaggaagaagagaagaaggaagaggaggataagccggctgccgaagaggcggcgccgccagcagcagcagctgctgctgaggagaagtgatcctgttgacggatcgagcatgcaaagcgctccctcctcgctcccttgcttgcttgcttgctgctggtaaattaaattaagttgccgtgatacttaagcgtagccgcacggagtgaaaagttattaagtaaaagcagacaaacacttggcatgcatggacattaatttgttattctttgtaccgtcgtcgtctcgatgaaccgcgtgtacatttgtagtgtggggttttctttgttttcgatttgggggtgatcattacaagaatgtgtaattatttatgttcatatgtttgttgatgatggacggacatatttaagaagacaactcttttgtgtat

SEQ ID NO: 3220 - DNA, 1276 bp, Zea mays
  Clone ID: 700243864_FLI
acagtgcagtgctccccgaggtccccaaaagacaagcaggcaagcagcaaagacacgcctccctgcttgcactccccacacgcccagtcgcccacacctccaacagacaaagacaatctagcaagcacacacagcatcaggaggaggagatcgagtaggagcagaagcaaagaatggggagagctccgtgctgcgagaagatggggctcaagagggggccatggacgccggaggaggacaagatcctggtcgcgcacatccagagcttcggccacagcaactggcgcgcgctgcccaagcaagccgggctgctgcggtgcggcaagagctgccggctccggtggatcaactacctgcgcccggacatcaagcgcggcaacttcagcaaggaggaggaggacgccatcatcaccctccacgagcagctcggcaacaggtggtccgccatcgccgccaggctgcccgggcggacggacaacgagatcaagaacgtctggcacacgcacctcaagaagcggctggagcccaccaccaagcagctggagcaggagcagcacggggcgcatgcaggtggtgacgccgccaggaagcgcagcaggcccaagcgcgcgggtgccaggacgaagacgacgacggccgccgtcgccccggccaccaccgcgccggcgtcgcctgaacggtcggcggcctcgtcgtcggtgaccgagtcgacggagcaggagcagggaaacacggggacgagctcgcccgggttccccaaggaggagagcttcacctcgtcctcggaggccgccgaggagttccagttcgacgacacgttctggtcggagacgctgtccatgccgctggacagcttcgacgacgtccccacggagccctgcagctccggcgcgttcggcgacgtggccgcctcctcctcctcctcgtccgttggcgccgacgccgacttggactactggctcggagtgttcatgaagtccggcgacgcgcaccaacaactgccgcaggtttagagcgcgcacgcgcgcccgagaattttcagttccctggctaattgattcatcgttctttctctctccctgcacgtcttgcaatcggaattcggaggggacagtcacaatagcagctaattaatagaggggtgtgtgtgttgaggaccacgacgagattaggaagaaacaacgcgacatgccattgcatctatctcttgtttgccttcttgtatataaagatcgatcgatcgacaagatatcggtgatcgaaacctatatatgct

SEQ ID NO: 3221 - DNA, 1100 bp, Zea mays
  Clone ID: 700243918_FLI
gtcgcccgccgcaaggcgctccacggtggcaacttccagggcactcccgtcggggtgtccatggacaatactcgtctggccgtcgctgccatcggcaagctcatgttcgcgcagttctccgagcttgtcagtagcttctacagcaatggccttccctccaacctgtccggcgggcgcaacccgagcttggactacggtttcaatggcgctgaggtcgccatggcgtcctactgctctgagctccagttcctcgccaaccctgtgacaaaccatgtgcagacagcggagcagcacaaccagagcgtcaactctctcggcctcatctcctccaggatgaccgccgaggccgtcaccatcctgaagctcatgtcctccactttcctgatcgcactgtgccaggccgtcgacctgcgccaactcgaggagagcatcaaggccgctgttaagaagtgtgtgtcgcatgtcgccaaaaaatccctggccatcgacgaccacgacctgctcgtcgctattgaccgcgtggcggtgttcacgtacgcagaagacccgtgcagacccagctatccactgatgcagaagctccgcgcggtgctcatggagcatgcgctcatcaatggtgacagcaacaccgagcgacctatggagacctccatcctggccaaggtggctgagttcgagaagcagctcagcgcagtgctaccggacgaggtggaggccgcacgagcggctgtggagagtggcacgaccccgaacaggattaccgagtgccgttcgtacccgctgtacaggttcgtgcgcgaggagctcggcgccgagtacctgaccggcgagaagacgcggtcgcccggggaggaggtggacaaggtggtgatcgccatgaaccagcgcaagcacatcgacccactgctgcagtgcctcagcgagtggaaaggcgcgcccctgccaattatctgaactacagataagagagaagacaaggtatgacggatgagaaaagaagtactatcctgctactgtacacgaataattcacgcggtgtggcgtgcataaactatactattaccatggccatgtgtcttgacggcacacagttatatttg

SEQ ID NO: 3222 - DNA, 556 bp, Zea mays
  Clone ID: 700243938_FLI
gtgccgcctcaccgcctctctcaatctgataccgcagatccgtcgtccggtgagtggaagccgcacgaacccatggcctccggcgagcttgcctgcacctacgccgctctcatcctcagcgacgatggcatcgccatcaccgccgagaagatcgccacgatcgtgaaggcggccaacatcaaggtcgagtcctactggccggccctcttcgccaagctcctggagaagcgcaacgtcgaggacctcatcctctccgttggatctggtggcggagctgctccagttgctgctgccgcacctgctggtggtgctgcggctgctgctgccccggctgtcgaggagaagaaggaagaggccaaggaggagtctgatgacgacatgggcttcagcctgttcgactgaggagaccccctcacccagccattagcaaatttcacttgtgctgtcaaagactatcttgtcttatgttatgtctctaggcttttgttacaactacccaagttttgagtttttgagatgtggctatggcatgaactcaaaccatcttatgagggtg

SEQ ID NO: 3223 - DNA, 910 bp, Zea mays
  Clone ID: 700243968_FLI
gagcgtaacaagtgtccttcctccgtcttcctcctctgccgactgccctcatccactccactcccaagtccccaccacccccaaccccgtctctccactgcggcgcaggcttcgcttcggctccgctcggctcgagcagaagaaaatgcaacgggcagtgcagaccgtcaggtcacacggcaatgttcttaaatatgctgttctacaacacatcagcgctcccaagccagcaatgcttcctgctgccttttctcgtttcatgtcagtttcatctgctcgcctagaggatcgtggatttgaaactgccactgtagcagatgtcttgaagtctaaagggaagagtgctgatggatcttggctctggtgcaccacagaggatagcgtctatgacgctgtcaaatctatgactcagcacaacgtgggagctttggtggttgtcaaacctggacagaataaatcaatcgctggcattgtcactgagagagattatctccggaaaatcatagtgcagggaaggtcttccaagtcaactaaggttggcgacatcatgactgaagagaacaaactgatcacagtgaatcccgacaccaaggtcctgcaggcaatgcagctcatgacagaaaaccgcgtcagacacatcccggtgatcgacggcacggggatgctggggatggtctccatcggcgacgtcgtgcgcgcggtggtggccgagcacagggaggagctgaaccggctcaatgactacatccagggaggctactaggacggcgtgtgcagcgacgaccccctccgatcccgccagtcagtgaagtccgcctttgaaatccaataactcggaacaatgatgatatgacgaaataggccgtgttttcttggacaatgatgttaagttcggcaaggttttcctttc

SEQ ID NO: 3224 - DNA, 866 bp, Zea mays
  Clone ID: 700243970_FLI
aacaccgtcaccacacggcgcacccaaacatggccgctccgaccaccgccgtcgacaccaccgccccgcctcctcctcctcccacggcagagcccgcggctgcacccgcaccggatcaaaaggtgtctccgcctcctcctgcccctcagcctgataccgctgctcccccgcccgttcccgcgccagcgccgaggaagcggggttgcacacctccgaatgctacaagatccgtgccgtcgtcgccgacctgcgtgtccgcttcgtccaggtttgccaagctactgatttccgcaacacggatgcagctcgtgagattttgaaagaaataaatgtggtcatggatctatccaagaaaatgaggctcaagcttggtgctacttctgagcctgtgaaaccacttgagaaaccttcagctgggtctgtgaaggatgagcttgtgaaaccatcagagaagccttcagctggacctgtgaacgacgagcctgtgaaaccatcggagaagccttctgctggacctgtgaaaaatgaacccactgagccagctccagctggagaaaacaatcaagctcccactgtcggtcagactacagtttctccaaataatgcaggtgttggtgcaccagtagtcaagcatgataattcagaggcgcaaaagtgaaggtgatagaggaaacctgaagtcccgatccattgagatggcatatcgtgcacatctgctcgacaaaaatgtagagtggccggttgatcccctgtgggctcatattatctttcttctactgtaggtaaaattgtttgctttgggctaatcgaagaagagtggtgggcatatcatggtccaaatttggttgtgttcagttgttaacatc

SEQ ID NO: 3225 - DNA, 1346 bp, Zea mays
  Clone ID: 700244001_FLI
atctggtacgccagtggttactctgtgtggttctccaagtaaaccgcagattgagacaaccaatcctaatcaaggtgatgtgggagaagaaagtagagctggaaggtctccagccttgtcgcagccagcttttactgatccgttgggatctgaaaaagggtcacattcaccttctgtagtacatgatcgtaatgagcatcagaaaacacaaggagatgatactcttaaagatgagatattacttcataagagaaaagcagttgcctttaagagagaagggaagatggcagaagctagagaagaattgaaactggcaaaacaattagaaaagcaccttgaaggtgctcaacaagacaccatggatggtgtgggtgactccattactcctgctgtggaacagaacagtttggtccaacaacctgctagctccagcaatcacactgacgacataacttctccccctcctgcacaagcgagcaagcggacgcaacctcagaaagcaatgtccagccgggatcgtctcaaaatccagcgtgaatccctggctcataagcgcaacgccctcaagttgcggagagaaggaaagactgcagaagcagatgcagaatttgaactggccaaggagctagagagccaactggaagagtcagacaaccaaagctcgagctccgggggaaagtcaagtgaaccaaacgacacgagcgtcgagaatctccttgatcctcagatcatgtctgccctaagatccattggttggagtgacatggatttatccatgcaatcctctagtgcacaacctctgaaacctgtgcagtcctcaagttctcaacctccgcaaaaagtggaagccaagtcatctgttgccgcgaccagcaaacctcagagcgagagaagtcaacttgaagaacagatcaaggcggagaaactgaaagcgcttaacttgaagcgggaagggaaacaagcagaggccctggaggcccttcgctcggcaaagcgactggagaaaaagttgaactcagcttgagacaatcacaccctcccagattgctcttgttcttttgtcaattgttcgttttggttacctgacatcccaagcgttccagctagaacagagaatcatatcgagtcctatggccctgattggcacagcttgtgagctttgagcaccataaacttatgtcctgtttgtgttcgagctatgagcagtccgtttcatgtatgtataaataaaatctgatggacggagtttattttcacgaattcatgtatacacaatgttaggggaacgtcaattaagttggaatctgaacatttcatatgttagtcatttgataataatgttttcc

SEQ ID NO: 3226 - DNA, 252 bp, Zea mays
  Clone ID: 700244042_FLI
caaatccctgtgtgctcatacttccctttgaccagtattttgctaccgtggcgatgcgacgcggcctcggcagctctatctccgccacacatagcggtgtgcggcccgctgcgcgcctccttagttctcctgcagcaacggtttatcacacacaccaagcgctccgcacacaagcgcgggtcgcgttgcaggttcgaacgacagttcgtgacgcagcgtggtgactgggttcgtgagcagatgcggacagtg

SEQ ID NO: 3227 - DNA, 1056 bp, Zea mays
  Clone ID: 700244044_FLI
gctgtgctgggactctctatgttgcaaacctgggcgactcgcgtgcagttcttggaaggcttgtgaaagcaactggagaggttctggccactcagttgtcagcggagcacaatgcatgctatgaagaagttagacaagagctgcagtcatcacatcctgatgatccacgtattgtggttctcaaacataacgtttggcgagtgaagggtctcatccagatctcaagatctatcggagatgtatatctaaagaaaccggagtataacagagaacctcttcacagcaagtttcggcttcgagaaaccttccagaagccgattcttagttctgaacctcaaattactgaacaccgaatacagccaaacgatcagtttgttatatttgcttccgatggtctatgggagcacctcagcaatcaggaagctgttgaccttgtccaaagtagtccccgtaatggaatcgctcggagactagtgaaagccgcgatgcaagaagctgccaagaagagggagatgagatactcagacctcaagaagatcgaccgtggcgtgaggaggcatttccacgacgatataaccgtcgtcgtggtgttcctcgactcggatgccatgagcaaagctagctggagcaagagcccctcggtttctctccgagggggcggcgtcacccttcccgccaagtccctcgcacccttctcggctccggcacagttgaacggcacccactgaagctgctactgctcttgaaaagaagggcacagtgcagatctgctagagatgatgagagaagcagcaatcaagtgtagctgttgctcgtacacctgctgtgctgttgctgtttgcaaagctgccgtcttgactccgcctggtaattagtgtactgatagcgaggtatagaaattaggttatttgttagcgacgcaaatcctttctttttttttcttctccctctgttcttatctcttttctcttcatcatggaggaaacaggtggctgtaaatttgtccagaacatgttttccctaatagcccatcatatcccgctctttttcttgttg

SEQ ID NO: 3228 - DNA, 678 bp, Zea mays
  Clone ID: 700244078_FLI
gcatgccctcctcctctcctcttggttcttgcagacaactcgcacctgcaggttgttcctttgtgtccaaaccaagtaaaggcggcaggctcctcacattctcctgccatatctgctgcccgctgctccccccctctctcttcaagctagccagtagctggctgaatggtcctcgcgcgagccatggtgatggagcacaggaagaagtcgaattatcttgttgccctcgtcttggcttcgctcttgctctccgccatggcaggagggcatcggaagaagcttctgaacaaagacgacgcatcagaatcaatggagacattggaatccacgcagcagctgcaggaagacgacgaaatggctgtggtggtccacgagagaattctcaggcaggcgaagatgaacgactacgggagctacgactcttcgccgaccatggctaagcctcacttcaaggacatacctaactagccagccccactagctactatatacattgaggtgttgcttgctagtcgagtcgcctctcctccgtcctcatacacaagcatacttgcctaataaattccatgtatcatcaccatgcatatatgtgagaatatatgtactgccgcttgatgtatatgtgcacagtgcacacactacctacatgtttatatatgtgcatgttcgtcgtcgtcc

SEQ ID NO: 3229 - DNA, 1342 bp, Zea mays
  Clone ID: 700244120_FLI
aggaacagaaataaggtgtacaagaggaacagaaactctttggttggatcgtatatctgcaaaggttactgccttggcaggcaatacaaatttctgggctgttggctgtgaagatggttacctgcaggtttacacaaaatgtggaagacgagccatgccggcaatgatgatgggatctgcagctgtttttatagactgtgatgactgctggaaattgcttcttgtcacaagaagaggtttaatgtatatatgggacctccataacaggacctgcattttgcaggactcattggctgctttggttgcatctccagatgagtcatcagcaaatcatgcaggtgcagtaaaggttatatctgctaaattctcaagatgtggttttcccttagttgtccttgccagccgtcatgcttttctttttgacatgagcatgaagtgctggttaaggattgctgatgattgttttccggcatcaaattttgccagctcatttattttcccccaagctggagagctaggcaagttgcagattgatgtaggcaagtttatggctagaaagcctatatggagcagggttacagatgatggtttgcagacacgtgcccatttagagacccagttggcagcttctttggctttgaagtcaccacaggagtaccgccaatgcctcctatcctacatacggtttctggcaagagaagcagatgaatcccgtctacgtgaggtttgtgagagcttcctaggtcctcccatgggcatgcttggatctgagtcatctacggatcccaaaagtccagcgtgggattctgatgttctcgggatgaagaagcaccaactcctcagggaagacatacttccatcgatggcatctaaccggaaagtccagcgtctgctcaacgagtttatggatctcctatcagagtatgaagctgctaagagcaaagttgacccaatggatatcacaccggcgctaccacaacaagcaccagaagccaatgccaacgtggtcacctcgtagctgcaccagttccgttgatagttccgttgctggcgacttactgacctctcggtaagtatgataggatagcaatcttggtaagtccttatatgaaccaatcaattagttgtgcttgtaactggtagattgtttagcgagggaggcgacctcaggcaaacattgatattgaacccgttagctgtaacgctgtgtaacagtagaagaaagaagctgaggtcgccaggtaatttattgttaaactgtaggaggccgggtaaactcatgcccttcttgttccaagctaccgtatgcagtggtggcccactggccgtgtgtattttggcg

SEQ ID NO: 3230 - DNA, 925 bp, Zea mays
  Clone ID: 700244123_FLI
aagttctcaaagcaaatcacctttacatataatagaaccaagaacagaagaacttggcgatgcgttccaattcccagtcaaaaacatttttttagtcccacaggtgaatgttttctaccactgatgcgatgagaaactgaccacgcaaaacaacaacaaaattaactagaagacagcagagacaatagtagcactagcataccaacaacagattgcataatagcataagtggtaagacccacagaacagacccgatgttctctctctttcctccataagaataaacccagcttagtcgacctcctccatcttgctctcgccagcgtcatcctccagagggggcatgtcggtgtcagcctccggagcctcctcgtcctcgtcgatgctcaggcccagcttgagcatgcggtggatgcggctgccaaaggtgttgggatcgtcgaggctaaagccagaagtgagcagcgccgtctcgaacagcagcatgacaaggtccttaacggacttgtcgttcttgtcagcctcggcacgcggaaaacagttaccgctcattcccaattgccctagttcgggagattgccaaacaactgttggaatgtatagcatttatgcacgaattgtgtctcatacacactgatttaaagcctgagaacattctccttgtttctccggagtacattaaagtgcctgattacaaagtttcatcccgatccccaaaggagggatcctattacaagcgggtgcccaagtctagtgctatcaaggtgattgattttggtagcactacctatgatcaacaggatcagagttatattgtgtcgacgaggcattatcgggctccagaagttatactgggacttggatggagttacccatgtgatatctggagtccgataatgcctcgtcgacacaatataactctgat

SEQ ID NO: 3231 - DNA, 1080 bp, Zea mays
  Clone ID: 700244127_FLI
gtgtgcccgccgtcgacgcagcctccgtcctcccccgcatccgaatcacgcacgccacgtcccacccctgtcatggccacctccagcgacggcggcggcgaccagcggcgcctcctctccatccccaaggaaggcgagcgcatcatcgcgcccacgcgccgccccgacggcacgctccgcaaggccatccgcatccgcgccggttacgtgccccaggaggaggtcgccatctaccagtccaagggcgccctaatgaggaagtcagggcccgacgtgccgccggggtacgacccggcgctagtggccgacgccaaacccaagacgaaggcggccaaacggaacgagcgacggaaggagaaacggcagcagcaggccagtttggcaaatgataaaggaaagagtatgaacatagagggaactgatgctggagaaaccgacaaggtcctttcttccaaaacggataagcagaaggattccgtggaaagtgtaacaaagcagatgagtggcattgctatttctgagtcacatgcaatgccgtccacaaatactataaacaattcgcaaccagaatcatctgctccagacatagacaagaagattcgagcactgaaaaagaagatacgcttagctgaagcacaagtacaaggcgaccctgaaaaattgaaatctgaaacgctggaaaagattaaaaagattgatggatggtgtatggaactgaagcttttggaggacagcagagctcctgcggcctagacaaaatcgacttcggctctgatgtagtagaatagacagtagagccatcgcgaccacaccagggtgctgagctaaattccaaggtgcactgaatcaccctaggcttttccattacctgtgttggttactggaaaaccagtccggtagatgcgggtttgcgcagaacgatggagtgtttttccctgcacatttgatgtctcatgttcgccaccaagtttcaaggtttgtaccacaagatccatttatcagaaagaccacacagtgagataattcaaacgattattgtgacagtgtggttaaactttagtatactatgctaattctggg

SEQ ID NO: 3232 - DNA, 919 bp, Zea mays
  Clone ID: 700244131_FLI
gcgaggcaggagcggcgatccattccacacaaccaccactgctcttgccccagcccgccgcaggagttgccagatctgctccggtcacaggagctccgactccgagccctctccaatggcggttaaggtctacgtcgtgtactattccatgtatggacatgttggcaaactagctgaagagatccagaaaggtgcctcgtctgttgaaggtgttgaagctaaaacatggcaggtccctgaaaccctccctgaggaagtgcttggaaagatgggcgcaccccctaagcctgacgtgccagtcatcacgccgcaagaactcgcagaggccgacggaatcctcttcgggttcccaacgaggttcggaatgatggcagcgcagatgaaggcgttcttcgatgccactggtgggctctggagggagcagagccttgccggcaagcctgccggcgtcttcttctgcactggatcccagggtggtggccaggagacgacagcgttgacagcgatcacccagttgacgcaccacggcatggtgttcgtgcctgtgggctacaccttcggcgccaagctgttcggcatggaccaggttcagggcggcagcccctacggcgccggcacgttcgccgccgacggctcgaggtggccgagcgaggtggagctggagcacgccttccaccaggggaagtacttcgcaggcatcgccaagaagctcaagggttcagcctgatctacacatatacccttgtcggatatcataaaaaacacttattacagattcgtcttacccatcaacagatcggtctgttctctcgtggtgtctggatgttgtgtggctcagtggaactttcatgctacggtgactttgttgtaatctggagttggaatatcgttgtttcgcataaatttcgatgatttgctc

SEQ ID NO: 3233 - DNA, 1238 bp, Zea mays
  Clone ID: 700244149_FLI
accctgtttcctgttgattatggccgaggctctttcagacctcagatgtgtaaaaaaagcgaacaacaattaatttatttaattacgctaactaggattaaaacttgagacttcatagttgcaccaaccgattcaatttgaaaacttaagttgatggagagagatggacaattacctaacaaggtcaaatggggtgctcggctgttgcttttaagctatggcccacagctcatgcagccaaacaaacacggggagcatggctatggtgaaacatacctggttgcacctccccagcctagcccagcgcccaaatctggtctggctcagtccatcctcacgggccgctctcgtgcagcctaccaaacaggcatttatctggtatctgatttttttcttctgcttggacacttctaggcctgatttggatgattttggatctggttctcacatctgagcttgtgggagaacgatcagaatgtttttatggggtcaagtaaagataactttcatggaatgtcaaaaactggagaacagttccttgctggagtgtatcatcaccttccgtcaatattggcatttaccgctcctcacccaaacagctacgaccggattcagccagatacttggagtggagcttatctatgctgggggaaagagaacagggaggctccattaagaaccgcatgcccacctggtgtgcctcttgatttagtcagcaacttcgagatcaaatccttcgatggttgcgcaaatccgcacttgggtcttgctgctatcgtagctgctggcatcgatgggctaagaagacaccttaagttacctgagccaattgaatcaaacccttctgatcactcttcaaaactgaaaaggctaccgcagaacctgcaggaatctgtagaatcgctttctgcagataaggttttgcatgagttaattggtgataaacttgtcacaactgctatagctatacggaaggctgagatcaatcactttgcgaagaatccgggtgcacttaaggatctcatcgaccgttactagggcaaaagaacggaatgagaagctacatcttcttggacgtggcaaggggtttcactgtatgaccaaccgagagactggaagaataaattttgttccaatggttaacttcggattctcatatcctgtgactgaacttttgtgactgaacttttgatacccagtgtttctcttatcaaataataaaggttatttaaattttt

SEQ ID NO: 3234 - DNA, 1581 bp, Zea mays
  Clone ID: 700244181_FLI
accgagaccaagaccaccagcaggactcgcgaggagagcgcgcccggaaagaaaaaaaaaccctagccccgcccgggcctccgcctcgcgatgtcttgcacggtggccatcccgagctcgccagtcttctcgccctcacgccgcccactctcctgcaaggccgcctccgcctcaccggagcccaccgtccccgcctctaccgcggcgcccgcgcccgccgccgccgccggctcgccgctccgccccttcgcgctccgcgcgctgctgcgggaggaggtctccccgtctccgccgccccagccgacctccgccgcagcggtggctttggtaccgagcggggccgcgctgaagcggcggcgaccgacgccgcttgtcgtgccggcgtccggcgccgcggcagctgctgctgcggcggcggcggtggccgctgtggaggcggatccgaggaacgaggtggaggaggaaggggaggagttcgcagcgtactgccggaggggaaagggaaggagaagggtggaaatggaggaccggcatgtggccaaggtcgctctcggcggggacccccaagtggcactgtttggtgtgttcgatggccacggcgggaaaaacgcggcagagttcgccgcggagaacatgcccaagtttatggccgaggagttgacgaaggtaaacggcggagagatcgaaggagcggtgaagaggggttacctcaagacggacgaggagttcctcaagagggacgagagcgggggcgcgtgctgcgtcacagccgtcctccaaaagggtggactggtcgtctccaacgctggagactgccgtgcggtgctcagccgagcagggaaggcagaggcgctcacctctgaccaccgggcgtccagggaggacgagaaggaaaggattgagaatttgggtggatttgtggtgaattaccgtggaacatggcgagtccagggctccctggcagtgtctaggggcattggggatggacacctaaagcagtgggttgtggctgacccagacaccacgacgctcctggttgaccagcagtgcgagttcttgatacttgcttctgatggcctctgggataagatcgacaatcaggaggcggtagaccttgcacgacctctctgcatcaacaatgacaagacctctcgcatggctgcctgcaggatgctcaccgagacatcgatttccaggggctcgactgatgatatcagtgtcgtgatcgtgcagttgcagaaattttcaagctcgtaacctagttggagaagctggaacaaaactctagccagtagcactaacagactggtgataggtagacatgatatgttacttcgctggcgaaagttttcatgagtcagcgctatttggaggggattttaacattcattctttggtgtagagccattcgtcttattattacatcatttaattcattcttggtaagtactgaaataaggggtgatatctcgcttcatgatattttttcactgttagggctagttttggaacactgttttcctaagcgattcggtgaattgcctctgtatattatattcatagattaaaacttaccgtgcc

SEQ ID NO: 3235 - DNA, 932 bp, Zea mays
  Clone ID: 700244194_FLI
gcgaaaacagagcaaatccggcgagccggtgcggcggcggagggagacgcctgctcgagaaggagcattagcaggaggcagcggagatggatccggacgcagtgaagtcgacgctctctaaccttgccttcggcaacgtcatcgccgccgccgcccgcgacctccagaaggaaatggtggctaaagacaaggctcaagcagcacctgcaagccatgatgaagttgatcttgatgagttgatggatgaccctgaacttgagaagttgcacgcggagagaattgctgcccttaagaaagaggttgagaagcgtgaagtgctaaaaaggcaaggtcacggtgaatacagggaggtaattgaaggggacttccttggggaggttactggcagtgaaagagtcatatgtcatttctatcaccgtgaattttaccgttgcaagatcatggataagcatttgaaggcccttgctcctgtctatgtgggaacaaaattcatcaagcttgatgctgaaaatgctccattctttgtagccaaactggcaatcaaaaccttgccatgtgtaatattgttcaagaagggtattgctgttgaccggttagttgggtttcaagatctcggaagtaaagacgatttttcaacaagagcgttggaaaacattctcaagatgaaagggataatcgatgagaagaagaaagatgacgatgatgatgatgaagaaagcgagtctaagaataggaggattagatcttcaactgctcaagattctgactcggactgaacatgagatggggattgaggattcaccctttttgcactttatattttgtctgttctgtactgcaattgatttgtgcgactcatgtatctataccagataaccagaacaaaagcatgtacaagagattcttaacttatctaacttatgaacacgttc

SEQ ID NO: 3236 - DNA, 581 bp, Zea mays
  Clone ID: 700244205_FLI
atgcactgctcagtacgcagccgctcccactactagattcaggtgagctcatcattagtgccccggcccttggtgcggtgcggccaacggccatggcgaagcttgccgcgcagctcaagagcaagttctttggcctcgtcggccgcatcaccagctgtggccgcgccggcgccacccacaaggatgccgctggtgcgacagaggccaagtcatcagtgggatcccagcctgttgagatcaggtcaaggggaggtgctcctcccgttgatggaggggccaagggtcacatcaacagtgacaccatctagaggagagggagaggagaagagaagagatcgaagagaagagaagaagctcaccgatagttaccatgtttgaaagaactgaagctgtaaatcacagtcgtcgttgcttgtgtgtgtgtgtttatagttcctccatggtttaccatcactttcagcttttctagtatatctagtgcttgctatgtttcataatttcgggctatgttgtttcagtgtacggtatttttgtttgtttccttccacgattatataatctagcttatggattatataagc

SEQ ID NO: 3237 - DNA, 795 bp, Zea mays
  Clone ID: 700244211_FLI
gtcgtcatacaggtagatgggattcggtaacgttggttcctgggcagctcagctgataagtgaagccggtggcaaggtgattgctatcagtgacgtcacaggcgccgtcaaaaacgtcgatggcctcgacatcgcgcagctagtgaagcactcggcggagaacaaggggatcaagggcttcaaggggggagacgccatcgctccagactcgttgctcactgaagagtgcgacgtcctcatcccagcagcgcttgggggagtcataaacaaggataatgctaacgacataaaggcaaagtacatcatcgaggctgccaatcaccccacagatccagaggcagacgagatcctgtcaaagaaaggcgtcctcatcctccccgacatactggccaactctggtggcgtcacagtgagctacttcgagtgggtacaaaacatccaggggttcatgtgggacgaagagaaggtaaacgcggagctgcggacgtacatgacgcgcgccttcggggacgtgaagcagatgtgccggagccacagctgcgacctccgcatgggcgccttcacgcttggcgtcaaccgcgtcgcgcgcgccaccgtcctcaggggatgggaagcatgacctccctccgtgtcgtccgtgtgcccctccctgttgtatcctcttggtcttgggcccttgtttttctttggttaattattgtcgagatcaacggagatccgagaaaaacgggctcagttaataattccaagaagtgcgtcttcttggagataaaatagcggaaggagagttataat

SEQ ID NO: 3238 - DNA, 933 bp, Zea mays
  Clone ID: 700244218_FLI
cctaggctcctagcaagtgaactccccagagtgaaaaagctaggaatttggatgtgatattaactctcttggatttggtgcaaatatatcgtcgatctgtccaagaaggaaccatgacgatcgtagagatgcatgtgagcatcgactgcgacggctgcgaggacaacgtcaggaaggccctggaaaagctcaaaggagtgcaccacgtaagcatcgacaggatgcacggcaaggtgacggtcactgggtcggtgagccagaggaaggcgctccgcgcggcgcggcgcacgggcaagctcgccgtgctgtggccgtccgcctacaacaacccgtcgtaccaccaagcccacgcgatgccggcctattaccagtaccagtaccaggccaggccagcgcaagcgcagcagcaccagtactacagcagcgtccagcgcgcaggcaaaaacagcggcggcggcggcggctcggcggtggctacgaagccggcggggcagtacccccaatccaaggccagctcctacaactatcgtgtccacgggtactatgactccgagctgtacgggaactaccacgaccacgagcagcccggcgacgtagtgccagccaccgtgaggtcctacttcagcgacgagaacccgagtgcttgctcgatcatgtagtcatcatcgatccttccatgagatcggtacggcgtggtcgttcgggtgtatgattgatcatcggcctcgcttgtgtccgggtttatgtttcccttaattcatcctgtatgtataaatgcacaatacaatactgtattgtttgtacagcgctgtacagtagtgtaaatttgtgacgtggcaggcagttgccgttcaaaaattaggcactttctgtattaaattccgaatataaatcattatcaataataaataatctaggtgtctgtttcaccat

SEQ ID NO: 3239 - DNA, 1387 bp, Zea mays
  Clone ID: 700244225_FLI
ccaagtggaactgatggacaaaccaatacaggttcgggctcgggttgatgatggaggtatcatgtggagtgagaatatagttccaaactgtaactgggagtctggagaaaccatgttttattctgaattcaaggtgctgctacttaagggaattacttctgacattgagtgggctggtgacgaccacctcatttacattacaacggagagtatacttcggccaggccttcaagcttccgaaagcaagagatatttatttgttaaatctggaagcaaaaatacaaggtttatattctacctggacatattaaaacaaaacaaggaacttgctgttttgacaccttgtgtgtatggcgttgatacaacacctagtcattgtggaaatcatgtctttatgaagagacggagtgatgaattgtataattctgaattggttgcttgtccactggataatgttgctgagatcacttctcctgaccactgctctagccctgagttgcaggacctgttgcatacccgacaacagatgttacaacaggtacagatgcatttgcagagagctcaagttcggatgaaacgccaggctggcaaaggaaggatggaacggtccttcagtgtgggtgatcgagtgtatgtgaagctccagccatactgccagtcatcagcagccgagagagtgaaccacaaactggcgtttaaattctttggccccttaagcatggtcaggaaggttaacccggtagcgtatgaagtcgctttacctgaaggaagcaatgtgcaccctgtctttcacgtatctcaattgaagtcatttgttcctgcaaatgttatttccagctcggttttaccagctctgactccagactaccagatccctgaagaggttatggactcacgactgcaacgaagggcaggcaaggaggtacctcaactgctggtacgttggactagttggccgccatctctggccatctgggaagatgagcactggatcaaggagcaatttccaagggcgccagcttggggacaagctgtctctgaaggaggaggagatgtgaacgacgctggtattcaggatggcatgggtaaagctactcaagggggcgcgggagaatcaccagcaggaggcgagggcgacgctgttccagcagctcaggcgcggcctgcggaccacaaggcccaacaagaggaggtgcacaggccttgagtgggtgaattagacctatgactatgtatcgtggctccactatatatgggttgttcgtagacagggagagggtgtttttttggctgtaagaactcaggcggcggcggcgatccgaggtgatcgtcttccgaatcggaccgtactttccacaccaccataatcaagcgtgtgctccgtctt

SEQ ID NO: 3240 - DNA, 506 bp, Zea mays
  Clone ID: 700244294_FLI
ccatgttccctggcatcgctgacaggatgagcaaggagattactgccctcgcgccgagcagcatgaagatcaaggtcgtggcgcctcctgagagaaaatacagtgtctggattggtggctcgatccttgcgtcgctcagtacgttccagcagatgtggatatccaaggatgagtacgatgagtctggccctgctatcgtccaccgaaaatgcttctgagcttagctatctgccgcgcctttcatagcgtgtcaagctgttgagatctgcgttgttgagttgagtgtctctatggagtatcacatactttctgcatgaggggggaagagtatacccaactaagcgcatgcctttcggatgccctgcttcgtgattcagatgctgctttctttcaagtgatatgtcgatgtagtgtgcgagcaatgtatttggtttggctacagctgttctgtcgtctgtgcgtaaaacattagctatgtatctatccatatctgcatatttgaatgt

SEQ ID NO: 3241 - DNA, 628 bp, Zea mays
  Clone ID: 700244310_FLI
tcgaatcgtctcgctagtggctgccctactcgtgctgcttgccctcgccgccgtttcctccacgcgcagcgcacaaaaggagtccgcggctgacaacgccgggatgttggcaggcggcatcaaggacgtgccggcgaacgagaacgacctccagctccaggagctcgcgcgcttcgccgtcaatgagcacaaccaaaaggccaatgctcttctggggttcgagaagcttgtgaaggccaagacacaagtggttgctggcacgatgtactatctcactattgaagtgaaggatggcgaagtcaataagctctatgaagctaaggtctgggagaagccatgggagaacttcaagcagctgcaggaattcaagcctgttgaagagggtgctagcgcctaaggatctgtcgtctccctgtgcaatttgctgcctgaagcgcaaaactaagttgcagaataaggagctgcttcggaacatgccagagcatgcaccctcgcgtattttcataaaatcagtgctcttaatgtaatatcttgaattgccgtgccatgtgtaataagtaatatcatgaataacagttgctattatgggttctaaatgtgtattaacagccatccatggcagagttct

SEQ ID NO: 3242 - DNA, 1434 bp, Zea mays
  Clone ID: 700244370_FLI
accccaaggtgaacgaagatttctacaagcggacgctctccggaggcatcgtcacgctcgtcgccgccgtcgttatgctgctcctcttcatctccgagaccaggtcatatttttattcgtcaacagagactaagttagtcgtggacacatcaagaggggaaaggctacgagtaaattttgatattacttttccgagcattccttgcacactcctcagcgttgatacaacggatattagtggagagcagcatcatgacattaggcatgacatcgagaaaagaagattaaattcacatggtaatgttattgaagcaagaaaagaaggcattggcggagcaaaggtcgagaggccgttgcaaaaacatggaggaaggcttgacaaaggtgaacaatattgtggcacgtgttatggtgctgaagagtcggatgagcaatgctgtaattcttgcgaagaagtcagggaagcatataagaagaaagggtgggctctaacaaatcctgacctaattgaccagtgtgcaagagaggattttattgatagagttaaaactcagcaagatgaaggttgcaatgtccttggctttttagatgtcagtaaagttgctggaaattttcacttcgccccaggcaaaggattttatgaatcaaacatagatgtgcctgagctgtcattacttgagggtggtttcaacattagccacaaaataaacaaactgtcctttgggacagaattccctggtgttgttaatccacttgatggtgctcagtggacacagccagcttcagatgggacataccagtatttcataaaagttgtccctacaatatacactgatattagaggacgcggtattcattcaaaccagttctcggtaacggaacattttagagatggaaatgttcgtccgaaatcccaacctggagtatttttcttctatgatttctcacctataaaggtgatattcacagaagaaaatagatccctactccactacctgacaaacctttgtgctatagtgggaggtgtgttcaccgtttctggtatcattgactcgttcatataccatggacagaaggcgctcaagaagaaaatggagttaggcaaatacagatgatcaacttggaccttgtactggccccgtcgtttccaaattttgaggcatgtaaggagcttatatgcctgctaaacatgacgagtaccacttaagtcggagactgcaaggccatcaaactgatgttattgcacattagctgatcagataacttgtaaaatgacaaggaatagcctggtctgaggggtgggtggcggtgtgtgtgggtgtgtgctttgatgcctatcattgttgactgttgttgaatgacatgtttgaaggtggataggtcagatcacagaatgtttctcatgaaagtttgttcaaggaaacagcttcactc

SEQ ID NO: 3243 - DNA, 1356 bp, Zea mays
  Clone ID: 700244377_FLI
cacctagctagctagcgctagtaccatcgtgcgagtgtgtgagcaagttactgagagatctcggaacgttgcttgacagtttgagtaggtaaataatctatggcgcgccgacagtggagcagcggcggcctcgcggtcgcggtgctcgccgtgctgtcgtccgtgctcatctgctcatcgggccacccggtgccgggcgggcacggcggcgggctccccctgaagctgcacttctacggccacgcgtgcccgcagatggaggccatcgtggggtccctcgtggcgaaggcgcacgcggaggacccgcgcatggcggcgtccctgctgcggatgcacttccacgactgcttcgtgcagggctgcgacgcctccgtgctgctggacgccgacggcagcggcaggttcgtcacagagaagcggtccaaccccaacaaggactcgctccgggggttcgaggtcatcgacgagatcaaggccgcgctggagcacgcctgcccgcacaccgtctcctgcgccgacatcgtcgccgtcgccgccagggactccgtcgtcctgaccggcggacctggctgggaggtgccactggggaggagggactcgctgacggccagcctgagcggctccaacaacctcatccctgctcccaacgactccctccccaccatcatcggcaagttcgccaaccaaggcctcgacatcgtcgacctcgtcgcactctcaggagggcacaccatcggcgactcgcggtgcgtgagcttccggcagcggctgtacggacagaacaacaacgggcaggtggaccgcacgctgaacccggcgtacgcggcggagctgcggggccggtgcccgcggtcgggcggcgaccagaacctgttcgcgctggacctggtgacccagttccggttcgacaaccagtactaccacaacatcctggccatgaacgggctgctcagctccgacgagatcctgctcacgcagagccgcgagaccatggacctcgtccaccgctacgccgccgaccagggcctcttcttcgaccacttcgccaagtccatggtcaagatgggcaacatctcgccgctcaccgggagcgccggcgagatcaggcacaactgcaggagggtcaaccacttctagcttccatggagtggccatccgtgctgtggtgttcttgctttggtttcatttctggatgcatgcgtcgtgtttcatacttggatttaagtgtgcagtagtcgtaaatgattggaatttatgttttagtttggtgcccattcgatctcgagtcgattttcactcatgtaatttgcaaatcttgtacgaagaaatgatccaataaaattcagcatttgtgtc

SEQ ID NO: 3244 - DNA, 2162 bp, Zea mays
  Clone ID: 700244379_FLI
ctgaggtctcccataacgtggagaaatgtggggtttctgatcaagcttgtcatggcaaatgccaaagctgtggcatcgatgcaaaacctttttgtgctggagtgaacgaagtctccttgttgaccggcagtcacactggtgtggaggcctcaaaagagaattgtggagcatgcagttttaacaatgatcgtgctgatgctctagaagaagaggccaaggtttccacagctaggataggtcatgttgagagtgctgaccctggtggctctgtgggtgtagaaaaggaaattttcatggctgttaatgaggagtctgagggggagcaagctggggcaacactggaggatctgtttttctttaatggtgaagaggatgatgacagtgattgggaacctgctagtcgccttgttgtgaatagatggttttgcttgaactgcacaatgccaaatgtggacaagattacatattgcatgaattgccgtgagcttccaggatctgttgtagatggatatgatgtcttcaaaaagcaaattgcacaaacagctttgttatctgctgacacagggttgctgccagtgtctacggcgattggttttgatgaaagaatgctgctccacagtgagctagaagttaaaccaaatccgcatccagaaagaccggatcgccttcgcgccattgctgcaagtcttgctgctgcagggatctttccctcaaaatgtgctttggtacctcctcgagaaatcacgaaggaggaacttcttatggttcatagtccagaccacattgaaagtgtcgagcagacaaagaacatgctttacagttacttcacttcggatacttacgcaaatggacattcagcatgtgctgccaaacttgcagctggattatgtgctgatcttgctagtttgatagtatctgggcatgttcgcaatggctttgcgctggtaagacctcctgggcatcatgcaggggtgaagcaagcaatggggttttgtcttcacaacaatgcagcagtagctgcgttagctgcaaaaagagcaggtgccaagaaagtcctcatagttgactgggatgtgcaccatggaaatggcacacaagagatattcgacagggacaaaacagtcttgtacatatcattacatcgtcatgaggatggaaacttttaccctggaactggagctgctcatgaggtgggagttcttgatggtcaaggattctcagttaatataccttggagccgtggtggtgttggagatgatgactacatctttgcttttcagactgtggtgcttccaatagcttcagagtttgccgcagacatcactataatatctgcaggattcgatgcagctagaggtgaccctctgggttgttgtgacgtcactccaactggatactcttggatgacatccctgctagctggttcctcaaatggaagattgttggtgatacttgagggaggatacaatctccggtcgatatcctcatcagctactgaagttgttaaggtcctacttggggagggtcccaatcgtgcttcatttgtagtttcaccatcaaaagaggccttgcgtactgtttctcaagtcctgaagattcaacaacaattttggccagttttaggtccaacatacgcatcactacaggcgcagcaggggtcggtttcttccaatcatagcaatgagctgaagaaaaggaagcgttcaggaggaggaccagggcccttctggtggaagatgggaagcaaaaggcttctatacgaagcgcttattgagcctcgcagccgtccgaggaaactcaaggggtcaactggttcagcagcgccttagatgtgggcagtttgctggccgttgatcttctagacatgaacagggtagctcgctgaccgcgtttcctcaagcagagtaggctgcgtttacgtagaaaacctacttttggctggttacttgcatgatggtcgaccgtttcagatggagtttgacagcaaacccgttgtgttaaccatgcgtggcgtatcagccgatgtttcatgcatgctactgtctttttcgttggttggtttcgtaccatagatagatagacgtgtgtagcgaccatcgatggagaaaaccttgcacatctggaacggcatgcatctcagttattagcccctgttgttgcac

SEQ ID NO: 3245 - DNA, 2875 bp, Zea mays
  Clone ID: 700244389_FLI
gcacgggagcaagcgcccgcggcgggccgaggaggaggaacaggaggaagaggaaatggaaccgctggtgggggaggaggaggaggtggcggcgctggagggggaggactattgcttcgtctgcaaggacggcggtgacctccgcgtctgcgatttcaggggctgccagaaagcttaccatcctgcttgcgtggggaaagatagcggcttcctcaattcagatgaagaattcatctgtgaatggcatacttgctttatttgtaaagggcgttcacgttattattgcttttgctgtccgtggcaagccttttgtcaaaattgcgtgaaacaagcagaattcgtcccagtcttgaggaagacaaagggattctgcaccaactgtttaaggatggcaatcatgattgagaagaatgttgatgttgactccgatggggagagggttgatttcaatgacagggcaacttatgaatttttattcaaggagtattgggaggagatagttaaaggcaaggagagcatgactctggataagcttgaaaaagcatatgcttttctgaaagaaaaactaaactgcaaacaagatctagatttagaaaaggttcatgatgaagaacacagttcagatgatgattttgtgggcaatagtgatgacgacgatgacaacaagccatcttccacaaccaaatttaatggaacatcgaatacaatgaaattcttcctgagggaagataggccaatgaagaatggctatgtgggctggggttcaaaagagctcatggagttcctttcctctataggcaaagatacattgaattccctagatcaacatggtgctactgaagttgtgaaggtgtacattcaacaaaaaggtctcttagcaagagataagaaaaaacttgtcatatgtgatgacaagctcaagattttgtttaggagatcaaaagtgaggtacaacaggatatatagcttgttaggtaagcatattgctgtgaatatgacatcagaggatgaaacttttgctaactctgatgataacaatgaaacatttgtgagaaagaaagctcgtattgggaactacagttccagtactccaaagtgtactccagaaataaacaagagatgttttgctgctcttgttcgccataacattgatttaatctacttgaagaaatctttggttgtggatctactaagggagccggatacatttggcagcaaagttattggctgttttgtgagaataaagattgatctcaacgattatagtttctacatgcataaaaaggtgcaccaacatagaaagttgtatcagcttggactagtaacaggcaccagtaaatcccctgaagaatacaagataaatgatgtatcaacagatattcttttatgtatttccagcatacctgacatcaaaatttcaagtttgtcagatgaagaatacgaagaggaagaatgtcaagaccttcggctgctggccaagaatgaatcctttaaaaggcctactgttggggatctagaggagaaagcaagaagtttacgtagggagatagtgaatcattggatcagtaaagaactccagaggctagaaagattaattgacagggcgagtgagaaaggttggcgcaaggaaaagtttgaataccttgataagaaacaactcttgcgcaagccatctgaacaacaacgtttacttgaagaggtgcctcaagttattccagagacagaagataataaagatactgaatttcaagttacaggacaagacaaacctattcaaaagagtactgtcgctttacaaggtaccaatggagagagcattgtttctttgaaaaaaggctcagaagaaaaatgtaaacatttgcttctatagtatgtgttaaaaaaaaatccatgcaaggcgaacattgtgatgtttttattgtaggtacatatgtgacaagggcttcttttttgaagagccacacagggaaaaaatccaaaggtactgatggggagagagatctttccttggaaagtttatcggaagaaaaacctgaagttaataaggcccacaccgatggtggtacagctgtaatacacaatcaaaatcggagcactacagctgctattgctgcgctaccaaagtatttgcatcgccatgctgccactgaagccaataatgctggtgatatttcatctgttcaggagctggatggtgaaggtgttaaagctagcacggatgttgatacaactggaacagatgtccagcacgggagcattgaagctactaaagccaacgctgctggtgatgcacctggagcattttttcaaaagcagtgtgctaaagctgctgatgttattaccattgacgacgatgacgaggacaacagtcatcgttgttataaagaagaacaaacagcagtagttgatcttgaagctgattatgctggggataaccatcccgtgcagcttgaggcaaatagtcgaggtcataaacacgtgaaggtgaaggagcgcatttggtattacattgatcctcagggtgatgagcaagggccatttacaatgcagcatctgagcatctggtggagcaatggcttcttccccggcgacttcagggtctggagaacaggccaaactagtaatgacgccatcttgctcgtggacgcactgcagatgactaggtaggctagttaggagcctcgtagaagactagatgtatttatgtatcgcggaaaaagcgggggggcttcgaggcagatatatgtgttctgctggggtgtacatccttctgtgttatatgatatgatgatgacatcctatccccaccatcacctcacccaccaatcaaaaacatcttgccaaacaaaacaatggttgtttgatggcaaagagg

SEQ ID NO: 3246 - DNA, 778 bp, Zea mays
  Clone ID: 700244412_FLI
ctggcttctcctccccctcttatcaagtcctcctcgggttagggttccttagggttttgtggaggggcgatggcggcggctgatgtggagtaccgttgcttcgtcggcggacttgcctgggccaccagcaacgagtcgctggagaatgccttcgcctcctacggcgagatcctcgactccaaggtcatcaccgaccgggagacggggaggtcccgcggcttcggcttcgttaccttctcctccgagaactccatgctcgacgctatcgagaacatgaacggcaaggagctcgacggccgtaacatcaccgttaaccaggcccagtcccgtggcggcggcggcggcggcggcggcggtggctacggcggcggtcgcggcggcggcggctatggtggcgggcgccgtgacggcggttatggcggcggtggcggctacggcggtcggcgcgagggtggtggcggcggctacggaggcggtggcggctacggcggtcggcgcgagggtggtggtggcggctacggcggcggcggcggcggctggagggactgatgtgtggccccatcctggcttcggccgagttatcttatctatctatagtatcgtgttaccgttcgcttctgtcaccgtgttagtgtccgttctacctttggattaggtgttggtaccccttttgttcgctttggttgctcccgctatgaaacgagacgagagaagaatgagcaaggtttttgttcgcatctattgttgtccaatgatattgatatattgttcccctgtc

SEQ ID NO: 3247 - DNA, 955 bp, Zea mays
  Clone ID: 700244418_FLI
gctcgctcacagcaaccggcggcgacatcactctcactactgcagctcagctcagcaagagaattgttcgatcgatcgtcgtcgacgatggccgccgcctcctcctcgcagcaaccaccacgcctgctagtactcgtggcggtctcgtgtctcctcctgcagagcgccatcaccagcagctcggcggagtcgtcgatgcagtgccacgaggaggaccaggaggcgctgctggccgtgaactccgcgctgggcagcccctatcacttcgcgtcgtggacgcccgacaccttctgctgcgactggtacgacgtggactgcgacaacgtcacgggccgcgtcgtcggcctcaccgtcttcggcgacggcaacctgacgggcgccatcccggacgccatcgccaatctgaccaacctccgcacgctggtcctgcgccacctcccgggcatctccggcggcatcccggtctcgctcgcgcagctcgccaacctcacccagctcaccatctcctccaccggcgtctccggcccggtgccgtcgttcctgtcgcagctaacggagctcaccctcctagacctctccttcaactccctcgacggccccatcccggagacgctcgccgacctccccgccctctccagcatcgacctcagccgcaaccgcctctcgggccccgtcccgccgctgctcctcagcaagtacgtcgacgaccaggcggcgtacctcgtgctgtcgcacaacaacctctccggcagcatccccgccgggttcgcctccgtcagcttcgcgtacctggacctgtcgcgcaacgccttcgccggcgacgcgtcgggcgtgttcggcaaggggaagccactgcagcacctggacctctcccgcaacggcttcgccttcagcctcacggccgtggacctgccggagcagctggcgtacctggacctgagccacaacgccatcc

SEQ ID NO: 3248 - DNA, 1257 bp, Zea mays
  Clone ID: 700244432_FLI
gcaatgtctacgagctcgacgtcgtcacagggaagggagaggtggtgacctgctcggagacggagaacccggacctattcttcggcgtgctgggcgggctgggccagttcggcatcatcacaagggcgcgcatcgccctggaacgtgctccccaaagggttcggtggatccgggcgctctactccaacttcaccgagttcacggcggaccaggagcgcctcatctccctgggcagccgccggttcgactacgtggagggcttcgtcgtcgccgccgagggcctcatcaacaactggaggtcctccttcttctcgccgcagaacccggtgaagctcagctcgctcaagcaccactccggcgtcctctactgcctcgaggtcaccaagaactacgacgacgccaccgccgggtcggtcgagcaggatgtggatgcgctgttgggcgagctgaacttcatcccaggcacggtgttcacgacggacctgccgtacgtggacttcctggaccgcgtgcacaaggcggagctgaagctgcgcgccaaggggatgtgggaggtgccgcacccgtggctgaacctcttcgtgccggcgtcccgcatcgccgacttcgaccgcggcgtcttccgtggcgtgctggggggcggcaccgccggcgccggcggtcccatcctcatctaccccatgaacaagcacaggtgggacccgaggagctcggtggtgaccccggacgaggacgtgttctacctggtggcgttcctgcggtcggcgctgccgggcgcgccggagagcctggaggcgctggcgcggcagaaccggcgggtcctcgacttctgcgcggaggccggcatcggcgccaagcagtacctgcccaaccacaaggcgccgggcgagtgggcggagcacttcggcgccgcgcggtgggagcggttcgccaggctcaaggcccagttcgacccgcgggccatcctggccgccgggcagggcatcttccggccgccgggctcgccgccgctcgtcgccgactcgtgatcggtactactgactgattattaggcgcgttttagtgtaggtagtagctacagcggtaaccgtacaggattatttagtttgttgttattattattattattatttagctccggttgatgtacaaatgtgggtcacgtgattctgtacatgtacatgggagtcaaatatgaatgtcgccaagtgatgctcttctcttctaatggttaaaaacaggtgcctgactctctct

SEQ ID NO: 3249 - DNA, 549 bp, Zea mays
  Clone ID: 700244441_FLI
cttttttggaatggcacgattcgtttaggtcgatctctccttttttttgttcgttatacaaactggtagcagtatgctaataatgctgcagccgcacatgattcttaagcagcttaccgggagcatgacgtagacctggacatagttggctagcgcgttccccgccattgtagctggctggctacgctctgagagacctcactggcttgctctgcttggtggtcgctgagcttgggccttgatggatgttgcagggagcttgagggtctatttatacagcggaggcaggggagatctggaatgcgactttgcagcgcttctccagcgatgcaaaaacctatctttccgtatagtcgcccaggaatgcgcatgtgcagggtgagctgatgattttggatatcgataccatcccgagctggcatatgtagcacagcaggttgttgccattgtgattcgcggggactgcgtcctgaagaactttggttttgacgccttgtatttgtacggcaatgattgggatgaacatggccggtgagaattttttatttt

SEQ ID NO: 3250 - DNA, 742 bp, Zea mays
  Clone ID: 700244462_FLI
gccagacagggctcccacaggccatcaccacaacacacaaatacagctcagagcaactcacacacaggctcctctcccccgttgcgcaacgcgctttcccccacttcacccgcctcggcgccatggctaagctcgcgctggcgctcctcctcctgctggccgtggcggcgtccgcgtcggccagcagcgggagccacctggatctcgacctgggcttcctctcctctggggaacgccggagggagtgccgcggcacggtggccgagtgcctcgccgaggagtcggatgaggagggccttgacctggctggatcccaccgccgcgcgctctacggcggcgggtacatcagctacggcgcgctgcggcgggacaacgtgccctgctcccgccgcggcgccagctactacaactgccgcccgggcggccaggccaacccctaccaccgcggctgctcccgcatcacccgctgccgcggctgaggcggcgccggatccgccagactgccgaggaaaggtctggtccaggtcccggccctttcgccgacaataatttctttcgccttgttcgttcaggcgctaccgccaccgccaccgctgtttactatagcaccagacctacggattgaattgttgtatggatttgtttggccaaatctttgttctgttgtaaagtaaggggagggattcctgcccctgcgcctgcttaaaatacttatatgaacatatcagtctttcttgttttt

SEQ ID NO: 3251 - DNA, 840 bp, Zea mays
  Clone ID: 700244463_FLI
gcgacgccaaggccgagctcgagaaggcatgcccccgcacggtgtcatgcgcggacatcgtcgccttcgccgcacgcgacgccacgcgcaacctcagctacggcgccatcgacttccagatgccggcgggccgcctggacggccgcgtgtccctcaaggaggaggccgagaagaacctcccggggccgttcgacagcctcgacgacctccagaagagcttcgcggcccagggcctcggcttcaacgatatggtcacgctctccggtgcgcacagcatcggcgtggcccgctgcaggttcttcaccaaccgcctgccgcctaacccctcggacatggaccgcgacctcgccaggagcctaaaggcgacctgcgaccaaaacggactcgactccaaggtggtacaggaccccgtgacgccagttgccctggacaaccagtactataagaacgtgcacaacggcaaggtgctcttcacgtcggacgccgcgctcaactccacggacgacgcaaggaaggtggtggacggcttcgccaacaacgcggtagactggtaccgcgcgttcgccgatgccatggtgaagatgggcaacatcagggataggaccatcaacagacccaagcccgagatcagggagaagtgcttcatttacaatacctactgatcgacacgatatcaacattaagacgtaccacgagatcctggaggagtctgtttgttttgatattttcctcttgcattcattatcatgcgattgatttccttttatttgcatccaaatgtcatgctgatatttttgttgtaaaaggactttgaattcaagcaatacattttatttgttc

SEQ ID NO: 3252 - DNA, 1148 bp, Zea mays
  Clone ID: 700244473_FLI
atcaactccacaaagaatccgaccgccgtaatcctccataccgaagacgtcggcgacttcaagccggcgccggtggtggcgtccttctcggcgcgtggccccggcctcaccgagtccatcctcaagcctgatttgatggcgcccggcgtcagcatcctggccgccacgatcccgtccaccgatagcgaggacgtgccgccggggaagaagcagtcggcctacgccatcaagtccggtacatcgatggcctgcccgcacgtcgccggcgccgccgccttcgtgaagtcggcgcacccgggctggacgccgtccatgatcagatcagctctcatgaccacagccacgacgacgaacaacctcgggaaaccactggcgagcagcacgggcgcggcggcgacggggcacgacatgggcgccggggagatgagccccctgcgcgcgctgagcccgggcctggtgttcgacaccagcacgcaggactacctcgacctcctctgctactacggctacaaggagcagcaggtccggaagatctccggcgccgcgcgcttctcctgccccgcgggcgcgccctcgccggacctcatcgcgtcggccgtcaactacccgtccatctccgtgccgcggctgaagagggggagacccgccaccgtggcgcgcaccgccatgaacgtggggccctcgaacgcgacatacgcggccaccgtcgatgcgccccccggcctggcggtgcgggtctcgcccgaccggctcgtgttctcgaggagatggacgacggcgaggtacgaggtgagcttcgacgtggccgccgccgctgccgtgagcaagggctacgtgcacggcgcggtcacctggtccgacggcgcgcactcggtgcggacgccgttcgcggtcaatgtcctctgatctggtggagtcatcggcgtttttgcttctttcataatcatgttcttggtccatgagtgtttgatttttgtgtcccccctcaatttggtagaaggggaataatttcaaattcagttttgttgtagcacccctgcttcgtgtaggttcatctcacagttaagattgtgatggccaaggctagaaaactagccatcatatttgtttgaaacctcttcttcttgatacaaacatgtgtaatgttc

SEQ ID NO: 3253 - DNA, 1392 bp, Zea mays
  Clone ID: 700244477_FLI
gtgctcgaggcacaggactccctttataatttatccatccatggcttcctccaattccaacagcagcagcaacccgctggaagccatgggcgccttcttctcgaagcaggtggaccggcggaagctggtgaccaccgagaagcgggcgctggccacgcggctgtcctcctccggcgacacgttcccggggtcggagcaccggccggcggaccggaagcggtggatggcggagctgggcgccgacaagctgcgcgtgcaccaggtggtgtggcccggcacgcacgactcggccaccaacaagatcggcgtgccgctggtgacccgccccttcgcgcagtgccagtccatgtccgtgtacgagcagctggccatgggcacgcgcgtcgtcgacgtgcgcgtgcaggaggagcgccgggtctgccacggcatcctggcgacgtaccccgtggacgtggtgctggacgacgtgagccggttcctgagcgagaccgagtccgagctggtcatcttggagatccgcaccgagttcgggcacgaggacccgccggggttcgacaggttcctggccgacaagctgggcgagcacctgatcccgcaggacgaggcggtgttccacaggaccgtcgcggagctgctcccgcggcgggtcatctgcgtctggaagccccgcaagtcgccgccgcccaggcccggggacccgctgtggagcgccggctacctcaaggacaactggatcgacacggacctgccggagaccaagttcgagagcaacctcaagttcctggggcagcagccgccggtggccggccggaggttcttctaccgggtggagaacacggtgacgcccaaggccgacaacccggtgctgtgcgtgtggcccgtcacgaagcggatccacggctacgcgcggctcttcatcgccgaggccttcgccaagggcctcggcgacaagctgcaggtcttctccaccgacttcatcgacggcgacttcgtcgacgcctgcgccggagtcaccaaggcgcgcgtcgatggcaccgcgtgacgtgacggcttcgatcgacgagcccgtacgtacgtacgtgtgccagtgttgcggccgtactgccattgcagtgtatgtactgtgtagtgtacactccagtcgtgcagtatatttgcatacaggaacaggtaaatgcgatgtgtatatacgtattcattcatgtgtaacgtgtgcgtcccgtacgtgtatgcagtgcactgtgtctagtgatgaattgctcgtgggacgagcaaaggaataaacatatgcagttacggaattttcacaggctgttgtactagtaatcaggctattctcgttaagagtttcattgtgttatttgcaataataatgctgccacgttatctgct

SEQ ID NO: 3254 - DNA, 682 bp, Zea mays
  Clone ID: 700244484_FLI
tttctcctcgtccccgacaagccaatcgaagccgagatacggccatggactccaccggcaccggagcagggggtaaggggaagaagggagcggccgggcgcaaggtcggcgggccaaggaagaagtcggtgtcgaggtccgtgaaggccgggctccagttccccgtcggccgcatcgggcgctacttgaagaagggccgctacgcgcagcgtgtcggcaccggcgcccccgtctacctcgccgctgtcctcgaatacctcgccgctgaggttctggagctcgccggtaatgctgccagggacaacaagaagactcgcattattccgcgccacgtgcttctggcgatccggaacgacgaggagcttgggaagctgttgggcggcgtgactatcgctcacggcggtgtgctccccaatatcaaccctgttctgctgcccaagaagacggcggagaaggcgtccagtgtggggagcaaggaggcaaagtcgcccaagaaggccgccaagtcccccaagaaggcatagactgactgtctggagtgatctgatgtttagcaggaccttgataccagtatgcggtgatgcgtaggctgtagatgggtcgaatgtgcttgtgtgtgtatgtgccctgctgcaagttgccctttgctatttaaaatggaagaagaaatgccttgtttctc

SEQ ID NO: 3255 - DNA, 1196 bp, Zea mays
  Clone ID: 700244495_FLI
gagcagccggagctccggcactcgaggagcgtcggcatgctgcgccgtgcgggcagcggtggagacagccgcagcaagaagggcaaggagagtaggcagaagcagacggagtcggcgcggcgcagcaaccagcaggtgttccggaccaaggacgtggccccggacatggatcccccctcgccgagggtctccggctgcgccttctgcgccgtcttccgcgggggctctggcggtgcccgcaggccacaggcacgccgccggtccaagcccaggaagaagtgacggcgtagcaacacgtacgtacgtgcggtacgttgttgtttgtgtcatctgtaaagtccgggccatggtggttcgtgcgtgcacatgtttactaaatagtaaatactagggtcatattatcatatatagatgagcttgctactcggtatacaccattatttagtccaggttagttcctccttttttttttggggtcggtcggttggtttcttgatccagatccatgcttttgaggtttgggcgacggttagatgttacttgtctactatatatatgcagcagctattgatgagatctggggctgttgttcttgttctttactagcttggtgcaactttttcgcttgggttctgccgctggtcctttcgggaagcgcatgtggttttggttttgaaactgggagggaagcagggtggagcgacgatgaattggtccgtgatgcggctgaactgggagggcaggcaggccggtggtggtggcagatgggatgagcggcgataattcagagtgctaattactagcaagttggtgagcgacatgattgcgctgtggaggtggatggacatagtgacggccatccacgccgacgtcgacgtgggatatatgtgaatgtatatcgattcagtcatgctttcacacggccggggacgacgcccgtctcgtgccgtcgacctgtcgacgacgacgatacggtcggcggcagcgtcacgcatctgcctctgcgtgcgtataataatggaggactggtggccgtctctttctccggcaccttcaccttattactacgtctctgttgggaccgctgcacagacgagacgactcgtcaattgatgattggtaacgtgtcttatgcagaaacaaaaaaaaatgttggaggttataccctcctctcctatagcgaatgatctttgtcc

SEQ ID NO: 3256 - DNA, 721 bp, Zea mays
  Clone ID: 700244507_FLI
ctggacgagatcataaactacgtacagtcgctgcagtgccaggtggagttcctgtcgatgaagctgtcgaccgtcgacccgcgccgggagctcgacgtgggctgcttcgtcgtccccagagacgacgtaacgatgcaggccaacaggctgtgcgcgcccgcgacgtcgtcatcgagcacagccttctgctacgccgcgcggagtgttgttacgaacgccaaaggattcgagacgccggtgcccttggcgaaccatggcgtcgcggcggacgacaggccacttgagcggcgtactcgagacgcaggtccccaggcggggagcttgtgggaagaggacgatctgcagagcctggtcctgatgggattccggggccgttgatcgttgacgctctgattaggctagggacgacagttcgtttccaccgaccgccaaccaaagcgagagttgcagggccacgtaacagcagggttgggctccaatcattgggaactctccatgattgtgcacaaacaggacgcttacgcgctaatttccagctcggcggaggccaagaaacgaaacaaaaaaaaaggcgaaaagaagatgtttttttttctcgcatttccccccacgaatttgcagtttaatccgatgtaaggtaactcaatgtaattattaatggtatttgagtcttatagacatcaagttgatgaaattttatactacacaagatgctttcggt

SEQ ID NO: 3257 - DNA, 1381 bp, Zea mays
  Clone ID: 700244531_FLI
gtccccgatcagacttgttcggcctcttcgacggcgtgcccgtctccccgggctcattcgccatgcattcctcagcctccgcgagaggaggacgagggctcctcttgccggcggctgcggcggcggttgtggtgctactgttgggtgcagtggcgccagcggcgggttgctatccgcgcgtgttcaacttcggggactctctggcggacacgggcaactacccgttcgtctatggcaacgactcagccaagctccggccaccctacggcgagaccttcttccaccgcgccaccgggcgcgcctccaacgggcgcctcgtggtcgacttcatcgcggacacgctcggcctcccgttcgtgcgaccgtatctgagcggacggagcgcggaggacttcgcgggcggggccaacttcgccgtgggcggcgccacggcgctcagcccggacttcttccgtgcaagggggttccacaacatgggaaaccgagtggacctcgacatggagatgaagtggttccgcggcctgctcgacctactctgccccggcaacctcgccggttgctcggatatgatgaaccaatctctcttcttagttggagaaatcgggggcaatgactacaacggacctcttctttctggagttcccttcgaggaaattcgcgccatcactccgagtgttgttgcgaaaatttcttctacaatcagcgaattgattcagctaggagccaagactcttgtggttccaggaaaccttcctattggatgtgtcccaaaatatctgatgatattcaagagcaataagaaagaggattatgatccacagacaggttgtcttagatggatgaacgagttctcacagtaccacaacaagcttcttgtggagcagctcaagaagcttcgcaggctccatcctggagtaaccatcatctatgctgattactatggagctgctatggaaatattcctttcccctgaacgatatgggatcgaatatcccctagtggcttgctgtggtgcagaaggaccctacggtgtgtccccaactacaagctgtggattgggagaatataagctgtgcgataatccagaaaggtatggatcatgggatggcctccatccaacagaatctgcatacaaggtcatcgctatgggcctgctactaggttcctatacaagaccgccaatcgcttccaccaccacttcatgtccacagcttatggagctcggctcttctgctgaatacaaacgcctctacgacctgtaataatttatgtaattatattttattgtatgtactccctcgcccacttcaataagtcccattttgcgagtacatgtactttgtaacttttaactaataacttatcaaactagctactatat

SEQ ID NO: 3258 - DNA, 1809 bp, Zea mays
  Clone ID: 700244568_FLI
gcttgccgagtgcaatcgagatccgtgccagcccgtccatactgcggtggcgtggcggtgacgtgccggcgcggcgcggcgcggcgccgataagaggtagagagaggaaaaaaaagaacaatcaattctccagaccctccccggcaaccgcgtccggccgtccgcttccgtttccttggataaccacgacgcccgcccgccccccggcaagcgaaagcgaagcgagccaacccagccatggagaaggcgatcgatcggcagcgggtcctcctggcgcacctcctcccctccccctccgccgcctcctcgcagcctcagcttgcggcgtcggcgtgcgcggcctgggacagcgccgcctaccagaggtcctcctccttcggggacgatgtcgtcgtcgtcgctgcctacaggacgccgatatgcaaggccaagcgaggaggcttcaaggacacctacccagaggacctcctcactgttgttctcaaggctgttctggacaacactagaatcaatccagctgacatcggtgacatcgtcgttgggacggtgctcggccctggttcccagcgtgcaaacgagtgcaggatggctgcgttgtttgctggattccctgaaaccgtccctgttagaactgtcaaccgccagtgttcatctgggctacaggcagtagccgatgtcgcagctgctataaaggctggttactatgacatagggattggtgctggtttggaatccatgtccataaattccattgcttgggaaggacaagttaacccaaaaataagcgcattccagaaagcacaggattgtcttctgcccatgggaattacttctgaaaatgttgcccatcgatatggtgtaaccaggcaagagcaagatcaggccgccgctgagtctcataggagagctgctgcagccacggcctctggaaaattcaaggatgagatcgtcccggtcccaacaaagatcgttgatcctaaaactggagaggagaaggaagttgtgatatcagttgatgatgggattaggccagggaccacagcatctggattggcgaaactgaaaccagtttttaaaaaggatggaactacaactgcaggcaattccagtcaagtgagtgatggtgctggagctgttcttctcatgaaaagatctgtggctctgaagaaagggctgcccattcttggtattttcaggagctttgcagctgttggagtggatccagctgttatgggcgttggtcctgctgtggccattcctgctgctgtgaagtctgcaggccttgagattggcgacattgatctgtttgaactgaatgaggccttcgcctctcagtttgtctattgctgcaacaagttggggctggaccgttctaaagtaaatgtaaatggaggcgcgattgcccttggacaccctctgggtgcaacaggtgcccggtgtgtggctactcttctaaatgaaatgaagcgccggggcagagactgcagatttggtgttgtcaccatgtgtatcggatctggaatgggggcagcagctgtgttcgagcggggagacgcggtggatggactctccaacgtgagggacatgcaggcacataattttctatctaaggatgcgaagtagaggcgcagaaaaaccatccatcctagagcagcataagcctgctgcatttgtaatatattcgaaatccgtattttttttcttcacaagcactactctatatacgatgaataaaagggcgacaatacagtgtcatcttgtggccacctaagatgcgaaagagaaaagaaggccggctgttcaatgttc

SEQ ID NO: 3259 - DNA, 822 bp, Zea mays
  Clone ID: 700244578_FLI
ctgaaatggagtactgcgatagactggagagctcgcttgatttcttggttggtataactgcgcttctgtttctgggactggaaggcctcgctctggagggtcagattaacagctccagcggtcgtcttaccacgccgatcggcacaagcttcgttgtctgtgtttttgctgcgagcttaatgctcgtggagacgatgcctccacgcagactcgtgaggtatctgacagagaccattgatatcctcacgggttttgccgtctccctggctatgttcttcatcatgtatccactcatgggactacgagcattgcttctgctagcagctccgttcctgatcctcatggcgtatgtcttctacgtcgctatcggcaaggatgatggcaacaacaaccaccaggttgctagcgcgaacggcgatgaagaatcgtcaggtgttagcagcagccgcaggagtggtgcggcggcggacggtgataataaaccagcgtcgcttgaactgacaaaagtaacattcgcagggttcctggcggtgtcgataccaagcatcagcaaaggttcagtcaccatttattccgaatgtttcttgcaccttgcagcagcagctgttgtctcaggcctcgtgtggaggctcctaacgcattacaaaaagtcacagaccaccgtcgcaactgttgcagatattgcttccttctgcacccatctctgtgttgcagttgcggtaattccgtttacgataatggccgggaatgcactctcatgattttgtagtactagtctgtcgagtcctgctctcattttgactaataaacattttttatgtt

SEQ ID NO: 3260 - DNA, 1121 bp, Zea mays
  Clone ID: 700244612_FLI
ttcaccgtcgacaagcagagcacggaggaggagcggtaccgcatcagccccgtgtcctacctcctggtggacggcatccctcacgaggaccacatgaaccacaccgctctggtgctcacctgcacctcgacgcgctacatcgaggcggggatagggctggcggagtggttcaagagggacgtggtcacgtcaccgttcgaggagctgcacggggcgactctgttccacgagagcatggggagcctcgacgcagatttccacgacatggcgagcgaggccttggacgcccacgacaacttcggcatcgagatagctatgcgggagttcagggacttgttcgaggggatccagtccatgacctactgctgcggtaacttcggtgatgacaagggtgccagggccattgtcaaagccttcccacacataaaatgcactgtgctggcccctcccaagatcattgccaccaaaccggccgatggagcgaagataaactatgtcgaaggtgacatgttcagtttcattccacctgctcaaactgtcgtgctaaagcttgtgctgcaccacctgaccgatgaggagtgcgtcaagctcctggctcaatgccggaaggcgattcctccacggaaggacggcgggaaagttataatcggtgatattatgattgaccactctgggcttatgctggaaactcacctcctgatggacatcggcatgatgaccatgacaaaaggacggcagagagatgaaaaagaatggagcgagctcttcaccaaagcagggttcagcgaatacaagatcctgaaggaatttggagctcgtgttgccttcgaagtctatccgtgagatatatatatatatttacatacatatatgtatgtgtgtgggtgccttgcgtggcttggcgtgatgatgtcataaataaagagggtgggtgtgcttgcggtattcatggatggccatggatctgagcacatgacgttggatgctttcttaaggctctcgtggatcttctatatttggaagaagctgtaaaataatatatcgccatctagtgttggcgctggcttgtatgtactttgtacctgctttattattttgtgcaatatcgagtaacctaatgt

SEQ ID NO: 3261 - DNA, 1438 bp, Zea mays
  Clone ID: 700256784_FLI
cggcctcctcttccccccgcctcgccagcccgaattaggagctacgacgaatctaccgggccgagctcgccagctggcctccccgagggcgaggccctatcggctgccgttcccccattgacagggagctcagccccgccaccgccgcggctgcggcgtgtggacgtaaccggagctcctcgcagccgctgataagatccgaagggttcctaggctttttgtggcgggaggcgactggttccgtcgggtggtccggtgagcatggcggggcccaagtttgggtcgttcaaggcagaaaagggggactcagcggcggctgcaggcgcggcggcgcagaggagggacccatacgaggtgctcggggtggggcgtaatgctactgagcaggagatcaagagtgccttccgccgcatggcactcaagtaccatccagataagaattcagacgaccctgttgcctcagagaagtttcaagaggccacattctcctataatatcctgtcagatccagacaagaggcgccagtatgatgcatcagggtttgaggccattgaagcagatagtcaggaactggagctggacctatcaagtctcaatactgtaaatacagtgtttgctgctctgtttagcaaactaggtgttccaatcaagaccactgtctcggcaacagttttagaggaggcattgaacgggtcagtagagatttctcagcttcagctgggcaaatctctatgtaggaaggtagaaaagcagtcagctcacttttattctgtggacataacagataaagaagccaaaatgggcttagtttgtagagttcattcaacttctaaaagtaaatttaagttgctgtattttgagcttgaggacaatggtggattaagccttgctttacaggaagatagtgcaaaaactggaaaagttacttctgcgggcatgttctttctaggctttcctgtgtatcgatttgaacaaaataattcagctgctgctgcgaaggatcctgacagtgctttctttaaaagattggatggctttcaaccttgtgaagtaaatgaactgaaagcaggaagccattattttgctgtatatggtgacaatttctttaaaagtgcaagctatactattgaggttgtatctggtgaacccttctctgctcaaaaagagaagctacgaagtgtggaggcaaagataattgcaaaacgatctgagctgtctaaatttgagtctgagtatcgcgaggttttggcaaagttcactgagatgactagcagatatgctcaagaaatgcaaacgattgatgaccttctaaaggaaaggaatgcaattcatgcatcctataccaacaacccaactctgcagcggagttccagtagcagcaaagggaaatcaccctctaaagggtccagaagtgaggatgaccaaactgtaaagaagg

SEQ ID NO: 3262 - DNA, 1807 bp, Zea mays
  Clone ID: 700256795_FLI
ggtgaattggattcgtattatcacaaaacaaaccggtgtagattcaggctggatttgagcctgtttagcagcgctatccgcttggcccaattcgtctactgctcctccagctcctccgctgcgccgccggtcgccgcccgacaccgccgaagaagagcagacgccgagtccaggacgtcgccgcggggctcggggaacgcggtgttgccatcgcgaggaaggtcggaagttcgctgttcgcccgccggatcggcaccgtcgccaccgcccatggcaaccgtcgcccccgtcgtctccgacctcgtcgacttcctcaacgcgtcgcccaccgcctttcacgccgttgacgaggcgaagcggcggctgaaggcggcggggttcgtgcagctgtcggagcgggaggagtgggcgggtctcgagcccgggcgcaagtacttcttcacacgcaaccactccactattgtcgcttttgccatcggcgcaaaatacgttgctggcaatgggttccacatcatcggtgcacacactgacagcccttgcctgaagctcaagcctgtctccaaggtaaccaaaggaggttaccttgaggttggggttcaaacgtatggtggtgggttgtggtacacatggtttgaccgtgatcttactgtagctggtagagtgattatacgggagaagaaggatggcgtggtctcttatgcacacaagcttgtacgggtacaggaaccaattatgcggatacctactttggctattcacctggacaggactatctcctcagaaggtctcaaggttaacaatcagagtcatcttgttccagtgctggctacatgtatcaagaatgaaatgcagaaatttgtagcagataatggcccaaagcaggcatccgagaatgcgaacacaaagcatcatccattactattgcagttgattgctaaagaggctaactgtgagcctggtgagatatgtgactttgaactgcaattatgtgatactcaaccaagtgttgtagcaggtgccacgaaagagttcatcttttcaggaaggcttgacaatctttgcatgtcattttgttcattgaaggctctaatagattccagttctgttgaacactctcttgatcatgaatctggtgtgagaatggtagctctatttgaccatgaagaagttgggtctgattctgctcagggagctggttcccctgccatgttggatgctttatcaagaattactgggtcttttaactcttcaggttccaagttgctagaaaaagctattcagaggagcttcctggtctctgctgacatggcacatgctttacatcccaactatatggacaagcatgaggagaaccaccagcctaaattgcatggaggacttgtgatcaagcacaatgccaatcaacgatatgctacaaatgctgtgacagcatttatttttcgagaaattgctgagagacaccagctacctatacaggattttgttgttcgcaatgacatggcttgtggttcaacaattggcccaatacttgctagtggtgttggtattcgcactgttgatattggagcaccccaattatcaatgcacagcatcagagaaatgtgtgccgctgacgatattagctactcatatgagcatttcaaggcatattttgaagaatttactgaattggatggcaaggtcaaggtggattactaaggcatatagcacaataggttagctttgttacaagctgtacttttatacaaattcgataagcaagtggagaacaaatttgggagaatgtgctagttgtgtttgcattgcc

SEQ ID NO: 3263 - DNA, 489 bp, Zea mays
  Clone ID: 700256837_FLI
aagcagtttactttgttcgcacgcaaatacccatcggcctttttgatgtactgtgaaaaattcctctgatgctactcctacttgctgtacctgatcgtgcactatttataagatggaaggcgatgggtcacccattttttcagagttgatgctggttgtaaactactgtcaatgaagggtcatgggtgggaagcagctagctaggcccccataagaggatcagggaatatttttgcgatcacagggagaagtctgctaaccaatattagttggtagttgggggaactgtaggttgaacttaatgcctcctgcgggcttctgaccaaatactcctttgtgatcagaattggtagtcggttaacttagcggcattttcgtgatagccaatgtttctcgtgatggtctgaatatgttgatgttgcttaaattttgctgtaatttgctatttttcctcgttctttgtttttgtacttattgagaattgatgcc

SEQ ID NO: 3264 - DNA, 1493 bp, Zea mays
  Clone ID: 700256906_FLI
catagtcataaaccgctcctgcactctcactcgattcacctctaccagcaactcgccacttcctccctgagaaattaaactgagaaatggcaccgcctcacagtcacagaagcttccgcggctggcagaacgcgagccacgtcgcgcttgtgcttgtgctggtgtccgtgctgttcctgagcaaggcacgtccctccgcgggcgccaggagcctgctggagctgtacaagccgccggccagcgcgctcctcacgtaccacaacggcgccgtgctacagggccgcatcccggtgaccatcctctggtacggccgcttcgcgccggcgcagaaggccgtggtcaccgacttcctccagtcgctcaccaccaccgcctcgccgccgtccccgtccgtgtcgcagtggtggggcaccatcgaccagctgtacctgtccaaggcgcggagcggcggcggcggcagcgcgcaggtggcgctcgtgggccaggccgccgacgaagggtgctcgctggggaagcgcctcgcgctgtcccagctgccgcagctggcggcgcgggccgggccggcgccgaagggcggcgtcgcgctggtgctcaccgcgcaggacgtggccgtggacgggttctgcacgagccgctgcggcctgcacggctccgacgccggggccggggccgcctacgtctgggtcggcaacgccgaaacgcagtgccccgggcagtgcgcgtggccgttccaccagccgctgtacgggccccaggcgccggcgctcgtgccgccgagcggcgacgtcggcatggatggcatggtggtcaacatcgccagcatggtcgccggcgcggtcaccaacccgttccgcgacgggttctaccagggcgacaaggacgcgccgctagaggccgccaccgcctgcactggggtctacggcagcggcgcctaccccggtttcgcaggcaacctggcggtggacggcacgacgggggcgagctacaatgccaatggtgccaacgggaggaagtacctgcttcccgctctattcgaccctgcaacctctacgtgttcgactttggtttaacgcccaaggaaacagtcctgtcaactgtgtagtaacgctgtgtatatagtatgagagtttgataaggagtgtactgtggttagtgttgatatctgcatcataatacgatataaaaaatatatatgtggtgcatgagggagcaatctggcctgaaaaaaaactttaaaaatcatgcgtctaaatattagcgacccttttggttcctaagtcaaaaatagcgtcgttgtaaggcaggccgctacctgtagcagattgtaaccttagcgtaactatatctcgagtagtgtagcagatcgagtctctcgagtgtggatagcttaaatttctgcctacctgaccagatcaaacaccctctgatcgcctcccgagcttttctgagatcgcacaatctactagtgtgcttaagcaaatgatatttgtttg

SEQ ID NO: 3265 - DNA, 1557 bp, Zea mays
  Clone ID: 700257005_FLI
gcggctgtacttggtacgaggcatggtgcagcaacgaatcttggagtttgcaagaaaagaggccttgccttctttgacaaggtctggctgtgcctatctgatggaggcatgccagtttgagcaccagctttttgcccacttcttcccagcatctgctgctgatgtttctagtatggctcctttaatggaccctctgtgcacctacttgtatgatactctgaggcctagactgatatatgaaggaaacattgattctctttgcgaacttgttgatattctgaaagttgaagtgctgggggaacaactaagcagacgcggtgaatcagtagccggtctccgtccaatattgcaaaggatacttgcagatgttcatgagcggctagcattttgtgctcggactcatatccgtgaagagattgcaaatttccgtccttctgtcgaagatctagattatcctgggaaacttgaacgacctgtggatatgtcttcaagtgctactgttggtgacaactcagacatatatataacatggtacagaccattggagaaaacagtttcatgcctttcaaagctatatcgctgcttagagccttctgtcttcactggattagcccaggaagctgtagaagtttgctcaacatctcttcagaatgcaagcagggttatctcaaagaaagcaaccccaatggatggtcagctttttctgattaagcacctcctcattctacgagaacagattgctccatttgatattgagttctctgtcacacataaggagttggatttctcccatttattggatcacctaagaaggattctcaggggtcaggtctcattatttgattggtccaggtcaacatcactagctaggaccttttctcctcgtgttttggagaaccaaattgatgccagaaaagagttggagaaaagccttaaagctacctgtgaagagtttataatgtccataactaaattagtagttgacccaatgctttcttttgttactaaggtaactgccgtcaaagttgcattgtcctctggtagccaggatcagaaattagattcagttctagcaaaacctttgaagactcaagcttttgcttctcctgataaagttgctgagctagttcagaaggttgccgctgccattcaacaagatttgcccaaagtaatgaccaagatgaggttgtatttgcaaaatccatctactcggatgatcttattcaaacctatcaagacaaatatagttgaggctcatatacagctgcattcccttctgaagtcggagtactctagtgaagaaatgcaatccatcggtatgttgccgatacctgacctgcagtctcagcttgacagccttttgtagtttgcatacaccatacagcggcgctgctgtagtccatgttgacgttgcagtgcagttctttcaagtaacgcaagtaaagttgttaccacaatttcgaacctctctaccatatcgctgttgtaacttttcattgtttatattgaaaaatggaaatggaacgcctcccatgattcatgtgattgtggacaatc

SEQ ID NO: 3266 - DNA, 1224 bp, Zea mays
  Clone ID: 700257028_FLI
gcagcgtcgatacggctggagtggaggacctgatggacgctgtcgaggaagttaaaccttgctggaccaaaccaagtccaaaaaatcagccgtctaatggttttgttacattctccttgactatgggccctgagtatcacatctctcagatcacagatgctgtggttattgcaaggtatctaggtgcaacacttgtactcccagacatcagaggaaatgaattaggaaataagcgaaaattccaagacatttacaatgtggataagttcgtgaggagcctggatggtgttgtcgaagtaatagaggatatacctgatgaagtgagtgctaagaagccagcagtcatcagagtaccgaaccgtgtgactgaaagcttcatcacaggcaccatccagcccatcttccaaaaaaacaagtacttaagactagcggtcattttctcttccgtaagtttaaggccaaaggagacgaacaacaaggacatggacgcaactgcttgccttgcgatgttcggtggcctcgagctgaagcacgaatattctgaggtggccagaaaaatgctggataggcttcaagaattaagcaagaagtcagatgggaaggtcttggcgatcgatttgcggaccgacttgctggaaaagaagagttgcaagacaacccgcggcgctcgaagaaaaggctgttatagccctgatgaggtcctggctttcctgaggagtgttggcttctctgctaacacaaccatctacttgacagagacgtcgtggtacaaaggcctggatgttctgaaggaagaattcccaaacacttggtataagggtgacattatgccagccgagaacaaagctgaattcctgaaatccagcaatgcagacctagcaagggctctggaccttgagatctgttcgcagagcgacgtgttcgtccctgccgtcgctggcctgttctacgggcatgtcacgggtaagaggatcgcgtccggacgcacccagatcgttgtgccttcccagtccagcacctcgacacatgcgtcagacttcatctccacctacatctccaacaagaaccaccttgcctacgcgtgctactgctaagcatccttttgtacggccgttaataagatcagctgaagggaaagtgctctgggtgcatatacaagtacctctcgtggacatgaatgatgttgtacactagctaatgttttgttatgaggaatattagcat

SEQ ID NO: 3267 - DNA, 1881 bp, Zea mays
  Clone ID: 700257062_FLI
gcagatttccttgttaagccgataagaaagaatgaattaaggaacttgtggcagcacgtttggagaaaacaactggcaaacggtgggcctaatgttcagcacatacaacgagaagagaatcttgcagaaagaatccaacagaagactggtgtgacaaaagctgataatttggacagagatgtgccctgtaaaaatagagaatgcagtgaacaagaaagtgatgctcaaagttcttgcacaaggtcagagctggaggctgaaagtaagcaaacagacaacattttggagtataagcaatcaactcaaaggcacttgtctattcctagccacaagaatgttgagctaaatggacagaccaaaatacaaagagctaagggtaataacttgatcccagcaagcgaagacgatttatcgccaaagaaaagaacgtgtttgaatgagaataattctgagagagcttcaagagatatggagctagtccacattatggaaaatcagcagaagtataacacacagtgggaggtggatactatgagaacaacatctaggggaaatgatgagaagggctccatcccagcacatcagttggagctttctcttagaagaactgactacggaaaattagagaaccacgagaaaaatgatagaagaacactgaaccattcaacttcctctgcgttttccttgtataattgcagggctgtgccaaccttaggaaatgctggtgatggtcaattatgcagcacctcagaaacactagtggatgttgaaaataaaaatggagattcagcagatccctctcaagacatgactgaaacaaatcgtcctcctattagagttgttcctgtccctgtccaaggtctcacatttgatgggcagccattctggaatggtacaccagtggcatccctattctactctcagtcaactcctcccatttggaatagcaaaacatcaatgtggcaagaatcaaccccacaagcaacttcactgccacaaaaatctccacagaatgaaccaaatgaaatgggggctaaaccagttataaatgcaggggaacaatttgccatgggtcctcccagtgccagtgggaagcagctgcatgttgaaattcttaatgatgatccacggcatatttctcctatgactggtgaaagtggaatcagtaccgtgctagacagcaccagaaatactctgagcagtagtggctgtgatagcatttccaaccagatcactgcccctactgaatcatccaatgtatataaggatgttcctgaaaccccaagcgccgaagggtcacggcatctgagccagcgtgaggctgcactgaacaagttccggctaaagaggaaggataggtgctttgagaagaaggttcgataccagagccggaaattactcgcagagcagcgtccacgggtcaagggccagtttgttcgtcaagatcatagcatccaaggaagctagggtccagttactgagctggaactctattctattatctaaaaaaagtcactgcaagtgactccactgcggtctgcgggtatcctgatgtcagattttgccgaagagttggaagcagtcacactgagttacagtttgctctgtatatttgctgaagtttgtaatatatgtatgtataggctaacgctgttctttcctaggttaggcacaggacctggcacgtttgaaggtttgtcagtaggcgttagaaaatacaggcatactttgtttcaggtcaagatgagatgtgaccttcagtagcgcatgtgtgctttaagtcttgtattacgtaattaagttgtttgatgtttcgggttagatgtacgctccgtggatgaaatgtaaaggatgtccaccaaaacatgcttgtttccgtgc

SEQ ID NO: 3268 - DNA, 1386 bp, Zea mays
  Clone ID: 700257165_FLI
cttaagagcttgtttaagagtccattaacccacagtttggctccaactcacttttactactgtatgctcttgttcggttgtttcatccatgaatggaacagaacgttaagtgtgcggctcctagtaggctcttcctggtctccaacacggtgtcactttatcataatcatccatgagcgccctgctaatcactgcactgtacatgctctaacaactatgaaaaaaaggcagagaagtatgaaatactcaagccctgtccagagcacagaagtgagactcagtcctcactagggagcaaaaaagttctctccaaatgtggagatacatcatcaatcaaacacacaggtgttgcgatggttccacagggaccaaacaccaagggcaggagggaataagcccttctgaattgcttagagtggttgcttgaaatatctgtctgaaaatgcatttgatagttgatactgtgtgatatttattaggtgtcatttagaacttccgcaaattaatctactcgatgcagcattagtccaccttgctgtgacatttgagacattctgaaaaggagtacttgcagtttgaaattgatgaaaatgaatttgagaggacaaggcaactatatgagagactgcttgataggacaaaacatttgaaggtatggatcagttatgctgagtttgaggcctctgctggcttgggcggtgaagacggtgaagacaaggagaaaaagaatgaagttagttatcaggagcagcagatggagcgggttcaaaaatgtagagctgtctttgaaagggcatttgattacttcagaaccagtgccccagagttgaaggaggaaagagctatgcttcttgaagaatggcttaataaggaggtgaactttggtgatcttggagatgtcagcttagtgcaaaagaaggcaccaagaaaagtcaagcggaagagaccaatccctacagaagatggctccactatagcatatgaggagtatatagattacattttccctgatgaagttgctctagcaccaaacctgaagatcctagaagctgcttacaaatggaagaagcaaaaaactggagatggcgatgagtgatcctggcatcttagtatggcattgtcgtggttcgtgagcattttgccacagccaaaatcagatgccctgcaacactctggccagagctatcggaatgagaatagtcattttttcatgtcacaaaggatgttgttgctgttgaaaagaatcctgcgaattacatttaacttgtaactgtatgggctgtagtttggtggccatgagttgcttccatgcgtcggaacaatgagggctacacaagtcgagatggtgtatgggagtttgtcttgcaattgcaaaggtatctctcc

SEQ ID NO: 3269 - DNA, 1107 bp, Zea mays
  Clone ID: 700257203_FLI
cccacgccgacaccgacgtggtgatcgtgggcgccgggtccgcgggcctgtcctgcgcgtacgagctgtccaaggaccccaccgtgagcgtggccatcgtggagcagtccgtgtccccgggcggcggcgcgtggctgggcgggcagctgttctcggccatggtggtgcgcaggccggcgcacctgttcctggacgagctgggcgtgggctacgacgaggccgaggactacgtggtggtcaagcacgcggcgctgttcacgtccaccgtgatgagccggctcctggcgcggcccaacgtgaagctgttcaacgccgtggcggtggaggacctgatcgtgcggcgggggcgcgtcggcggcgtggtcaccaactgggcgctcgtgtccatgaaccacgacacgcagtcgtgcatggaccccaacgtgatggaggccaaggtggtggtcagctcctgcggccacgacgggcccttcggcgccaccggcgtcaagaggctccaggacatcggcatgatcagcgccgtgcccgggatgaaggcgctcgacatgaacgccgccgaggacgagatcgtgcgcctcacgcgcgaggtcgtgcccggcatgatcgtcaccgggatggaggtcgccgagatcgacggcgccccgaggatgggcccgacgttcggcgccatgatgatctccggccagaaggcggcgcacctggcgctgaaggcactgggcaggcccaacgccgtggacgggaccatccccgaggtgtcgccggcgctgcgcgaggagttcgtgattgcgtccaaggacgacgaggtcgtggacgcctgagcgagcatccacgcgccagcatgcaagcagcgtcttatctgggccggcgccatcacggggtttcttcttttaatctgggactttgttgttgttggacgaatgaattcccttcgatcggttagctttaatctgtctcgttagtgtgtcgtgttcgtgtagcaccatgccacagctacgccatgccgtgtgctctgtcacgtgggggccactcgtggggtctcctgctgctgtcagaacgaataagagaagatggaattgtggtgaaacaataaaaatgcatggtttaaat

SEQ ID NO: 3270 - DNA, 802 bp, Zea mays
  Clone ID: 700257310_FLI
gtccccgacaagccactcgaagccgagatacggccatggactccaccggcaccggagcagcggggaagggaaagaagggagcggccgggcgcaaggtcggcgggccaaggaagaagtcggtgtcgaggtccgtgaaggctgggctccagttccccgtcggccgcatcgggcgctacttgaagaagggccgctacgcgcagcgtgtcggcaccggcgcccccgtctacctcgccgctgtcctcgaatacctcgccgctgaggtactgcaatttgagcccagttctttgtttgtactgatttggcgacggagtattaattcttgcgtcccgattcgttttgcttccttgtttgaccaggttctggagctcgccggtaatgctgccagggacaacaagaagactcgcattattccgcgccacgtgcttctggcgatccggaacgacgaggagctcgggaagctgctgggcggcgtgaccatcgctcacggaggtgtgctccccaatatcaaccctgttctgctgcccaagaagacggcggagaaggcgtccagtggcgggagcaaggaggcaaagtcgcccaagaaggccgccaagtcccctaagaaggcatagactgactgtccggagtgatctgatgtttagcagtaccttgttaccagtatgcggtgatgcgtaggctgcagatgggacgaatgtgcttgtatgtgtatgtgtcctgctgcaagttgtcctttgctatttagaatggaagaagaaatgccttgtttctctgaggttgcaatgtcttttccctaatttcattt

SEQ ID NO: 3271 - DNA, 910 bp, Zea mays
  Clone ID: 700257319_FLI
cttctcttctctctagttatacatttcaaactcttggccgccgcagcggtctctgttcgccgcgccccgccgcagaaatggcgctgccgaatcagcaggttgtggattaccccagcttcaagctcgtcatcgttggcgacggtggaactggcaaaaccacatttgtgaagaggcatcttactggcgagtttgagaagaaatatgagcccaccattggtgttgaagttcaccctctggattttagcactaactgtggcaaaattcgcttctattgctgggacactgctgggcaagaaaagttcggtggcctcagggatggctactacattcatggtcagtgtgccatcattatgtttgatgtcacttcgaggctgacatacaagaatgttccaacatggcacagggacctgtgcagggtgtgtgagaacatccccatcgttctctgcggaaacaaggttgatgtaaagaacaggcaggtcaaagccaagcaagttacattccacaggaagaagaacttgcagtactatgagatttctgccaagagcaattacaactttgagaagcccttcctttacctcgcaaggaagctggcaggggatcagaaccttcactttgtcgaagccgttgctctgaagccaccggaagtgcagattgatatggccatgcagcagcagcatgaagctgagcttgcagctgccgctgcgcaacccctccctgatgacgatgatgacctgatcgaatagatgttccatggcccttgttgatgcgagggggagagcttttattacaaatccgtggtggttcagttcttgtcaggcctagccgtacgtgatttttctgttatgtaacctgctgttgacgagggtttttggtgatccttgattttggtaatacatcgctattgtcaggc

SEQ ID NO: 3272 - DNA, 1564 bp, Zea mays
  Clone ID: 700257449_FLI
agttgctgcacgttggttttcttcagagatggcttcagctggtgtagccccatctgggtacaaaaacagcagcagcactagcattggtgccgagaagttgcaagatcagatgaacgagctaaagattagagatgataaggaagttgaagcaaccataattaatgggaaagggactgaaactgggcacataattgtcaccactactggtggcaagaatggtcaaccaaaacagacagtgagctacatggctgagcgcattgtaggtcaaggttcttttgggatcgtcttccaggctaagtgtttggagacgggtgagactgttgccataaagaaggttcttcaggataagcgttacaagaaccgtgagttgcagaccatgcgccttcttgaccaccctaatgttgttgctttgaagcattgcttcttttcaactactgagaaggatgagctttatctgaacttggtccttgagtatgtgccggagacagttcatcgagttgtgaagcatcacaacaagatgaaccaacgcatgccacttatttatgtgaagctgtatatgtaccagatatgtagggcattggcttacattcatggcactattggtgtctgccacagagatattaagccacaaaaccttctggtgaacccacacacccaccagcttaaactatgtgactttggcagtgcaaaagttctggtcaagggggaaccaaacatatcgtacatctgctcccgatactatagggctccagagctcatatttggtgccactgagtataccacagcgattgacatttggtctgctggatgtgttcttgctgagcttatgctagggcagcctttgtttccgggtgaaagtggtgtggaccaacttgttgaaatcatcaaggtcctcggtacgccaacaagggaagaaattaaatgcatgaacccaaattacacagagtttaagttcccacaaatcaaagcacacccatggcacaaggtattccacaaaaggatgccgccagaagctgttgatctggtctctcggctactccagtactccccaaatctgagatgcactgctgtggaggcacttgttcacccattctttgatgagcttcgagatcctaatactcgccttccaaatggccgctttttgccaccacttttcaatttcaagcctcacgaacttaaaggagtcccatcagacattgtcgcgaaattgattccagaacatgcaaagaagcaatgctcctatgttggattgtgaaatgaccgcgccttgagactggaacctgtggttgcaattgtgcatttcccctgggatgtttgacgatctgaggcatgcgagcctgttgttgaagatgcaaggttacgtacttgtacgacaatgtgacctgtgtagctgagtagtctatgtcgcagtgacatgtaacggcaccccccttcctactaactgacgcttactcgagattgccatagttgatcttgtaatttgttatagagcagtatgaatgtatttatggtagcttgaatctatgtatggattcacttcgtttttccatgtttccttgtctcc

SEQ ID NO: 3273 - DNA, 421 bp, Zea mays
  Clone ID: 700257516_FLI
ctcatcgctcctcttcctcctcccccgcgagcgtgtctcgtgccctattaatgcggtggcggtgacagggagtcgagtcgagtcgagtcgagtcgggcgcggcgcggcgcgggcgctgggacggcgacgagacgagacaccgcccgtgaggaggagtgcaggaccaggcagcgccagcggctccgggctcggctcttgcgtgcgccgctcgtcgtgaaggattcgtcggtggaggtagcaggagtccgcagcaacaagatgattgatggcaggcggcattcggtggacatccccgtctcgagggccctgttggccatcatgcggtccagatccctgagggacccggacaccaactcactggccaagttctccgccaagaaaaccatctgggagggcagctccctcgacgaggacgaactgg

SEQ ID NO: 3274 - DNA, 595 bp, Zea mays
  Clone ID: 700257619_FLI
aacccggaaagggaccagcagcgcaaaggtgagcgagctttccttcggaactctctcgtgctcacctcatccgtccgacagatccacacgaatcctctgattcagagcagggtgttggcattgatcagacgcctgccatggcggatcagttcgaggattcggcgaacaatgtgatcattgaggaggtgaacaagggcctgaacccaggaatggtggttctgcttgtggttgcaagcttcctgctgatcttctttgtggggaactatgcgctgtatgtgtatgcgcagaagacgctcccgccaaagaagaagaagccggtgtcgaagaagaagctgaagaaggaaaagctgaagcagggggtctctgcgccgggagagtaaacggccatgctgccgatcctcccgtccagagctcctattcacatgattattagagaaaaaaattatatatatataccagatggagccgtagtgttggagtaactttgttctgtagatgctctgtctttaatggtacatctgtattggagactttgagaccttgtttcagcaactgatgaatcttagcctgagccgagctagtatgcttcctgttt

SEQ ID NO: 3275 - DNA, 758 bp, Zea mays
  Clone ID: 700257631_FLI
tgaagctcttcaaccgctggaccttcgacgatgtccaggtgaacgatatctcgctgaacgactacctggctgtgactgcggcgaagcacgcgacattcctgccgcactccgcggggcgctactccaagaagcggttccgcaaggcgcagtgcgccatcgtcgagcgcctcaccaactcgctcatgatgcacgggcgcaacaacggcaagaaggtcatggccgtccgcatcatgaagcacaccctggagatcatccacctgctcactgacgccaatcccatccaggtggtcgtggacgcgattatcaacagtggaccacgtgaggatgccacccgtattggttccgctggtgttgtgagaaggcaggctgtggatatctcacccctgagaagggtgaaccaggccatctacctcctgaccactggtgccagggagagcgccttcaggaacatcaaaaccattgctgagtgccttgcagatgagttgatcaacgctgccaagggctcttccaacagctacgccatcaagaagaaggacgagattgagcgtgttgccaaggccaaccgttgagtggagcttgtatcctggtgcacttgcactagtactacgtttctggcagtcgtattttttcttgtgtttttacccatgtttagactttgagacctatatctaaggttttggttctcagtgaacaatgaaaattactgtgaaatgcagttgttttggtgcagaaatgcgcactgagatattctgcttgtg

SEQ ID NO: 3276 - DNA, 1400 bp, Zea mays
  Clone ID: 700257668_FLI
ccaaattcacgcgagctccaatctgtgtgggtctccgtcgtcgtctctctcctcccggccgccggcgcgatgaggcggttgctcggccacctacacccccatgcccagagcctcttcgcttccctgcctcgcaaaccgtccatcgccaccaagctccccttcctcctctcccgccgcctcctttccgatgccgcctcgcctcctgccccctcgctgccgcctcctcccccgccctctgccgacgtcacgaacacagagttgaagaagaggttggagacttactatggggtggatgaagaggctgaattaccatctgtcgctaaggctgttcttgagcggaatctcacgggtgcccatagtgagactgatgatgaccttattgaggagctgcgtagtaagccactccctgaagtccatgaccgggactttgagtctgattttgaggagatgcatgatactgatgaggagctgaatgacctgtacaatacaagggagtatgttgagaagaagatcaagagtgatgagttctttaacatggatgacacaaagtgggatgccatgatcaaggaggccacagacaagggtcacttaactaacatgaaggagtgcgaggaaatcctcgaggacatgctctactgggacaagctacttcctgatgagatcaagcaaaaggtggagaccaaatttaatgagttgggagacatgtgtgagaggggagagatggaacctgagcaagcatatgagatgttcaaagaatttgaggataagatggtcgctgagtgcactgaattaattgaatcaaagatgccaactgacgctgatgaactgactgaatcaggaggtaagaaagttgagttagatgatctacctggcgagggacctgttctaaggtgggaatcacggattgtatttgttcctagtggagatgcatatcatcccaaaaacagaaaagtcaagctcagtgtgactgtgaaggaattgggactttcacgacatgctttccgtcggttgcgtgaggttgttggaaagaggtataattctgggaaagatgagctcacaataatcagtgaaaggtttgaacaccgggaagagaacagaaaagactgcttgaggacactgtatactctaataaaagacgcaatgaaagctgacaaacttgttgaggatgccaggaattcttatgttaaaggaagacttaaggctaatccacaatttatggagcgattgaagaggaagacagataagttgatggcagctgcataaggtgttacagagctccttgttttaacagctcctctctttccctcatcaacatggtgattattctgtattttcaattttattgttggctgtcgcacggggagaataatatgttgtatgcacttagctttgccttcttt

SEQ ID NO: 3277 - DNA, 1585 bp, Zea mays
  Clone ID: 700257680_FLI
ctagattctttcttccgcgcgccctctctctctctctctctctcctgccttctgcctgcggccggcccatgtccgtggcgcccctcctgccctgcgagctgcttctccagcgaaaaggctgctgcgccttgacgcagcaccgatccaccgccgcccaacccttgcgttctgtccggcagctaggtagcgagctgcgcggtggctgcgaccggaagcagggaggggaacagggcagcgaacgccgggcgattgccttgcttgcctgtgtgctccgcccggcgcgagttggtcggtcgttccatgcatggatgacaaggaacttatctcacagtccgacctgcagtcattctaccagcagcagcagcagcaccaccgggccttcggcggcggcggcgggcagcatagcccgtcctcgctggccgggatgcactccgtcattcgccccatgcccaacatgaacatgagcccgtcggcgatccttaactctatcggcgggggctccttcaccggtatgcagttccaaatggacccgccgccgccaccattgctgcacaccgccgccatgggtgcctcggctcctacctccacccccggtgccgtccccgcgaaccccacggagccggtcaagcgcaagagagggagaccgcgcaaatacggtcccgacggcaccatgaagcagcagcagctcgtcgccgcgcagccaaggatagggccgtctggtcccagcatgatcagcagcgccgggatagaggactcttcgcagaagaagcggcgcggccggccgccgggcaccgccaagaagcatcagccctcgccctctcaaggcaatgcgttcgccggttcagctggaacgagcttcactccgcacatcatcacggcgtctccttcagaggacgtggcggcgaagatcgtcgcgttcgccacccagtcgtcaagggcggtgtgcgtgctctcggcgatgggctccgtctccagggccgtcctccgccacccggccgacggctctcccatggcgagggttcacgcgtcgccgcagccgtacaacaacaaccctgccatctacgaggggttctacgagatcatgagcctaaccggctcgtacaacctggccgagggctcacaacaagaacagggccagggccagccgagcggcgggctcagcgtcacgctctgcagccctgagaggaatgtgatcggaggtgttttgggcggcccactggttgccgcaggcaccgtgcaggtggtactggggagttttcaccaaggagggtcgagatccaagtccaagaaaggcgggaagcagcagcaggcgccagcgccggccgccttcagttccgactcgctcaccggcggccaggaggcgtcgcccagctctgggcacaaccaaaatctaacgcctccgccgccgccgccctccgtgacgggagggtggcccacctccgggatgtttgacaccagcattgatatcaactcatctagaggatagctcatttcatttgtcgataattccagccctcgagaaattttctgttctcgcacaagaatgatcgaaaccatacttcgaaatagattattcggtttctcc

SEQ ID NO: 3278 - DNA, 839 bp, Zea mays
  Clone ID: 700257689_FLI
ccgccagccactccaaacacttgcgccgccgctgcctcacaggtaaggccgccatggtctccggttcgggcgtgtgcgcgaagcgcatcgtggtcgacgcgcgccaccacatgctgggccgtctctcctcgatcatagccaaggagctgctcaatgggcagaaggtggtcgtcgtccgctgcgaggagatctgcatgtcgggcggcctcgtccgtcagaagatgaagtacctccgcttcctccgcaagcggatgaacaccaagccgtcccacgggcccatccacttccgcgcccccgccaagatcctgtggcgcaccatccgcgggatgattccgcacaagaccaagaggggggaggcggctctggcgaggctcaagacgtacgagggcgtcccgccgccgtacgacaagaccaagcgtatggtcatccctgacgctcttaaggttctgaggctacagcctggacacaagtactgcctcctcggcgagctctctaaggaggtcgggtggaactaccatgacaccatcagggaacttgaggagaagaggaaggagaaggccaaggttgcctacgagaggaagaagcaattggccaagctgcgtgtcaaggccgagaaggcagccgaggagaagttggggtctcagttggagattcttgcccctatcaagtactgaggagctgtgctttgtcatcagttttggggaacatctagtctttgttttaagtgttcggtaacagtttgtgacagtataatctggtaaaccgtgttatttttctgccactcctatttgaacacattttctagctggtgaatgaactgtttggtcgatcttgttcag

SEQ ID NO: 3279 - DNA, 1292 bp, Zea mays
  Clone ID: 700257696_FLI
caatctcccctttcgtcttctcttcccgctcccgtcccgaaattagcccaccgattagcttgcttgccctagcagatcgaagccgtagccctagccgaggagcgcccatggccgctgcgatcgtggcctgaggcggcggggctcttcccatggggtgaggggatggaccctagcctgaaggaggaggtgatgaaggcggtggaggaggcgaggtccgcggcggcgccgcggtgccgggtggtgcggatcatcgtgcacgacgaggacgccaccgactcgtcttccagcgacgacgagggagaggaggcgggggagcgcgccgcggcgcacccggccgcggcgccggcggggagcgtgaagcgcagccgcgtgctgctccagtccgctgggtgcggggcggaggaggacggcgagggggccaggttcacgggcgtgcggcggcggccgtggggccggtgggcggcggagattcgcgacccgctgctccgccgccgcgtctggctcggcactttcgacaccgccgaggaggccgcggcggcctacgtcgcagcgcgcctccgcatccgcgggcccagcaactcgctccctccgcccgagcaccgcccggccttgcccccacgtcccccgccgccacctcagcagcgggagaagaagctgccgctgccgccgccgccgccgcctctccttccgcttccgccgaagaagcagcagtatccgccaccgcctctgcttccgccgaagaagcagctgtatccgccaccgcttcccctcctcccaccaaagaagcagcagcagcatcaccatcacccgtcaccgcctctgcccacgcttccgccgaagaagcggctgccgtcgccgcctctgctgcgcgaaagcaagaagcagtgcgtcgcctcctccccagcggagccgcgtttcatgccgctgccggtgtgggcgctgatgtccggctccgggaagcgcaagaagcggtcgggctgtggcgggcgcgtccccgccctccacacccccgccgccgaggagacggggcgcgcctgagaaggctgagacgactgggacctccctgcttctggtatccatcccctaccgcttcttgatcatgccatgccaatctgaattgccgctcaatcggtgctgatgtgaagagcctgtaacctctctgattcatgaactgatgaatttgtgtacatatgctgctgctgctgctgctggaaccgcagcgggtgatgaactgatctgtaaaacccgacgtattattcatatgtaataaataagtatctgttgacaatttc

SEQ ID NO: 3280 - DNA, 1466 bp, Zea mays
  Clone ID: 700257727_FLI
gaaggatcatcatcaccaggatcaagaaagaactcgtcgattccttaccccttccgtcttcttctgatctcagctctatccactagctaggagatggacatgaacaacgggtggcttggcttctccttgtctccttcggcagcgagcaggggcggctacggctacggcgacggaggcggcggagcgagcgcgagcgcgtgcggggatggagagggctcttgcccctcgcctgccgcggctgcctcgcctctccctctcgtggccatgccgctcgatgactctctgcactatagctctgctccagattggaggcacggcgcagcagaagccaaagggcccaagctcgaggacttcatgagcatcacttgcagcaacaagagcagtggccgcagcctctacgacagctgcggccaccacgacgacgagcaggccagcaagtaccacgaggtccacggcatccaccccctctcgtgcgggtcgtactaccacggctgcatcagcagcggcggcggcggcggaggcggcattggcctggggatcaacatgaacgcgccgccctgcaccggcgggttcccggaccaccagcaccaccagttcgtgccgtcgtcgcaccacggccagtacttcctgggcgccccagccgcaagcgcgggcccgccagcaggcgcagcaatgccgatgtacaacgccggcggcggcagcgttgtcggcggctccatgtccatctccggcatcaagtcctggctccgggaggccatgtacgtgcctccggagcgaccggcggcggctgcgctgtcgctcgccgtgacggatgacgtcccgccggccgagccgccgcagctgctgccggcgccgttgccggtgcaccgcaagcccgcgcagacgttcgggcagcggacgtcgcagttccgtggcgtcaccaggcacagatggaccgggcggtacgaggctcacctgtgggacaacacttgcaggaaggaaggccagactaggaaagggaggcaagtctacctaggcggctatgacagggaggagaaggctgcgagggcttatgacctggcagctctcaagtactggggcccctcgactcacataaatttcccgctgagccactacgagaaggagctggaggagatgaagcacatgtcgaggcaggagttcattgcacacctgagaaggaacagcagcggcttctcgaggggagcatccatgtacagaggagtgacaaggcatcaccagcacgggagatggcaggccaggattgggagggtcgctggcaataaggacctgtaccttggcacattcagcacgcaggaggaagcggcggaggcgtacgacatcgcggcgatcaagttccgtggcctcaacgcggtgaccaacttcgacatcagcaagtacgacgtgaagcgcatctgcgccagcacccacctcatcggcggcggcgacgcgtgcaggcgctccccgac

SEQ ID NO: 3281 - DNA, 1825 bp, Zea mays
  Clone ID: 700257752_FLI
tgctggacaaagctagtttggaaacggatacttgtccttttacagagcaaataaaatctggaactatttcactacaggaggcacacatgaagactgaggtatcctgtacactaaacagcagtgtcattcctgaaggccataaaagctcactaagcttgccagttccttctggccactcactttcttccaattttgcgacaaggtctttaagtactgcaggagaatctgtgaaaaacacatatgacttggtagtatttaaagggagtagagaatcttcgcgggctggagactgtatctcttcgcctggtgtgcatcataacataccgccaataatgattgatcaaggaagcaacatgaatcctagtatggagagctcaaacaattcacataggctgacggcatctaacactaatgcaactcagttttactcttacaaggaccaaatgcatgtaacaccagagactagggcctcagtgatgacagaaaaagatagcagtcaagcttctgctgcatcaagtcagccctttgcgggaactgttttaagagcacaaagtgtatctcaggaagcttcacctagcgtctttacttcaaagcctctcatagattcttcacttgtgaaaaatacatatgttggtttaagttcaggcggtgcccatattggacatccaaattttggtaaccagcaaccaagtgacgaatgccttaaaagaaaatctgaatctctatctggttcagaagcaaggggtcattcagctgcattggtgcaacctgctctaggaaatcataatgggagtggaggtgcacacaagggccttcggatggctaacgttgtacatcgattcaagagcttagttgaatctttggaaattggtgttgtgctatctgggaggttgtggtcctcaagccaagcaatcttcccaaaagggttcaggagcagagtaaaatacttcagcatcgtggatccaacacaaatggcatactacatatctgaaatattagacgccggaccacagggacctctgtttatggtgactctggaaaactgtccaggcgaactttttatcaacgtctctcctgccaagtgctggagcatggtccgtgagaggctgaatatggaaatacggaggcaactcagtacgggaagagctaatcttcctgcactacagccaccgggatcagttgatggttttgaaatgttcgggttgctgtcaccggcaatagttcaggcaatcgaggcacgggatagagatcgcatctgcacagagtactggagatccaggcctcatgttgtcactgaagatcgtgcgacggcgccacctcaggctcagggtcctctgcatgcgctgaggggtctattccagcgagccaaccgcaatgagctgctagccctacggagtctactggtgagcaacatcagcccggacgacttctccaggcggcaggctacccaaatcctcgacgaggagatcgccaagcagtggcgctgacaggcgtaaatacaactctgtaatctcttgatggcatgacgggaccaagcagttttcgaccctgacgagagagcggctccttccgttgccccccgtgcccattctttgtattgttgtgtccatgctccatgccataagatcttgtccccatttggatgcgatcgaatgaccgacgacggctcatcaactgaccagcgtacataccgtctgtctggaaactcttgtggtgttgtaggtttagttatttttcttttaaacgaaatatttaaccttcttttttagtgaggctgaaacgcaggctcatgagacctgagttttttacatgaaaggttgtgtac

SEQ ID NO: 3282 - DNA, 1300 bp, Zea mays
  Clone ID: 700257777_FLI
gtccgccactcctttagtagcttgtgatttgtacgtcgacgagatcactggtcgggtggcggacgacgacacatggggaagggtagtgtgggtgcatcatggtgggcgttcctcctgctcgccggcgtgctgctggtcgtagcagccacggccggggcggaggacggagtggtcgaacgggaccgcaaggaggacctgcggtggtgcaagcaggcgtgcgagtggcagtacggaaaggacaccccgcggaagagggaatgcgagagcgagtgccgcgagcggcaccagcaagctgacgcgggcgaggacggcgacagcggcgtggacgcctacgtctcccgctccgggaggggcgagtgccggcgccagtgcctgcgccgccacgagggccagccgtgggagacccaggagtgcatgaggcggtgccgccgccgcggactggccgtcgacatggagcaagagtacggtcgcggcagcgagagcgcgggcaagtgccgggagaggtgcgagcgccaccaccgcggggactggtgggagaggcagcgctgcctgatggactgcaagagccgggagcgggaggagggcggcagcggcgaggaggaggaggaggacagcggcgaccgctgcccttgcgagaagcagtgcgagggccaccacgaccgggaaagcaggcagcagtgcgtccaggcttgcgagcgccggcgacaggagcgcggcggcagccgtgactccgacgtcgacgaggacgacagcgaccggcggtgccagatgaaatgccggcgccacagcgatcggcaggcgaggcagtggtgcgtgcagcgctgcgagcgtaagcaacaggaggacgccgccgccgacgacgacgagaacagcgaccggtgccagaagagatgccagcaccacagcgactggatgaaaaggctgcggtgcatgcaacggtgcgggcgacaggaggagggcggcgcacgcgacgacgctgacgacgaggccagccacggcgaccggtgcgagaagaagtgccagcagcaccaccgcgactacgacaagaagcagcagtgcgtgcgcgactgccgccgcggccgtggctgggaaacggtggccggcgccatccttgaggtggtgtgacgatcgacgacgtgcatggcgtggcgcacagagctagtaataaaagggtagtgtacgcttaccgcgtacgtacgtgtcaccgggcgtggcactctccagtctccagggacccatccaccaaatgctactgctccttcgtagggagacgtgggaataaagagtggtagctgcatgc

SEQ ID NO: 3283 - DNA, 1055 bp, Zea mays
  Clone ID: 700257810_FLI
tcgacctcgccaatcttcctcccgctaaccctagtccagcacccgagatctactccgcgcaaacagccatggcggagacgctcgacatgaccctcgacgacatcatcaagaacaacaagaagagtaacccctcgtctcgcggggcccgccgcagccgcggcgtatccgcccctggcggcgggaccggcggggtcgggccgaccaggcgcccctttaaaagggctgggaacaggcaggcgccctaccagccgccgaaggcccccgacgctgcgtggcagcacgacatgtaccctgcggtcgccgcaggaggcggcggcggcggcgggagggtctcggctctcgagacgggcgccaagctctacatctccaacctggactttggggtttcgaacgaggatattaaggagcttttctctgagctaggtgatttgaagcgtttttcgataaattatgatcgaagtgggaggtctaagggaacagctgaagttgtatttgcaaggcgttctgatgctgtagcggcggttaagaaatatgacaatgtccaacttgatggtaagcccatgaagatagagatagttggtaccaatactccagctgcagcagctgctcatccagtccctaatggtggtcatgctaggaatgctgcgaggagtgcaccaaaggatgctgctccagcaggtatgtcgcagcatagaacccatcagaggggtgggaggcgtgctgctggatctggtggtggtcgtcgtggcaaagagcgcagcaagccaaagtcgactgaagaactcgatgctgatttggagaagtatcatgctgatgcgatgcagaccaactaaatacattcacaaatttgatattcgacatcaaatatcaagcgcattagtccttccattacagctgtttgtgctaccatgttcaggggacaacaaaccttttctttgttgggggcgggggtattgctttactgagttttgtggattttatgtgtttacaatagaactagagttgggtgatgctgaatacttttatggaaattacttggttgcaagttgctcgac

SEQ ID NO: 3284 - DNA, 1142 bp, Zea mays
  Clone ID: 700257826_FLI
cagcctttcgctccctggcgctcgctcagctcgcggagcttcctctacgcggcgctcctgctccccgagctcgcccctgcgcgcgctcagctccagcccagctccctgcatccatggccactgcgcgcgccgtgcttctttctctctgctcgccccggccccttcgctccctgggcgtgtcgcgccctggccatggacatcggtatcggcgagctcaccctgagttccctggcctgaccgacttcctctgctcgctcgtgcccggccaactccctgctccagtttcccctgcgtcggcctcctacgcgcaaagttcgtctgtggctgcgcgcacgaatccctgctcgccagcgtgctctggattcaaccatgaagcgtcccctgcgtctcctcgccgtgatcttccttctccagccgagtccctcgcgcaggccgcaagttccctatgttccacgtctgctccctctgtctattccctgccgcagagctcctgtgtgtgcgagttctttggtggacgtgcgctggccgtgctccactttgcccatcgcagcgcttcagctccagctcgctgcgcgctctatcggtttgctcaactttaattcccaactacatcgtcgatctcgtagacaaaagtaagcgaggtctctgtgcatcgcttatcaagtactcggtcgaagacttcaatcgaagatcgtcatcattccgtgcgtcatcaaagaatcccaagaatcgggtgaagacaaagttagcggcatgaagttcgtgtgacacctgccaagcgctcgacaaattgactggatcggaaaatcgctaccgatctcgcggattcgtgtcagctgttgaaacggtaagctgatgaattatttagaacagttcgatcgatgaataaattaatgtgctagtgcgatgctcattaaggtgctcgataaattgcgtaagtcacgaaactctcgtcgacttcgcagttcttgcgattatcgagccaggttcagttatagtgagttatttcgctattccagtcaattagctgaattaatgtaccgagtagaatattagtaggcctgtgtggtgaaggaatattttaatcacttgtaaagatgtagtataatttataaagcaagagataaggttagcatttaatt

SEQ ID NO: 3285 - DNA, 691 bp, Zea mays
  Clone ID: 700257966_FLI
ctcctgagcactttctcctcgtccccgacaagccaatcgaagccgagatacggccatggactccaccggcaccggagcagggggtaaggggaagaagggagcggccgggcgcaaggtcggcgggccaaggaagaagtcggtgtcgaggtccgtgaaggccgggctccagttccccgtcggccgcatcgggcgctacttgaagaagggccgctacgcgcagcgtgtcggcaccggcgcccccgtctacctcgccgctgtcctcgaatacctcgccgctgaggttctggagctcgccggtaatgctgccagggacaacaagaagactcgcattattccgcgccacgtgcttctggcgatccggaacgacgaggagcttgggaagctgttgggcggcgtgactatcgctcacggcggtgtgctccccaatatcaaccctgttctgctgcccaagaagacggcggagaaggcgtccagtgtggggagcaaggaggcaaagtcgcccaagaaggccgccaagtcccccaagaaggcatagactgactgtctggagtgatctgatgtttagcaggaccttgataccagtatgcggtgatgcgtaggctgtagatgggtcgaatgtgcttgtgtgtgtatgtgccctgctgcaagttgccctttgctatttaaaatggaagaagaaatgccttgtttc

SEQ ID NO: 3286 - DNA, 1936 bp, Zea mays
  Clone ID: 700257969_FLI
ctttccgctgctgtaaacagagtcgagcaacagagctgtgaccattgagaggcgagtggttaggacctaggcctctgatccatgcaggtccctgtgggtttcctcggcaagctctggagcttcgtttccttcgtgcccttcttcgtcctcctcctgcttctgggatccatcaaagctgccatagtcggcccggtcacggcttccatcgtgttcttcgggagctctgcagttattattggcctctggcctgctcatttcatctggacatactactgcgttcttaaaacagaaaggatcgggctgcagttgaagattcttactggactactgctgccattgccactgcttctcttgccagtacttgctagcatcgggagtctcctgggtggtaccggatacggagttttcgtacctctcatggcgaccttcgaggctgttggcgagggtgtgactgacaagctgacccattgtttcacggatggaaccgtaagcgcgatggctggagcttgcacggttgtccgtgatgtcaccgatttctgcttccactcgtacttctctttcatggatgatcttattgacaaaatgggggacaatgaagaagcccctctcgacatcaagttgtcttatctaccacggagcatggtcgttgcctttatcgccgttccagtggatgtgctgctgataagcgcagtggctttgtggaaaagcccctgcatgttgttcaaaggatggcagaggttatgtgaggatctagttggaagggaagggccgttcttagaaactgtctgcgtgccttttgctggtttggccattgtgttatggccacttgcggtgattggggggttacttgcttcattcttcagcagcttcttcttcggttttcgcgcaggactggttgcttatcaggaggcttctttccaaatgggacttgcatacatgatttcagcagtagcaattttcgatgaatacaccaatgacttgctttacctaagagaaggatcatgccttccaaggcccaagtatcggagagcagatatcatgagggagtgtgaaactgagcctgcagagaggcagcaaactggccatcacaagcatagaaggacgttacctcgatcaaagacgttcatgcaaaccgtccagcgactacgaccgattcaaatatgggattggttcttccggtcctgtgagctcaatggaaggatactagtgagcgagggcctgatcactgcccaagacatggagcaatacatcaccaataatggaaaatgcaagaagctgggcactaaattaccttgctggtgtatcttccagtgcctattacgatctgcaaactctgattcagacggtttggtcatatctgatcatgtccaagtgacgaccctcaactggcccaaagacagagtccttgactggctgctcggaccactcctgctcatcaaggatcaattgaggaaactggaggtcaccgaagacgaggagatgtgcttgaggaagctgatcatgacaagcaagaacgagaagccatctgactgggacgattcgggtttcccgtcagacgacaacataaagagaggccagctgcagtcgataatcagaaggttgcaagggattgtggcctacatgtcccgagtgccgagcttcaggaggcgcttcatcaacctggtcaaggccatgtatctagaggccatcgaagcaggggctatcgacggatcgcgcaaagttaaggcggatgttgctgacaggtgtgcggaagatattgccggttcatgttcatcaaccgacacgcgagcgaacattcacatggtctgatgatgtttcaccagcatagcagagctcgacgagctgtgctgaattgtgctgaactgtgccaaggctgcaaacaaatacaatcgagcgaccatatcttctcattagcaatatggcacataattttgtc

SEQ ID NO: 3287 - DNA, 937 bp, Zea mays
  Clone ID: 700258055_FLI
ctaccaccgcaccacgcgctcccgtttccgccgatccgagcgcgcagatcgcggaagcccagcggctcagagtccagggggagggagctcgcggcggctgaggaaggcgttcaccaccgtcgcggtgagtgctcccagtcaagcgcctcttccttcgtagtgtcaacaattccgccccgcgcccgcgcggatctgattgtctcgatcgtccaatcgagcggatttcattgaggaagagatggggctctcctttgggaagctgttcagccgcctcttcgccaagaaggagatgaggattctcatggtcgggctcgatgccgccggtaagaccaccatcctctataagctcaagctcggcgagatcgtcaccaccatccccaccattggattcaatgttgaaactgttgagtacaagaacattagcttcaccgtttgggatgttggtggccaggacaagatcaggcccctgtggaggcactactttcagaacacgcagggacttatttttgttgtagacagcaatgatagggaacgtgttgttgaggctagagatgagctccacaggatgctgaatgaggatgagctgcgtgatgccgtgctgcttgtatttgcaaacaaacaagatcttcccaatgctatgaatgctgctgaaattactgacaagcttggtctgcattctcttcgccagcggcactggtacatccagagcacttgtgctacatctggtgaagggttgtatgaggggcttgattggctttccaacaacatcgccaacaagtcttgaagcttttcagcagggctcctagcaagaggaagacgtctgaacaacttatggatgcttttttacattttattacaaagatactccctctgtctcgatttactattccttttgggatagtggttgattcatataatatttgatgtatgtgtttac

SEQ ID NO: 3288 - DNA, 1361 bp, Zea mays
  Clone ID: 700258092_FLI
acgaggcctccatttggaccaccgggaccagaacccgatcgggcacggcggagaacgcgagtacccaggctctaataatttgtacaaaaccgatggaaacttctaaatctcctcaatcgtcaaagaacagtcatattgtggtgccttctgatagtaatggcccccgatttgacaatgatggtttttcttcagaagctgcatcaaatcaaatggtcgttttcaactctgaagcaggagataaagagcaagatgaactgggggaaaaccgtttgcagaagtcaatcataacaaggggaatatcgccatctattggagcattcactgtccaatgtgctaaatgttttaaatggaggcttattccaacgaaagagaagtatgaagaaattcgtgaacgtattatagaggaaccttttgtatgcaaaagagctcgtgaatggagacctgatgtaacatgcaatgacccagaagatatatctcaggatggtagcaggctttgggctattgacaaacccaatattgcacaaccccctcgcggatgggaaaggcagattaggataagaggtgaagggggtaccaaatttgctgatgtatactatacctctcctactggaaggaaacttaggtctctggttgaagtcgataggttcctccaagagaatccggagtatggtgctcagggtgtaactttagctcagttttcgttccagatacctagacctctacggcaggactatgtgaaaaagaaaccgaagttgataaatccaagtgatgaagcaagtatgattgcctctaagtcttttcaaccagaagaagtgaaacccatagcctgggcagttgctacaaaacacgagggcgatgccagtgaagaagcttctctcaccgatgaggcacctacatcagaagtcatgctagcccggaagagaaaagcaggaagctctttgtcgatagagccaaaccatctctctgatgaacttgaaccaaagctggaggatgcttagaacggggagacgtctacctgataagtaaaagttagcagcatcgtgatgccaactgccccctatcatggttttattggccctctgcttgtttctcatttccctttggagccagtttctctgttttgcgaggtcacacaagccttatttgtagtattacaacacagaagctggctgacccaaaatccgacactctgggggcagcaacttaacaaaatgtttgtacgagggtttagagccccacggtgcttctttggataagtatgtttattaccttgtacttagctaggaacctgcttatatgtaagatctttgtgtacgacggagaattgtcacagcggcataattctggtgcatcttggattt

SEQ ID NO: 3289 - DNA, 2605 bp, Zea mays
  Clone ID: 700258155_FLI
catacagctgttatgaagactatcttgctgcaccgtttcccttaggtttatacaagcagatttttcttccatctgaaatgacagtattaccggcaagcttaggagcctctatgtgcatcttcagttctgatatcttgcatgatgagaaggttatagatctggctaaccacacagtatgtgagtctgatgttagtggtgcaactgctttgagctctactgctgcttcaagtgatttatatggaactcaaacaatcggttcatatgggaaagttcgttcattgaaagctgtagctgttcttcaaatgttggagaagcagatggggccagactcgtttcggaagattttgcaggtgatcgtggctccaaatcgtgcctctagaacacttagtactaaagaggcaccttgcaaataaggtcggtaaccttgaacgtccattcctgaaagaattctttccacggtggattgaatcttgtggatgtccagttatgaggttgggaatctcatatagcaaaaaacggaatatggttgaattagccgtttcaaggggttgtacaggaaaagctacacctgatcctgatagtcacaccaacggtgacactagagaaggcgatgctcctggatggccaggaatgatgagtgtacgtgttcatgagaccgatggggcatatgatcatccagttctgccaatggctggtgaagctttgcaggtggtggaaatacagtgtcattccaaactagcagcaaaacgtgtttggaaatcgaaaaagaacacaaaacttgatggttctgatgacaacatagatacctctaatcaagagaatcgcacaagcatggattcacctttgttgtggattagagtagacccggagatggaatatcttgctgagatccattttcaccagccagttcagatgtggatcaatcagttggagaaagacaaagatgttatatctcaatctcaggcaatatctgccttggagaaattacctcagctgtcttttgctgtgattaatgccctcaataatttcctaaatgacacaaaggccttctggagagttagaattgaagcagcatatgcattagctgttacatcatctgaggcaactgatttagctgggttgcttcatctggttaagttctataaaagccgccgctttgattcagatattggaatgcctaggccgaacgacttccatgatgtcccagagtacttcgttcttgaggcaatcccccatgcagtagctcttgttagatcatcggacaagaatagccccaaaggagccattgagtttattcttcagctactgaagtacaatgataacaacgggaatgtttactctgatgtgtactggctatctgcaatggtcctggcaataggcgaactggaatttggccagcagggcacgggcttccttccctcccttctcaagcgaatcgatcggctcttgcaatttgacaactttatgcctggttataatggtgtcttgactgtcagttgcattcgtacccttgcacgaatagcaaggaggttgtcatcttctgtatcccttgatcccatacgtgaattgattgcccctttccgcgacatggacaagccatggaaagttcgaattgaagctagcatggttcttattgatcttgagttacaccataaaggacttgatgctgctcttttgttgttcttgaaatatgtggatgaagaaaagtctttgcgaggagcgacaaagctggctgttcatatcttgcgtatatgtcaagcaaatattgttccttccgccaatgatcaaataaatttgacaactctaattggtcttctccatctgcttgctggcacaaaggcatacaataacgtatttcttcgtcatcatgtgttctgcatattgcaagttgctgctggaaggtccccaacattatttggtgttccaaaggtcgtcacaccccctcttgtggtcaaggacatctgtagtgatcagcacactaaagctgattcctcgattcctcaaccatcaaagcctcaggaaccttccactagcactcctagtgtccgggaggtcttacctacctctggccccactaaagatgctgataatatatctaactgcagcgaacgaaggaatgtggtcaaaattagggtgaagcttactgcgtcttccagtaaagcatctgatgctgaccacagaggccattttcatggtggaagaaatgaaaatgaaccgggtccatgtagctcaatgtcagtggatgcccctatggttgggactgcaaatgaaccattaaatgtaagcaatcataacattgaggaacagaactcatgtcatgaccgtgaatcaaggatgtcggcaagcgttagcactgttaagctattggacaggcatgatatttctagggagctacagtgtactgctgattcaaggttggatgctcttcccaagaaccagttctctcctgccattaatctgccagaagctttagacaagcctggcagtcagcttgaaggtgtctccaccagctatgaaggaaaccaagctccagaatctgtgaacggagtggaaacgaaagagagaaagaaaaaagacaagaaagataaaaagcggaaacgtgatg

SEQ ID NO: 3290 - DNA, 1267 bp, Zea mays
  Clone ID: 700258204_FLI
gtctcgcttctccccaccccgcccgctacagcgccggtggggggcccccgcggctgccggcgaccggtcgccgccgccgaggccgtcctcgccgccccgacattctccagctggcagcattagccatggtttagcggaggcgattctcgttgcagctgtttccggggtggtgggttttcaaggaataaagaatgatcaacctcttcgaattgagcgttggagccagcgccaaggtctcctcaagagatggctctccggtgagaggaactcagtcggagcggaaggagtacgccggatcaaaggcgcctccagcttcgcttgagaagacgctatcatttgagattcgagcttcccacttcgaccagcccagccctacatcggtttttgatgtacaatttgaggatatcagcgagaaatcccccatttcatcagaaagtgcaattactgctaaacaagagcctctatccaggtctataccaatcggatcgatcgcgaggaccttgtcgtgggacgacgcttcccaagaggctcctccgcagtgttgtaccaaaggagacaacagccacgagcaggagcagcacgagttcgtcgagaagaccctggcatccgctggcttctgcaacgagaagacccaggacatctttgcccggtggcattcgctcgaccggcccttggaccccgccgtggtcgagcagctgctggaacgcaaggtggaggacgccaagtgccgagagaggcggtcgaaccagaggctcctaatcgactctgtcaacgccgccctgctcgacatcggccagagcaaagtctgggggggcgcgtacccttgcaccgcacggcactattccaacgctccgggagttggcacgtgcgatgatgatgtgctagtgaccgacgaggcgtggaggctggtgaggagctggctcttcgatgacgagaacgacatcgccgggttgggggacaacgcgggccttgcggcggactgggttgtcggtagggagatccacggcaaagggtgggccgagacgctgcggatggaggtggacgagatgagcagggagatatgtggcgaggtcctgggcgagttggttggggaggcgttttcggagcttgccggcgctgcggggtggcactgaagctgcctgccttctattttccctgcttgtggcgtccacctgctgctgctgcttttacttccaatccggttcttgtgtgtatattaccccctcgtaactgctctgttctgtacgccgctcaaagtgttccctgc

SEQ ID NO: 3291 - DNA, 452 bp, Zea mays
  Clone ID: 700258230_FLI
cctagctctgggtcattcagctccaaggtgaccagcgcaagaatgttgctactttcctagttcaggtattcagaatcttcagacctggccagctgaatactgttttaccataccgataaatgttccatctgttaatactgattgtgtaattattacttgtcttggtaggctgggattgcgaagaaagagaacatcaagattcacgggttctaagggacctgtaaatgcttgtgccctatattgtgtgcctcaacatattggggagcttgaagcatcgacagttgctagtcattgcttacttatataagaacataagtagtatttgctattgtcaagtgtgccttgcttgatgcaagttgtgttttcgtctcattattattatgcacggccatcgtacgtgtatggcttgtatgggttattgccaacttaataaaagcacactctgtttgcct

SEQ ID NO: 3292 - DNA, 692 bp, Zea mays
  Clone ID: 700258271_FLI
tacagattgtggcccacatactgattaaggctctcatggcaatgccagcccctgacttcagtttgtgcttattcttaatccctgaacatgtgcaaatggaggagcaattcaaggtattgatagttctttctcactacctagagactgctaggttcagtcaattttgggatgaagcagcaaagaaccgccacatatcggaagcagtgccaggtttcgaacaagcaatccaatcctatgcgattcatgtactttccttgacataccagaaagttccaaggcctattcttgtagaggcaatcaacatcgaaggtctcgcgttggacaagtttcttgagtaccatgccgcgaactcaggttgggtgattgagaagggtgggcagtctcaagtgattgttcttccgcgtaatgagttcaatcacccagagctcaagaagaacacagccgatatccttccgtttgaacacgtaacacgcatattccctgtccttggctgattcaggcgtgctgagagatctatacaaaactcagcgagtgaagcttctcttagtcattgcatcttcagtttgtagtgtaccctattgagattatctcggtataccagtcctttttatgccggagttggtttctgcaacctatggttattgttattactataacgaaatgctcagatatgagattggtcttgtccttcg

SEQ ID NO: 3293 - DNA, 813 bp, Zea mays
  Clone ID: 700258314_FLI
ggctagcagcacagcagcagccagagccatcccctctcctcgctacgcttcgcttcctcggcgccgattcctcctcctcctcctccaccctcgtccgtcccgttccggcgcgcgagctcgcccgagatggcgaacgcgagatcgggtgtcgctgtgaacgatgagtgcatgctgaagtttggcgagctgcagtcgaagaggctgcaccgcttcataactttcaagatggacgacaagttcaaggagatagttgtggaccaggtcggggatcgcgctaccagctacgatgacttcacaaacagcctccctgagaatgactgccgatacgcgatctatgatttcgactttgttactgcagaggatgtccagaagagcaggatcttctatatcctatggtccccatcctccgccaaggtgaagagcaagatgctttatgcaagctcaaaccagaaattcaagagtggcctcaatggcattcaggttgaactccaggccacagatgcgagtgaaatcagcctcgatgagatcaaggatcgggcacgctaggcgcaccgccatcgtgagtttcatgatcacgcatcatggactcgcctactactgtggatttgtacgccattatagacttggtgctgcgaaagactgctttggtgatttgtgggtttgttgctgtgtaaaaagatcctcatggcttccagaagaccatgaaggtttggatctatcatgtaattccttgttatctgccaattatgtatgaactatggacatgtgttgcgctgttcaactcactacaaataagtaatcgatatattccct

SEQ ID NO: 3294 - DNA, 1781 bp, Zea mays
  Clone ID: 700258317_FLI
cccgaaagccgccaagcggctgctgcgcaaggtgcgaaaggcaccttccctgcccgattggcgatttaagtggtgggggagggaaggccgatggtcagtgaaagagaggtaggtggccggacggtggtggcatcgccaattcaactccgcatctgaatcggcactcggcagcgcgccagctccataggaggagatggcgctcacaagaatcggtcttgctggccttgcggtcatggggcagaaccttgccctcaacattgcagagaaagggttccccatctctgtgtacaacaggacaacctccaaggtggacgagaccgtgcagcgtgccaaggcagaaggaaaccttcccgtctacggcttccatgaccccgcgtcctttgtgaagtccattcagaagccacgggtggtgatcatgctcgtcaaggccggcgcgccagttgaccagaccatcgcgacgctcgcagctcacttggagcagggcgactgcatcatcgatggggggaacgagtggtacgagaacacggagaggagggagaaggccatggaggagcgcggcctcctgtatcttggcatgggtgtctctggaggagaggagggtgcccgcaacggcccgtccttgatgcccggaggctcgttcgaggcttacaagtacgtcgaagacattgtcctcaaggtggctgctcaggtccctgacagtggcccgtgtgtcacgtacattggcaaaggtggatcgggcaactttgtcaagatggttcacaacggaatcgagtatggcgatatgcagctgatttccgaggcatacgacgttctcaagtcggtcggtaagctcaccaacagtgagctgcaccaggtgttctccgagtggaacaagggcgagctcctgagcttcttgatcgagatcacggccgacatctttggcatcaaggacgagcatggcgatggctacctggtggacaaggtccttgacaagaccgggatgaaagggacagggaagtggacggtgcagcaggccgccgagctgtcggtggccgctcctacgatcgaggcgtccttggactcgaggttcctgagcgggctgaaggacgagcgggtggaggcctccaagatcttccagggtgactactactccaccggctcgccggtggacaaggcgcagctggtggaggacgtgaggcaggccctgtacgcgtccaagatctgcagctacgcgcagggcatgaacatcatcaaggccaagagcgcggagaaaggctgggggctcaacctcggcgagctggccaggatctggaagggcgggtgcatcatccgcgccatcttcctggaccgcatcaagaaggcctacgacaggaacccgggcctcgccagcctgctcgtagaccccgagttcgcgcaggagatcatggacaggcaggcggcgtggcgcagggtggtgtgcctcgccatcaacaacggcgtcagcaccccgggaatgtccgctagcctggcctacttcgactcctaccgcagggacaggctgcctgccaacctggtgcaggcccagagggactacttcggggctcacacctacgagagggtcgacatgcctggctctttccacaccgagtggttcaagattgcgcgcaacatctccaacaactgatgagctgctcaacggatggcatgcccggtgttgactactccagtcggtaatgagatttcctgcaggaacttgtctattgatctttgtaagttaattatttatatgaataaaataagagcagacatgcttgtgtttgggc

SEQ ID NO: 3295 - DNA, 894 bp, Zea mays
  Clone ID: 700258323_FLI
gaacagtagtagtccctgtgtacgtctagcaacgatccgcaccgagctcgccagttttgctcgttagtttggggacggcgatggcgtccggtcaggaaagcagggaggagctggcgcgcatggccgaggaggggcagaccgtcgtccccggcggcaccggcggcaagaccctcgaggcgcaggagcacctcgccgaaggtttgtatcctacggccggccggccttgtgatcctcttatcttcctttcacttgtgtgtgctataaacccactactactgcgcgtaagtagccaagaagaactgatcatcaattaaacgattgtgttggtctgttcgtgcagggcgcagtcacggcgggcagacccggagtgagcagctgggccatgaggggtacagcgagatgggcagcaagggcgggcagacccgcaaagagcagctgggccacgaagggtacagcgagatggggaggaagggcggcctgagcaccatgcaggagtccggcggcgagcgcgccgcccgggagggcatcgagatcgacgagtccaagttcaggaccaagtcctagatctgatgcgtgcccccgcttagcatgtagtacgtagctgcaggaatgtagtgtcgtcgtagtagtagggtagtcgtacgacgtgccgctcctcgtttggcacgtgtgccctgaataatgtagtgctgtcagtcgtcgtcctagcacgcgtgtaggagaccatacgtgcgcgtatgatcatgcgtgcttcgcttcagttaggttctgatgttggtcgtcgtcaccgtgtttgaagcaggcaggtctcttcaggctttgtcgtcgtagcagcctgtgttctagctctacgaccccatactcatagcgtgtggtggtgggtcgtgatgcctt

SEQ ID NO: 3296 - DNA, 811 bp, Zea mays
  Clone ID: 700258333_FLI
cgcagactaggcgccagccttctgcgaactgtctctacccttacgaaggaagaggcagccttctcaccgtcgcacccggcgatgcagcggcacgtcgcctccggccggccgtcgggcacggacggctccgacttttcttaccgcatggtcgtcgaatcccgtaaccatccaccgcccacaccgccaaagccacgcttccaacgcctctttcataacctcgcaattttgcagggtaccagagggtcgccgagggcagatcccgcctcgcgcgcctcatcctcgtgcagggcgaatgcggaccatgtcagtgctgcttcggctctacacaagcttgtcatcaattgcggttgcattctctgtgacgtgcattatccggtcagagttgttcttaaaggttatgaagcaaaacacagaggccatcacaagctacgaaatgcttgatgcggttcgtgttgctcttggtatcctgctgcaaatggtggttatagctacaactaccagactcctgcagaatatgtctcctcccaagagagcttcatgaatgctatgaaattttagctttgtatcaagtagtaagggatacaaacttcgagttaaaaatattggccaagtgcgatagtcttgtaccgaagatgctactggtgtacaactgtcaggaaatcgtggtttacttgtttcctcttttgtttttgttttacttcttcccttttctggatctggaaaattcgtagtcgttggcgagctttgcaagctaaaggctaacggagcatatgtgtttttaattccgtcttcatgtttgtgtccatgtttc

SEQ ID NO: 3297 - DNA, 1218 bp, Zea mays
  Clone ID: 700258334_FLI
ccttctttttttttatgcccggcactgcagcgaggcaggagggcgaccggaatttcccatctctccttctcatcattcctttcgggatttcccctcctggttcccatcgatcagagggcccggcgctgttgcctttcgcattcgattcctttcgggtcggatttgtggcggagctcttgatttgctccgtccctgccagaggaggagggcttgctggatcagggatcgagcaaggaagcagccatgagcggcggcggaagcgtgagtttcctcgagatccagccgtcggagctcgcattcccctttgagataatgaggcagagctcgtgttccatgcaactgaccaataagactgaccattatgtagcattcaaggtcaaaacaaccaacccaaagcagtactgtgtgcgtcctaatattggtgttgtattacctggctcaacttgcaatgttacagtgacaatgcaagcacagaaggcttcaccacctgacatgcagtgcaaggacaagttcctagttcaaagcgttgtggccgagaatggtgtgacagctcaagatattaatgcagcaatgttcaataaggagccagggaaagttgtcgatgaattcaagctgcgtgtggtttatgtgccaacaactatgcccaacccaatccctgaagaatctgaactagggagttccactccctcattttcacaagaaaacgggatcgatcattccatgacgccactatctgtatctagatcgtctgctgaaacagcaaaggagaagccctctgaggcaacttctgtgatctccaagctaactgaggagaaaatgtctgctgttcagcagaaccagaaattacgccaagagctggagcttctacggaaagagagcagcaaaaccggcggcggtttctccatcaccttcttgtttgtcgtgggcctcctgggcatcgtcgttggctacatcctcaagagaacatagtggaacggtgtctccagcagatctctactactcccattaaaggacacccacccaccccacaggtggggtggtatgcctctctctccccatgtgttttcgctcctaatcggagcgccctgttctaacgtgtaacaacagcagcactcctagaggctagaggccttcggtttgtgtacatcattatggtggtccatacttattttttttcttccagaattcatttcggagttggtagacttgttttaacgg

SEQ ID NO: 3298 - DNA, 1115 bp, Zea mays
  Clone ID: 700258394_FLI
tttagggtcccgcaagatctggtcgtcaccggaggcccctgcacgctctacaagtgggtgcgagaggatagactggcagctttgaaggctaaggataaggagcagggggcagcatctgcaatgcctgaaccaaactctgaggttctcttcctgtgcagctacgaaggatgtgggaagacattttttgatgtaggggctcttaagaagcacgctcatgtccatggggagaggcaatatatctgccactatgagaactgtggcaagaaattcttagatagctctaagttgaagagacattttcttatccatactggagagaagaattttgtgtgcccacatgaaggttgtgggagggcattttcgttggattttaatttaaaggcacacatgaaaacacattctgcagataactatcatgtgtgccagtacccagaatgtggccgaagatttacacaagaatcaaaactgagagctcatatcagggcacaacatgagaaagctgttggcttgcagaatccaggtgcgtcatcaatgaaccacagtgcaattggaggtccgcaccagccccctaggccagcgaaggtctcagcagcacctccagctccctcagctgagcgcccttacgtctgcccctacgatggttgtgacaaggcatacatccatgagtacaagttgaacctccatctgaaaaaagagcatcccaaccactaccaggatggtggtccaaatggtgctgccgccccttcaaagcgcagcatctcgaagagttcccacaggagcaagctggacatcacctctaggatgccaccggccaacatccccaagcacagagggtatgcaacaccattgccagctgtggtgagcctccctgaggagcagcagttgctaaggaaagtggtgtacgaggatgacagcgaggagactgaagaagagggggataacaatggcgaggacagatggaactacaagagagctgctagcagcgacgacgaggaaaccgaagacgaagaatgagctgctagcagggattcatttttttttcttctgtagctgtgcatataccataatctatagactggtggttatagatttcaatacatgtacatttttaaaat

SEQ ID NO: 3299 - DNA, 1718 bp, Zea mays
  Clone ID: 700258417_FLI
ctcccaaaattccctctccgtcgccgccgctcccaaaatcccctctccgtcgccgcctctcgccaggtcgtttccaagccccgttgggggcctcgccggcgccggcattggatataacctcgcccgctacctccgtccgaatgcagggccttgatatttaatgggctggaggtggtacatgcatgttcgcagtgacaagaacacattgaaacgttggtttttcattgacaagaggcttgttaaagcatttttggtgcactaaccttttgttgtctgtaattggtttcacaacaagtttcttggggggttgtgtcctgttgatggatttgaagacaggcctcaattcacctgttattgctgaccatctccctacgttagcattgcctgctgctgtcatgactttcacaacacctactagctttccctctccggggctttgcttgaacactacaaagaagatacctctgcctggtaagattgaagaagttcgtgctgctggatggcttgatctcatgaaggcctcatcacctacccgcaaaaggcagatcaaggatgtcatctgtgatgctcaatctgatcttgatttgcaatactgcaactggacagtgaactatccttctgctttgatctcatttgaggcaattagtgatcttgctgggagtaaaaggttggcattgtttcttgactatgacggaacactttcaccgattgtggacaatcctgaaaatgcattaatgtctgatgagatgcgtgctgcagtgaggcatgcggcatcacttttcccaactgcaatcattagcggaagatctcgtgataaggtttttgactttgtgaagctaaatgaattgtactacgctggaagccatggaatggacataatgggccctgttaggaagactactgactccaatggcgtggaatgtattcggtcaactgatgtgcatggtaaagaagtcaacctgttccaacctgctagtgagtttttacctatgatcactgaggtgtatgaaaaacttggtgagagtgttaaggacattgatggtgcaaggatggaagacaacaagttctgtgtatctgtgcattaccgtaatgtggcggaagatgactataaaaaggttttccatcgtgtaactgctgttttggaaggttacccttgcctaagactaacccatgggaggaaggttttgaggtccgtcctgttattgattggacaaagtaaagctgtggagtttttacttgaatcgcttgggctcagcgagagtgaagatgttctccctatctatgttggagatgacagaacagatgaagatgcattcaaagttctgaaggcaagcaaccgtggctttggaatattggtgtcgtctatacccaaagagagtgacgccttctactccttgagggatccagctgaggtgatggaatttctgagaatgttggcagcatggaaggagcagtccacctgatatcagttttgctgggtctgagaatgtgggcagtccacaagattataaatattagcaagatatataatatataatgctaatcaaataaatcggctattaggaggactcgagccatttttttgatttggcattttataagaggctaccacatttccatactttttcagtcccactttgttcttgtgttaaatgggttttcaaacagttcaattctttcattatttaggttccttaagtatatatgcaaatattctt

SEQ ID NO: 3300 - DNA, 1355 bp, Zea mays
  Clone ID: 700258466_FLI
gcctccgcccgcgaaccgcagcagcgtctccaactctccatcgatggcggaggcgaacgtggcagcggcgtcgctcttcggcgctgacggccgcctctgctcagccgacatcctcgcgccgcctgaggtccgggctaggatcgaggtagcggtgctcaacttcctcgcagcgctagcctccccttcctcgccggccatctccgtcctccccctgattagtcggagctctgccaactgcagcctgcgcagtgggttgctgaacgacgtctcgtcggtttatctctcatacaccttctgcaagaggtctctgacgcacaatccaaaggcgttcgtaagagtgtggaaggtcatggagatgtgctacaagatcttgggggaggggaagctggtccagcaacgggagctgttctacaagctcctgtccgactcacccaagtacttcagctgtcaacgtcatgtcaaccaagccattcaagatgttgtttccttgctccggtgcacaaggcagagcttaggagtcatggcatcaagcagaggggcactcattgggcgccttgtgttgcatgaaccggacggggagcagattgattgctccattcttggagcttcagggcatgcaattacgggggacctgaacctgttgagcaaattaaatttgtcttcgggctctcggtacatcattgtggtggagaaggatgccgtatttcagaggctggctgaagaccgcctgtataatcagctcccttgtattctgatcactgcaaaaggatatcctgatattgccacaaggttcatcttgcatcgactgagccagacatttccgaatatgccgattttcgcattagtggattggaacccagcagggcttgctatactgtgcacttacaaatacggaagcatatcaatgggcctagagtcatacagatatgcttgcaacgtgaaatggctcggggtgagaggaggtgatctgcatcttatccccgaggacgcgtttcaagagctgaagccacgtgatctgcagattgccaaaagcttgatgtcgtcaaagttcctgcaggagagtcacagagctgagctggcgctgatggtggagaggggcaagcgtgcagacatcgaagccctctactcccacgggttcgatttcttggggaagtacatcgcgagaaagatcgtgcagggcgattacatctgacgattggccgctggaatgttagcatggttgcacggaacaatgagctgcatggactgtagtacagtagctatgtccaactgcctgtagactgaaacgatggtctgtatgggaatgtacataaatacaacaagagtagtctaatatcgatcatcatcggccaccg

SEQ ID NO: 3301 - DNA, 585 bp, Zea mays
  Clone ID: 700258532_FLI
gccgcgcgcgcctcgccgtccgacgtcgaatggaagagcggcaaagcgggaccaggcgtcagcgtcaagggcgtctcccagttcgccgtgtacgcggtcgaggccaggacgctgcagctgctgcgccccgacgagggcgtcgacctcacgctgcagcccttcacctacgagctcttcgtcgtcgcccccgtgcgcgtcatctcgcacgagcgggccatcaagttcgcgcccatcggactcgccaacatgctcaacaccgccggcgccgtgcaggcgttcgaggccaagaaagatgctagcggcgtcacggcagaggtgttcgtgaagggcgcaggggagctggtggcgtactcgtcggcgacgcccaggctctgcaaggtgaacggcgacgaggccgagttcacgtacaaggacggcgtggtcaccgtcgacgtgccgtggtcggggtcgtcgtcgaagctgtgtcgcgtccagtacgtctactgagccggacgggccgatgactctgctccctgctggcctgctcaggacgcaataatctaatgtttagagcttaccaagttttacagctctatcagtttactt

SEQ ID NO: 3302 - DNA, 2262 bp, Zea mays
  Clone ID: 700258557_FLI
accttccctctccctgcttccctcctgctacaaataaaaattcgtggggcggccaaaccctaaaacgccccacagcgcaagcgagcagatcctcctccctctctgcatcctggcctcctctctgcctccccacgccgatctcgagcacctggggagaccgcgagacgtgcgcctgatttttctcatcgcagcagccctcaagttccccacctcttttttcttgcagctttcaattaatctggttatttagctacatctttattttactttcattttgcctttaatctgtttagttccattgcatcttctgcggttgcagttagtattgctgtttgttgctccgtgtttcttgttcttttgcttctaaccatggacgcaggaacctactccatctcatcagagaagagccacacggcggcagcggcgcggccccctcttcaggaggccggcactcggccctacatgccgtcgctgagcacaggatcgcgcaacccgtcggccaagtgctacggcgataggttcattccggacaggtcggcgatggatatggacatggcgcactacctgctcacgaagcccaggagggacaaggagaacgctgtggcagcgtccccatccaaggaggcgtaccggaggctgctcgccgagaagttgctcaacaaccggacacgcatccttgccttcaggaacaagccgcctgtgtctgagaacgtctcggcagccatcgcagcttcctcccaccatgccaagctggtcaagcagtgtcgacatattccccagtctgcagagaggattctggacgcaccagagcttgttgacgactactacctcaacctgcttgactgggggagcaacaacgtgctatccattgctctgggcgacacggtatacctgtgggatgcctccagtggatccacgtctgagcttgtgaccattcacgaggacagtggtcccatcaccagcgtcaactgggctccagatggccaccatatcgctattgggctcaactcatccgatatccagctctgggacaccagctccaaccgactgttgagaactttcagaggtgtgcatgaggaaagagttggctcactggcatggaacaacaacatcctcaccactggcagtatggatggcaagatcgtgaacaacgacgtgagaattaggaaccatgttgtacagacatacgaggggcacagccaggaggtgtgtgggctcaagtggtctggatcagggcagcagctggctagtgggggtaatgacaaccttctgcacatctgggatgtgtcgatggcatcccccatgtcaaccgctggccgcaaccagtggctgcacaggctcgaggaccacatgtccgctgtgaaggcactcgcgtggtgtcctttccagagcaacttgctggcaactggtggtggcggcagtgatagatgcatcaagttctggaacacacacactggagcatgtctgaactctgttaacactggatcacaggtctgtgcccttctatggaacaaaaatgagagagagctgctgagctcacacggattcacacagaaccaactaaccttgtggaagtacccatcaatggtaaagatggctgaactcagtggccatacctctcgtgtccttttcatggctcagagccctgatggttgcacagtagcatcagccgctgcggatgagacccttcgcttctggaacgtatttggagaccctgaagtggccaagcctgcagccaaggcttcccacactgggatgttcaacagcttcaaccatattcgataggaacaagtcatgagaacgatcccttctgttggaaatggccgtgcatcatatgtgaggtctattcctattgatgagatctatccacattgagtaagcacacaacatcagcgagcattgccatcatatgcatcattcagaaatccaggatcagggccgtaaaagggttggactatgtatctgcaacatcgcaagcaacagggaggctgtctcttcagaaattttcaagaggacgtgtcagtaacatactcaggaggccgtctcttcattcaaagagtatcttttacacgacttcttgagtataaaaaactcatttgtacaatcctacctgtctattgaattgtctttagaaaaaaaagtctttattgtatgtacttttttttttatcttttatgcctgaagaactgttttccccttttcttttagaagtaggagccggtaaagctactctttcaatttgtcacaagcattatttatttt

SEQ ID NO: 3303 - DNA, 1364 bp, Zea mays
  Clone ID: 700258580_FLI
aaatcggctcctccctctgctcggcgccgcctccccgcttccctcccccatccacatccacctccgcgtgtgccgcctcctctccacctccacctctacggccaccgtccccgcacccttctcccttgagaactacctcgtcgccgcctgcggcttcgcacccgcccaagctcgcttggtgtccaagaaggcgttcaacgagttgtccagggaatccaagagatcatcggaggagcactcctgcagacgcctcatctccgcctccaacccagatgccatcctcgcgctgctctccggcgccggcctctcccgcgccgacatcgccgccgtcgtctttgcggacccgctgatcctccgcgcttccgtgagtaaaatcgcaccccgccttgtcgctctccgcgaccgcgtcggcctgtctactccccagatcgctcgcttcctcctggtcggctcacgcgctctccgccggtgcgacgtcgttcccaaggttgagttcttcttgtccttcttgggctcctttgatcgggtactggcggtcgcaaaggcaaacttgggcatcttcaacgcgaaccttgagaaggtaataaagcccaacatagacttgtttcgtcaacgcggcgttcgaaacgtccctaagatctgtctccaccgcccacggacgctttcctttaacctcgaacgcgtgaaggaatttttgctgcgggcagaagaacttggggtgcctgccgcgtcgcccttgttcatgcaagcagtgggagtcgtcaccagttttccccctgagaaggttgctgccaaacttgacttctttaagaggactcttggttgttctgagtctgaggtttcgaatgcagtgtccaagatgccacaaatactagcattgtctgaggcgactcttcttcgcaagatcgagttcctggtcaatgagggggcgatagagccacagtatattatgcaaaggcctatcctgctcgcattcagcttggagaagcggctagtgccccggtatcgtgtcatcaaagtgctgcagggaaagggattgctgaatagcaacatgagcctttcctcattagcttctcttgcagaagaaaccttcaagtccaagttcgtcgactgccacaaggactgtgttcctggccttgcagatgcttatgctgcagcttgtgctagtattgtgccctcgacagtgtaagttaagccgtttcaaaaacaaaaacagtgtaagttaagcttctcattttgtgttttaggtggatgctcattggctgctgtccactctgcaattttgatttctgaagtatataaccactcatgatcactgattggtcatatccaaggtttaagttatggacttgtggttattgatg

SEQ ID NO: 3304 - DNA, 1368 bp, Zea mays
  Clone ID: 700258593_FLI
cagcgatctaggccgccgcctctcctactgcatctccctcgctctcgtcgcctcgttcgcttcgcctccgccccgccccgccccgagcagagcgcagccctatccggagctgggatggcggacgcgaagcagcagcagcagcagcagcagcagccacagcaggcggcagcggcagccaccggcgtgtggaagacggtcaagcccttcgttaacggcggggcctctgggatgctcgcgacctgcgtcatccagcctatcgacatggtcaaggtgaggatccagttgggtgagggctctgctggtcaggtcacaaggaacatgcttgcaaatgagggtgtccgttctttctacaagggtttgtccgccggattgctgaggcaagcgacgtacacgactgctcgtcttggatcctttagggttctaactaacaaagcagttgaaaagaatgaagggaagccattgcctctatttcagaaagcttttattggtctgactgctggtgcaattggtgcttgtgttggtagtcctgctgatctggcactcattagaatgcaagccgattcgaccctgccagttgcacaacgacgcaactataagaatgctttccatgcactctaccgtatcagtggtgatgagggagtccttgcgctttggaagggtgcaggtccaactgtggtgagagctatggcactcaatatgggtatgcttgcttcctatgaccagagtgtcgagctatttagggacaaatttggcgcaggagaaatttctactgttgttggagccagcgctgtttctggattctttgcctcagcatgcagtttgccctttgactatgtgaagacacagattcagaagatgcaacctgatgcgaatggcaagtacccatacacagggtctttggactgtgctgtgaagaccttcaagagcggtggcccattcaagttctacactggtttcccggtgtactgcgtcaggattgcaccccatgtcatgatgacctggatattcttgaatcagatccagaagtttgagaagaagatcggcatataggattcccatcggacggatacagggttgacagttctatgctattactgcttgactctgtaataacattccagctgctttcgcaccatggtagttggttttggtagagacaagtctgttacaattttttaccttagctttccaattattgtgttgcaataatcgaattaattgttgctgggggatttttttggggggttgggagggtggcatgcttttgttggctgggatgtagccataaggagagggggatactgcctagttatgtcattgaatggaattggaccatattttatacagatttttaccttcagttctttt

SEQ ID NO: 3305 - DNA, 1702 bp, Zea mays
  Clone ID: 700258617_FLI
cccaggctgtcgttctgttctataaagcgagccgagtgggagcaggcgtaaccctaatcgagcatcgcagagataggcgtcttcgtactcgcctacctccgcggctcaaacctttcccccttctcccaattccctccgtcggccgccgctccatcccgtacgacgacaccatgagggagtgcatttcgatccacatcggccaggccggtatccaggtcggaaacgcgtgctgggagctgtactgccttgagcatggcattcaggctgacggtcagatgcccggtgacaagaccattgggggaggtgatgatgctttcaacaccttcttcagtgagactggtgctgggaagcacgtgccccgtgctgtttttgttgaccttgaacccactgtcatcgatgaggtgaggactggcacctaccgccagctcttccaccctgagcagctcatcagtgggaaggaggatgccgccaacaactttgcccgtggtcactacaccattggcaaggagattgttgacctgtgccttgatcgcatcaggaagcttgccgacaactgcactggtctccagggcttcctcgtcttcaacgctgttggtggaggaacgggctctggccttggttccctcctcctagagcgcctgtctgttgactacggcaagaagtccaagcttgggttcactgtgtacccttccccccaagtttctacttcggtagttgagccatacaacagtgtactgtccacccactccctcctcgagcacactgatgtggctatactgctggacaatgaggccatctacgacatttgccgccgatcccttgacattgagcgcccaacctacaccaacctcaacaggcttgtgtcccaggttatctcatcccttactgcctccctgaggttcgatggtgctctgaacgtggatgttaacgagttccagaccaacctggtaccctacccgaggatccacttcatgctttcttcgtacgctccagtcatctctgctgagaaggcctaccacgagcagctctctgtggctgagatcaccaacagcgccttcgagccatcttccatgatggccaagtgcgacccacgccatggcaagtacatggcctgctgcctcatgtaccgtggtgatgtggtccccaaggatgtgaatgctgctgtggccaccatcaagaccaaacgcaccatccagttcgtggattggtgcccgactggcttcaagtgcggcatcaactaccagcctcctagcgttgtgcctggtggcgacctggccaaggtgcagcgtgccgtgtgcatgatctccaactccaccagtgtcgtggaggtgttctcccgcatcgaccacaagttcgacctcatgtacgccaagcgtgccttcgtgcactggtacgtcggtgagggtatggaggaaggtgagttctctgaggcccgtgaggacctggcggcgctcgagaaggactacgaggaggtcggcgctgagttcgatgagggcgaggatggcgacgagggtgacgagtactagagaagtttgctgatgacgcagcatcaggccagtgtgctgcccttatcccgtgatctgccgtgagttgctcctgctatcgtgttatgtgtgtctgttatgaagtattgtgtggtttacaacacctgatgttgtaagagtcgttaattcccctgcattgctaccgggttattgagaat

SEQ ID NO: 3306 - DNA, 1060 bp, Zea mays
  Clone ID: 700258703_FLI
gtttgtccattcgcattggtctgaatactgtagctactagcgcgagtgccactgtgccgcagctgcctgctcgccattactgcaagctgtgttcaatcaaagcttaattaggctccctctacatctgatccagctaagtagctagccagcactacagaagggcgtggcaagaatcaggagagagatagcaggggggctagctagctgagctcgtgcgacgaagaatggccggaattggcaggaacatggtggcgccgctcctggtgctcaacctcatcatgtacatcatcgtcatcggcttcgcgagctggaacctgaaccacttcatcaacgggcagaccaactaccccggcgtggccggcaacggcgcgacgttctacttcctggtgttcgccatcctggccggcgtggtgggcgcggcgtccaagctggcgggcgtgcaccacgtgcgcgcctggcgccacgacagcctggccaccaacgccgcgtcgtcgctcatcgcctgggccatcacggcgctcgccttcgggctggcctgcaaggagatccacatcggcggacaccgcggctggcgcctgcgcgtgctggaggccttcgtcatcatcctcgccttcacgcagctcctctacgtgctcatgctccacacgggcctcttcggcggcagcggtggctaccgggaccacgactacggcgtcggcggcgcggccggcgagcccaagggggtcaccagggtctgaggattctgatcgatgcagctcgtacatgtgtcatcatatcaggcgctgctggagtgtgatgacgtaataagtagtacccatatatatatatatggtgtgtgttgacgtaccacgtatactacgtacgtgtgtacctagtagctagctagtcagtccatcgtctgctcatctcgtcaggtcatcagatctctcggttctggtttgtacatcagtacgtgcatgcatgtatcccgtgtcaaatgtatttcgtcacccgtcagtttcagccggtcagtgaccaagtttatttcgtcacccctcagttcagtgacattggtgacatg

SEQ ID NO: 3307 - DNA, 1498 bp, Zea mays
  Clone ID: 700258840_FLI
gccatctcctcaccctcgttcaccacacagtccgccactcctttagtagcttgtgatttgtacgtcgacgagatcactggtcgggtggcggacgacgacacatggggaagggtagtgtgggtgcatcatggtgggcgttcctcctgctcgccggcgtgctgctggtcgtagcagccacggccggggcggaggacggagtggtcgaacgggaccgcaaggaggacctgcggtggtgcaagcaggcgtgcgagtggcagtacggaaaggacaccccgcggaagagggaatgcgagagcgagtgccgcgagcggcaccagcaagctgacgcgggcgaggacggcgacagcggcgtggacgcctacgtctcccgctccgggaggggcgagtgccggcgccagtgcctgcgccgccacgagggccagccgtgggagacccaggagtgcatgaggcggtgccgccgccgcggactggccgtcgacatggagcaagagtacggtcgcggcagcgagagcgcgggcaagtgccgggagaggtgcgagcgccaccaccgcggggactggtgggagaggcagcgctgcctgatggactgcaagagccgggagcgggaggagggcggcagcggcgaggaggaggaggaggacagcggcgaccgctgcccttgcgagaagcagtgcgagggccaccacgaccgggaaagcaggcagcagtgcgtccaggcttgcgagcgccggcgacaggagcgcggcggcagccgtgactccgacgtcgacgaggacgacagcgaccggcggtgccagatgaaatgccggcgccacagcgatcggcaggcgaggcagtggtgcgtgcagcgctgcgagcgtaagcaacaggaggacgccgccgccgacgacgacgagaacagcgaccggtgccagaagagatgccagcaccacagcgactggatgaaaaggctgcggtgcatgcaacggtgcgggcgacaggaggagggcggcgcacgcgacgacgctgacgacgaggccagccacggcgaccggtgcgagaagaagtgccagcagcaccaccgcgactacgacaagaagcagcagtgcgtgcgcgactgccgccgcggccgtggctgggaaacggtggccggcgccatccttgaggtggtgtgacgatcgacgacgtgcatggcgtggcgcacagagctagtaataaaagggtagtgtacgcttaccgcgtacgtacgtgtcaccgggcgtggcactctccagtctccagggacccatccaccaaatgctactgctccttcgtagggagacgtgggaataaagagtggtagctgcatgcacgtacggcggccatggctctccgatgagagagctagctgtgtacgtgtgttcttgatgttgttccatgcatgacatgtatacgtcttgcctaagtacgcttgtactagttgagagactgtgtaagtgaaatgtgctataataataaataagtaaaaggcgccttctcc

SEQ ID NO: 3308 - DNA, 1265 bp, Zea mays
  Clone ID: 700258927_FLI
gctaactacccccacgctggctcgccaccgccgccgcagcaggcgtgggaatctgggcagcgccccgcggagaagaggaggcagcgcgctctccgtccgccatggcgggctcttccgaccccgacaagctcatgagcaaagccgacaaactaacaaaattgagttttacaagatggaatgctgattggaaaagcgctacctccttgtatgagcaagctgcaattgcgtataggttcagaaaggataatgagaaagcaaaagatgcttttgagaaggcctcaaaaggacaggaaatgatctcctcaccatgggacgctgctaagcatatggaatctgctgctgctttagcaaaggagcttgggcgctggaatgaagtatctgatttctatcacagagcttcagaattataccgtgaatgtggaaggccacaacctgcatctgatgctctagcaaagggtgccagtgcattggaggagaaatctccagaagaagctatcaaaatgtatgatgaggcttgttcagttctagaagaagatgggaaggaacagatggcttttgacttgtaccgtgccgcagcagctttgtatatcaagatggagaaatattcagatgccgctgctttgtttttaagacttggttcagctgctgataagtgcaatgccatcaatagccaatgcaaggcctatctgagtgcgatcatcatctatctttacacacatgattttcagcaagctcaaaaatgctacaatgactgctcagaggttcaagccttcctcaatagcgaccagaatcgatgcgcaacgaagttattgtctgcttatgaggaaggtgatgctgaagaaatcaaacgcatggctcaatcaagtgccttcaatcaccttgaccatgtggtaattaggcttgcacggaagctaccaacagatgatctgcaggccatcaagaaagctgacgatggcgaggaatccttggacgaggatgacctgacttaaaacgatctcccgagccaaaaggtgcatagagcaaacgtcatagtttgccataggtgggggaaccgctgtaaaaagaagttatgcgagttacatactaaaaacttgggcagcattcccagatctataaacatgaaatttgtagggcccaattatgttgtatccgtactggtggtttggtgttaccgaaacagcgaaactttagtggtatgtttatggtgccctatgctacatgattcttgcaaatctagcatgatgtatatgtgttggccaatcatt

SEQ ID NO: 3309 - DNA, 1334 bp, Zea mays
  Clone ID: 700258957_FLI
tctttgctacggcggctctgtaatctggtccactagcgctccattcgaccccacccacagccatggctgccgtgaccgcggcggccgtctctctgccctcctcctcctcctcccctgccgccgccaaggccaaggcgtccgcgtccgcgtccccgtcgtctccatgcggccacctccagttcccgcggcggcacggcggcccgcgcgcggtgcggctgcgcgtgcaggtgtccaccaccgagaccgcggaggcggagccggtcaagaagctggagaaggtgtccaagaagcaggaggaggggctcgtcaccaacaagtacaagcccaaggagccgtacgtcgggaggtgcctgctcaacaccaggatcaccggcgaccaagcgcccggggagacgtggcacatggtcttcagcacagaaggcgaggtcccctacagagagggccagtccatcggcgtcatcgcggatggcgaggacaagaacggcaagccgcacaagctcaggctctactccatcgccagcagcgccctcggagatttcggcgactccaagacggtgtcgctgtgcgtgaagaggctggtctacaccaacgatcagggggaggtcgtcaaaggagtctgctcgaacttcctctgtgacttgaagccaggcgctgaggtgaagatcacagggccagtgggcaaggagatgctcatgcccaaagaccccaacgcaacaatcatcatgctcgcaacgggtaccggcatcgctccgttccgctccttcttgtggaagatgttcttcgaggagcacgaggactacaagtacaccgggctggcgtggctgttcctgggcgtcccgaccagcgacaccctgctgtacaaggaggagctggagaagatgaaggagatggcgccggacaacttccggctggacttcgcggtgagccgggagcagacgaacgcggccggggagaagatgtacatccagacgcgcatggcggagtacaaggaggagctgtgggagctgctcaagaaggacaacacctacgtctacatgtgcgggctcaagggcatggagaagggcatcgacgacatcatgctcgacctcgcagccaaggacgggatcaactggttggactacaagaagcagctcaagaagagcgagcaatggaacgtcgaagtctactgatgatgatccttcattgtattgttcagctcaagcaatctggtggtgatgagtttgcattgcattgtacgtagtattgcggagatcaatcgaatcgtttggctcgtcgtcattctatcgatgtacatacattatatatgatgaaagacatatataatcgtttctttc

SEQ ID NO: 3310 - DNA, 1592 bp, Zea mays
  Clone ID: 700259064_FLI
gcgcttaatccagaccccttcagaggtgcttttggttctgacggggagaaatacgccagagatgttcaggaaatcatcgaatttggaactacagggagagttggtgggttcatttcggaagccatacaggtattccaatatcaaagcgtcggttaggcatctccatcactcttaaacaaaaaccaaatttctcccctgaacatggcatgttcttttccgaagggggttggtggaatagtggaactggcaccaggatacttgcccgtggcatacagtatggtaaggaaagccggtgggctctgcatcgccgacgaagttcaggcaggagtcgcgagaactggaagccacttctggggattcgaagggcatggtgtcatcccggacatagtcaccatggccaaggtaaagcttgaaacccgttcatgacgtgcaggctcttgtattgccatgacatgacgtcatggtaagatcatcagaatgcgcatccggtggtgcatcgagtcggcgactcacatgttctcattgatttccagggtatcgggaatggcatacccataggagctgtagtaacgacgccagagatcgctcaggtgttgacccgcagaagctacttcaatacctttggtggtaaccctgtcagcactgcaggcgggcatgcggtgctcaaagtgctggagaaggagaagctccaggagaatgcgtttgttgtgggctcctacctaaaggaacagcttaacaatctgaaagacaagcatgagagtaagtagggaaatgaaaaaaagaagcaacgaatcatgtcattgttgctcgccgcttacattttacctgtcttgctctgcagtcatcggtgacgttaggggcaaaggcttccttcttggagttgagctggtgacagaccatgaaaagaaaaccccagccaaagctgagatctcacgtgtcatgaaccatatgaaaggtatacatgttgtgctttgacaaccttttccaggggcgaagctagacgtagaactctctctctctctctctctctgtgatctaagtgctctcttacttcaacagatatgggagtgttggttggtaagggtggtttctacgggaacgtttttaggataacaccaccgttgtgcttcaccaaagaggattccggtaagacctgctatctgctgaaacattcctcgttgaactccttaaccagtgacactgatttttccggggaaatgacgagctgccttttgttgcagacttcttcattgaggtgatggacattgcgctctcgaagctgtgaggcaagcagggcgaagatgatgtgcaaaccctggtccgtcgccatgggatttttgcccatgaataatattaagattaatgagacagcacctcgttgtctcttaatctaagacgatgccatgtcatccggtggcatggtattcctaatcctacctgccaaatcactggtattgctcgctgtctcgtaatcagacccatggagcaatatgattcttgtaaactctagcttcatccaatctgttcctcctgatctaactagtctgaatagcagctgttcgtttgtgaccaatatcaacttcttttcagat

SEQ ID NO: 3311 - DNA, 993 bp, Zea mays
  Clone ID: 700259159_FLI
cattgcgagtcccgagtcgactctctcccgtttcccggccgtccccttcaccaatccaatccaactccaattcgtcctccggtcctccccctcgaggcctacgcacaatagattcgatctcgagtcctcgaatcctgccttttcctctggtcaggaaagcatgagcttgatttccggcgcttctcgccgtcgagctcgaaccagaagataagaagaatccgctaggggcgagccccatagaagatggccccgcacccgcaggaggacaaatcagatcggcacagcagcggcgccggtgcgtcgagggagcaggaacggcggccgtccaaggcatggggaatcctcatcttcggcctcatcggcgtcaccaccgccagtttcgctattactcaagttcgcaaaagcatggactggttctacactcagttgaataaagtgcagtcaacatcatcttggacttggaggtatacaagtaataactcaagtcgtggaagcttcagtgaggaagctaagaaaagatattatcagcgaatgcagcaggaatatgaagaggaacaagagagagttcaaagaataaggcatatgcagagtgtcttcaacagagagaggaataaatttggacgaggttatgaaagctggagggagaatggccctcctcgtggctacaattacatccctcgggatgattgatcacgagcgacaccatatacagatgcagaagtgaagactgcttttagaacaaaagcgatggaagtgcatcctgaccaaaatcaaaatgatagagatgctgcagaagagaagttcaaggaggttgtcaagtcttacgaagcaattaaatcggagagaaaaaacggtgtaagttgatgcaaacttccagtgtggtcggatcaagtggtaaagactgggaccggatcacgcgggaatcagttgtgccttgtatatgtaatcaattgttgccggcagcttgataaaatggttcttctgttgctgttg

SEQ ID NO: 3312 - DNA, 485 bp, Zea mays
  Clone ID: 700259393_FLI
ggaagaagagcgggccaggaaggagcaagagaagcagcggaggagagagaaagaggaggaggagcgtgcacggagacgcgaggaggaagaaagagagagggaggaggaagaagaacggcggagggaggaggaagaaggtggaggcggacgtggtgacgagccagagagggaggaagaaggcggtgacaagccgccataccggttgtccaagaaactgaagaaacgctaccatgcacgtgccggtgtgttcagcaggagtggctgagtgagcagccgagcagagctggcctctgctccgtacaaataaacaggtggcctcgtacagatggccaattgccacatcaccaccactcgtacagagtaccacctgccagtcggctatgtatgtgtgttcgttgtgtcgtttgttaagctttgctgcatgctgagtttagattccgcttgtataaaacgtaccctaaataagcagacaagttttcaggctc

SEQ ID NO: 3313 - DNA, 1595 bp, Zea mays
  Clone ID: 700259427_FLI
caacacacaactggacgacggtgcgttgcgttggtggccgccggcgacgatgtcgtcgtccgcgggcgacaagaggaagaagacggcgtgcgtgaccggagggaacgggtacatcggctccgcgctcatcaagatgctgctggaggacggatacgccgtcaagacgacggtcaggaaccccggttcgattctccttctcctcctcccctcttttctttcgggccggttcagtgtttgtggtggttgctgctgctgttccggccggcgttgcagctgcgcaggatcaggaaacggcgtcttttgaactccggaacgcataataatagcacaagattgtgaacgattagatttctgatgagatggttgatggttcagcagcgccatagaaatcctacactttgctacttcagccaggcctaggcgcgcatgtgcctttactttactgtcgctgttggagacgacatggacaagaactcccacctcaagggcctgcagcagctcgggccgctgacggttctccgcgccgacatggacgaggagggcagcttcgacgacgccgtcgccggctgcgactacgccttcctcgtcgccgccccggtgaacctctcggcacaggatccagagaaagagcagatcgagccgtccgtccgaggcacgctgaacgcgatgcggtcgtgcgcgaaggccgggacggtgcggcgcgtgatcctgacctcgtcggtggccggagtctacatcaggccggacctgctgcaactgcgaggcgacgggcacgtgctggacgaggagtcctggtccgacgtcgagtacctcagagccaacaggccaccaacctgggtccggcgtccgatgatcgactctgctcccatatattctcgctctacgtcttttccttcgtgtcggccactgctaggacagcaccgtacaccagtttgatggtgatctggactgctcgctcgcactcgcaggggtactgcgtgtccaaggtgctcctcgagaaggaggcgtgcaggttcgcgggcgagcacggcatcagcctggtcaccgtctgccccgtcatcaccgtgggcgcggcgccggcgcccaaggtccgcacgagcatcatcgacagcctctccatgctgtccggcgacgagcgagggctcgccgtgctcaagggcatcgagaagacctccggcgcggtgcagctggtccacgtcgacgacctctgccgcgccgagctgttcctggcagaggcggcggcggccgacgggaggtacatctgctgcggcctcaacacgaccgtcctcgagctcgcgcgtttcctggcacacaagtacccgcagtacggcgtgaaaacaaacctcgacggcgatgaacagcagctactcgagaagccgagggtgagggtgtcgtcggagaagctcgttcgggaagggtttgagtacaggcacaacacgctggacgagatctacgacaatgtggtcgagtacggcaaggcgttagggattctgccctactgatatatagatgcccgtgcttaattaagtacgagggcagcatatatgttatcggacatatatacgagtcttggaaagtaattaaataatttatgg

SEQ ID NO: 3314 - DNA, 2312 bp, Zea mays
  Clone ID: 700259447_FLI
gccgccctgacccccggcgcattctcctctcggtgccgactgccgagatctccccggccctctcccgagaggagtgcccgctcttgacccgacgtccgcgatgacggtggcggctctgcaggcgatggacgcgctgtcgcggcgggcgaccatgctgcgggactctctgcggcgaagccaggggaacacggacggcatggtcaccatcctcggctccttcgaccaccgcctctccgcgctcgaggccgcaatgcgccccacccaggtgaggacgcacgcgatccggacggcgcatgagaatatcgaccggaccatcaaggccgccgacggcatcctctcccagttcgatctcgctcgccgggctgaggcaacaatattgaggggtccccatgaggatttggagagctacctggaggcagtggatgtgctgaaaggcatttctcgtttcttttcctcaaacaagaacttcaagagtagcgaaggagttctgaatcatgtcaacaatctgttagctaaatctactctgaagattgaagaggaatttaagcagctgatgagtacatacagcaaacctatcgagccagatcgcctgtttgactgtctacccaagtctctgcgtccaacaaaaggtgaccacgagtccgatggaggcagccatcatccatccaaaggcttggaggctgccgtatacaggaccccaacactaattcctcccagaatattgcctctcatgaatgacatagctcagcagttggttcaggctggaaatcagcaaacttgctataaaatctacagagattaccgtgcttcagcactagaggtgagccttcggaagttaggagtggaaaaacttactaaagatgatgtacaaaaaatgcaatgggaggctttggaggctaaaattggaaactggatacattttatgcgaatcgcggtcaaattattactagcaggggaaagaaaaatctgtgatcagatttttgatggtgtgaattttaacaagggccattgttttgctgaactcacagcaaatagtattataactcttttcagctttggagacgctgttgctaaaagcaaaaggtctcctgaaaagctgtttgtgttgcttgacatgtatgaagtaatgcgtgaacttcaaccagagatcgatgaaatatttgaaggcaaaccttgcactgagatgcgggaagctgcatcaagcttaacaaagcgcttggcgcagactgcccaggaaacatttgcagattttgaggaggcagttgaaaaagatgcttcaaaaactattgttcaggatggaacagtccatcctttgactagctatgtgatcaattatgtcaaattcctattcgattaccagtcaacattgaagctactgtttcaggaatttgatagtggcactgaggcagaatctcagcttgctgcagttaccacaaggataatgcaggccctacagaataacctagatgggaaatctaaacaatataaggatcctgcattgacacacttgtttcttatgaacaacatccactatatggttagatctgttcgcagatcagaagcaaaagatatacttggtgatgactggattcagaggcatcgcaggattgtgcagcaaaatgccaatcaatataaacgtgttgcttgggcaaagattcttcagacactttctgttcaaggtgcgggcagcggtggtgaccttaccagcagtagtgtttcaagagccacaatcaaagaacggtttaagtctttcaatacacaattcgaagagcttcacgcgaagcaatcacaatggatcgtacctgatcaagaactacgagaatccttgaggctcgctgtagccgaagtcctgttgccagcctaccgatcttttatcaaacgctttggcaatcttgtggacaacaacaagaacccgcagaagtacgtgcggtacagcccagaagcagtggaccaacttctaggccagttcttcgaagggcagcaatgggcggagcaaaagcgctgagcaacatagagtgagagtgacggcatgagtacagccagatgccagtaagttcaacagcacagatttcttccgaagcaaccaccagttccttctcgcactacatataatatatagtgacataaacgtctgctgtgcaggcactacctagttttcttttctcagaaaaagcgcgcctaagtttcttttctcgccatttgggtggctggaacggaaagctaacggcaaaaaagtgttggtggaactttcttgctggaggttcctaaacttattagtgttgatctataaaaggtaaaagaacgagacctct

SEQ ID NO: 3315 - DNA, 1315 bp, Zea mays
  Clone ID: 700259535_FLI
gttcgtggagtcgtctcggcggcggcggaacaagccgggaacctaccgcaaagggcgccaccgatgctaaagccacagacgtcgtggacagcttccctccctctccttctcatccgccgctgctcgagaaccgcggccagtccatctcctgccggtgaccggccgctctcctttgtcccggtctgcaagcggcggatgagcacgctggcgcatcccaggtttgcccctctccctacggagcaaactgaatcccaaacagatggcggggctgcacggtaccagttccggctggtctcttacaacatcttggcccaggtttatgttaagagtacgctttttcctcattccccatctgcgtgcctcaagtggaaatctcgatcgggagctattcttacagaactaaagagctttgatgctgacttcatgtgcatacaggagttggatgaatatgataccttctataagaaaaacatggaaaactctggatattcaagtatttacattcagcgatctggagacaaacgagatggctgtggtatattctataaacctaaaagtgcagaactggtgcagaaagaagtaatactgtacaatgatttagtagaaaaatatgttcctagtgataatgtaaatagtgctctggaaaataattcttcagcagaagaagacaagaatgcaaagccagataatagcaagcgtggagatccaaatgatccacgcgttagattgaagcgggactgtgttggtttactcgcggctttcaagcttagtgatccttgtgatcaaattttgattgtggcaaacacacatatttattgggacccacaatggatcgatgtaaagttggctcaggcaaaatatcttctttcgagagtatctcagtttgagcaactcatctcaaataaatataattgtaaaccttcagtgatcattgctggtgacttcaattcgacacctggtgacaaggtatacaattaccttttatctgccaacctaggatctacggacgaagctccaatcaagttacgcagcctttatgctgcgaatggaggggagccagagtacacaaactacactcctggttttaccggaacactggactacatattcttgtcggatggtagttcgataaaacctactagcctacttcgtttgccgcgaggggattctgaggatgtgaaaggaggcttgcccaactttcgacatcctagcgatcatctcccaattggtgctgattttctggtagtcaacatctagtgcaggtgttgattgctttttcaacagaaatagtaaatgccgttgaataatttgtgtt

SEQ ID NO: 3316 - DNA, 2174 bp, Zea mays
  Clone ID: 700259555_FLI
tgttgatgaaataaatctattggatgatggcataagcaatctacttctgaatgtcttgacggagggagttaacattgtggaaagagagggcattagctttcgccatccctgcaaaccacttctaattgctacttacaatccagaggaaggatctgtacgtgaacacttgcttgatcgtattgcaattaatttaagtgctgatcttccaatgagttttgatgaccgcgttgaagcagtggatattgcaacacggtttcaggagtctagcaaagaagttttcaaattggtggaagaaaaaactgaaactgcaaaaactcagataatttttgcaagagagtatctgaaggatgttactattagcacagagcagctcaaatatcttgtcatggaagctatacgaggtggctgtcaggggcatcgtgctgagttgtatgctgcccgagttgcaaaatgtctagctgctatggaaggacgtgaaaaagtatttgtggatgacctcaagaaagctgtagagctggtcattctacctcgctccatcctatctgataatccacaggatcagcagcaagagcaaccacccccacccccgccgccaccacctccagaaaatcaagattcttcagaagaccaagatgaggaagacgaagaccaagaggatgatgaagaagaaaatgaacaacaagaccaacagatacctgaggagttcatttttgatgctgaaggtggtttagtagatgacaaacttcttttctttgcccagcaagcacagagacgacgtggaaaagctgggcgagcaaagaatgtcatcttctcagaagataggggccgttacataaagcctatgcttcctaagggtccagtaaggaggttagctgttgatgccacgcttagagcagctgcaccataccaaaaactgcgcagagagaaagaacgtgacaaaacaagaaaggtttttgttgaaaagactgacatgagagccaaaagaatggctcgaaaagcaggtcatatttgttgtggacgctagtggtagcatggctctgaatcgtatgcagaatgctaaaggtgcggcgttgaagttgcttgcagaaagctacaccagcagagatcaggtttcaattattccttttcgtggagattatgctgaggttttgcttccaccatcaagatctatagcaatggcccggaaacgtcttgagaagctaccatgtggtggtggttctcctttagctcatggcctaagtacagctgtcagagtgggtctgaatgctgaaaagagtggcgatgttgggcgtatcatgattgttgcaatcaccgatggaagagctaatgtatcactgaagagatccactgacccagaagctgctgctgcttcagatgcaccaagaccttcttctcaagaactgaaggacgagatacttgaggtggctggcaaaatatacaaggcaggaatgtcccttcttgtcatcgacactgagaacaagtttgtatccacgggatttgccaaggaaattgcaagggttgcccaggggaaatattattacctccctaatgcttcagatgctgtaatttctgctgccaccaagaccgccctgacagacttgaagagctcatgattttgcagcagcggcacccgttttctgtaccttttgatagggatggtgaaccttcattcatgcagtaatttttgcgtaggcctctacaatgacagggggaaacaaacccgagcatggcatcgtgtaaagtgttaaggtccaatggcctcctgtccacgtttggcgatgtaaatcctccgtacatagcttgaaccattgagtgtcacgtagtgccgtggctagcagttaaaagtaccatgcgtcatgaatgacgggatggacagtggtggttaaaaatggcagacccatcgtgtggctcgaataaggaggtagtcgcggtacgtgctagaaactgaaaggaaaaagtatataaccctctagcctttaggttttgacaatagaataaatgaataatccctccaattctattgtcaccaaactagcccttagccccttaagagtctacattacctattcaccttaaaatctggttgtttcatcctcttagctttataaattcagacaaataacttttgtggttttgatgacgtgatattaatttaagtgacactagttttatct

SEQ ID NO: 3317 - DNA, 1137 bp, Zea mays
  Clone ID: 700259576_FLI
cggttacttgttggttttaaatgttagtaattactacgaagtacaataatttgtatggagcatatccagtttagcaactattccatattttaatctatcttttttataagttttagttcatgtgacttattttagaaacttgaactcacaaactttctcttatttggtctctatatggtggaattatgtcattctataatctctgttcgtttattcagtcgttgtgaactctcttctaattgctcccttcattggttgtgttgtactaatacatattggatgaagtaaacagcaatatcagttagtcaaataaaaaaatattatgtggagagcgaagacaatcaataaaaaaccttgagatctttttggtggatagtttacgtgggtattgttgtgagccgtcgcaacgcacgggcaaccgactagtaaatatataagccatgtgtttcattagtaaaaataaggataattatttgtttaattatctttccacataaaatccgtttaggctattatctcagtttttcataaataaacatttaatagtgtgtcttataaccttattattccatagtcttaaatattccacatatatcctttctaaaaaggtttaaatggttcaccaaatgtttatatatttatagttaagatattttcacgcttatatcttgttttataaaatacagaacaaacctttttgttgggggccttcctctttctaaggtcctcaaaaacatgactaaccatttgtttctagcataatagtgactattacagggagcttcggttcgcgatggaagtcttcctctctgtagaaggtcttcaagacgaagacatagctcgagggtgataacaatgaacgccgaagctatagccaaagaattacagcttcggcttaaaatggtgacgaaggccaaaatgatgctgagctcaagaggaaaagactagctagtccctaatgatttatattacagttatgaacaaatgttatggtcataaatgtatttttactcgggctgcgtctcgtgcctataaatagatgaacagtaccactgtactgttcatgctgaattgtaatcgctctcgcatcaacacctttgaacaagccgaaggtatcaatataatataaattctgct

SEQ ID NO: 3318 - DNA, 805 bp, Zea mays
  Clone ID: 700259589_FLI
ggaacacacggagtttgtgttctttcagcaaatggctccatatcaaatgtaacgcttcgtcagactgctacatcaggcagaactgtaacatacgagggtcaattcgagatactgtcgctgtcggggtcattcttcctggctgaggatggtgtccagcgcagccgaaacggaagcctcagcgtgtcgctggctggtcctgatggccgtctgttgggtggtggggtcgcaggacttctagtagcggcttcaccggttcagatagtactgggaagcttcaattctggaggcggaaaggagccacaaaagcaggctccttcagaacccacatcggctccaccgagggttgctccgacagccgggatgggaggacccagcagcccttcttcaagaggcacattgagcgagtcatccggtggcgctggaagcccaccgccactgcatcgagccatggctgctagtgctagcaatagtaaccagccaccgttcttgtccagcatgccttggagatgagtttgcagcttgcattctcttggccaattccaggcaggatgtagcaatctgcgctttcagtagcgcccgttgtgtgagtagctgtgtgtagtacaagccagaagcttgggtgggaatagaattgcgtctggtaaatctgtagctctgttgtaggttccaccctgaattcctgtgctaggtgtgttgagctgtgtaagcaatgtaatcctttcagcgttatcaaatgctatttagttaaatgtttctaccaaggcatgtcgatttgaatcataagatatcaatttgctgtttgcgt

SEQ ID NO: 3319 - DNA, 1033 bp, Zea mays
  Clone ID: 700259617_FLI
gctgatgcctgctcaccaaatgcgacaccgacacgccgccgccatgatgaacgtcgtggccatcgggctcatcctctccacgctggcagccgcgggggtctggtccccagcgccgcagccgaccgcggccccacatcatggcgaccgcatcgtccgggagggccgacgcgtggtaatcgtggagtacgagcgcgagctcccgctgtcgaccgatggcggcggcagcgtcaaggtcaaggagacgcgcgtcctgcccccggacgcactggacggcgtcgagggcgacggcggaacctttgatgaggccaggggcgtggtctcagacgcggccggcaaggtggccggtgcggcagaggaaggcaaggagagattgtccgacgccaaggagagcgccaagggcggtgtcctcggtaccgtcaagcggtgcaaggatagactctgcggcgccggcaggaaagtggaagagggagccaaggacgcggtgtcccgcgtcgaacacggcgcggaggacgcggcgaggggcgccatggaggcggtctcggatgccaaggacagcgccgagaacacggcgttcgacgccgtgcagaagggtaaggagacgatgaaaagcgccaaggacaaggcgtcggacgccgagcagcgagggaaggatgccgtaaggagcgcgaaggacaaggcgtccgacgctgcgcatcaggggaaggagacagtgaagagcgccaaggacaaggtctgcgaaactgccagcaaagcgaaggagagggcgtcaggcatccagcacggagcagccgaagcggcgaaggctgcaaaggagagggtgtctgcggcagccaagagcgccaaggacaccgtccagagcgccagggacagcgtctccgacatcgcccagagagccgaggagtgcgcggaggacaccgccgagcgcgcggcggacagggccgcggaggccgaggaggaagcgaaggcgagagcggccgaggtggccaagaacctgaccgacatcgcgcggcgggcgcgcggcgtggcgtccgac

SEQ ID NO: 3320 - DNA, 2085 bp, Zea mays
  Clone ID: 700259821_FLI
gcgttgagcacaactgcacaagcaggagaaatcagaatcaagggtctcgtcttcgttcccttcgcctccccattccgtaccgcgtcagatcgcacccctcctccatggcggcgctcagcctccgccagaggcagcttgatctgattgtgcggatgctgcacctcaacaagccaccgccgccgcccggcacggctgcggagcaagaagaggaggtgtacaagatcctggtactggacagcttctgcctctcgctgctctcgccgctgctccgcgtcgccgacctccgcaagcacggggtcaccctctactttcccatcgacaagccccgccagcaggtcgccgacgcccccgccgtgtacttcctccgccccacgcaagccaatgccgaccgcgtcgctgcagatgccgccgcctcgctctacgcatccttccacctcaacttctcctcgaccgcctggccgccgccaccgcagcctccggctctgcccaccgcgtcgcccgcctcgccgaccagtacctcgacttcgtctctctcgaggacaacctcttctccctcgcccacccgcgctcctacgtcgcgctcaacgaccccaaagcggccgacgccgacattgaggccctcgtcgacgcgatcgcgctcggcctcttctgcgcggcggccacgctcggcaccgtgcccgtcatcaggtgcccccgcggtggccccgccgagatggtcgccgccgcccttgacgcccgcctccggcatcacctcctcgccaagcctaacctcttcaccgaggcctcagcctcagcctccgttgcctccttccagcgccccgtgctctgcctcttcgacaggaatttggacctctctgtgggaatacagcacgattggagctaccgccccttggtccatgacgtcctcggcctcaagctcaacaagctcaagatgcccgcggacaagtctggcccggccaaggcctacgatctcgatgattccgatgccttctgggtagcaaacagctggtcgccgttccccagggtggctgaggagatcgagtcgcagctcgccaagtacaagcaggatgtggacgaggtgaaccagcgcaccggtggcaacaaggatggcatcgagttcgatggcacagacctcattggcaacacccagcacctgatgaatgccgttaactcgctcccggagctcacagaacgcaagaagatgatcgacaagcacacgaatatcgcgacagcgttgcttgggcacatcaaggagagatcgctggatggatactgtgactgcgggaacgacatgctcacgaagggcaccgtggacaggagcacgctactgggccttctccgagggaagggcaccaaggcggacaagcttcgtctggctgtgacctacctcctctgtttcgagacgccagagctagagcaggtcgaggcggcgctgcgtgagtcagaagtggacatgtcagcgtttcagtatgtgaagaggatcaaatcgctgaacacgcagtttagtgcctcgtcgtcaagcagtgcaacgaggagcaacattgttgattgggcagagaagctgtatgggcagtccattagcgcagtgacagcaggggtgaagaatctcttgtccagtgggaggcagcttgcattgacgaggacggtcgaagctctcatggaagggaagccgaatccggaggtggacaactatctgctgtttgacccacgtgcccctagatcaggaagcggtgggcagttcaaagggccattcagagaagcaattgtgttcatgattggtggtgggaattacattgagtacaggagcttgatggagctggcagaatgctcgcagccgccttcttccaagcatgtcatatacggagcaactgagattgtcaacggggtggagttcatcgagcaacttgcagaactggggcagaaagcggggctgggtctgggtggtggaaacaaccctccactacagtaattactaataaataagggggggttctttcacatcgtttgaacattgtcagatatgatatgatcatttgcttccttttgtatggtttatattcgttgagaatatgttagtgcaatctg

SEQ ID NO: 3321 - DNA, 1788 bp, Zea mays
  Clone ID: 700260028_FLI
gcaaaagttcgtggaataagtgggggtgagaagaagcgcctctcacttgcatgtgagttgattgctagcccttcagtcatctttgcagacgaaccaacaacaggccttgatgccttccaagctgagaaggtcatggagactcttcgtcaacttgctcaggatgggcacactgttatctgttcgatacaccagccaagaggttcagtctatggcaaatttgatgacatcgtactactgtcagatggagaaactgtatacatgggacctgcaaaagaagaacctctaacatacttctcatcattagggtaccagtgtccagatcatatgaaccctgccgagttcttggctgatctcatttccattgattatggctcaactgaaagtgtacagtcatcacagaaaaggatcgaggatctcattgaggcgttttctaacaaatctgtggtcactgaaggtaacaatttaattgcaattccagaggatcctgaattgtctgccaaacttgttcggaagactacagtgaagaaaagacatggttggtggaggcaatttcgtttgctttttaagcgagcatggatgcaggcttttcgtgatggaccagcaaacaaagtgagatcacgaatgtctgttgcttcagcagttatatttggatctgtgttttggcgaatgggaaaatctcaaacatccatacaagacaggatgggactacttcaggtggctgccataaacacagcaatggctgcattgacaaagactgtgggagttttcccaaaagaacggagtatagttgacagagaacgagcaaaaggttcctatgcacttggaccatatctttcatctaagttgttggctgagattcccattggagcagcatttccattgatatttggatcaattctctatccaatggctaaacttcacccaacattttctagatttgccaaattctgtggtattgtgactgttgagtcatttgctgcatcagcaatgggtctcactgttggagcaatggctcctacaactgaagctgcaatggctcttgggccatcccttatgacagtgtttattgtatttggaggatactatgttaaccctgacaatactccagtcatatttcgttggatcccaagaatctctctcattagatgggcctttcaaaggctttgcattaacgagttcaagggtctgcaatttgagcaacaacattcatatgacattcaaacgggtgaacaggccttggaaaggttttcattgggaggaattcgaattgcagatactctggttgcacagggtaggattctgatgttctggtactggtcaacctaccttcttctgaagaaaaacagaccgaagtatcagcagctccttccaccattggaagaagataaaaataagcagcaggtggaataagcttttcatttgcagacttcgaaagaataaattaagtatatctggagtcaaagcgaggccgcgttttctgcatagtatctggagaccccagcattatggacgagccgaggcagtatacaatccgccgcccagaagttttcttttttatttttagatcctactagttgtgaagtcagctcaatgattgcctggggctatgggctgtggccatgccgctgcaaataaactatctccaaatcgccgtccaaagtacgaccactggcaaataaactagtttcttatggtttaatctctgtacgtgtcacagcctcctgttggccggagtgagatacaataatcacgggtgtagtgcctataaatgcgtgcccatttcggctc

SEQ ID NO: 3322 - DNA, 1354 bp, Zea mays
  Clone ID: 700260124_FLI
cccgacctcgtcgtggcgctgctcccggccatgcgccgcctgtaccaggcgctgcagctggagggcctgcccaaggtccgcgtcaccacgccgcactacctcggcatcctggcgccctcggacgggatcccctccaacgcgagcttccgcccggggctggacgccaaggtgctggcgcccatgctcaggttccacaacgacaccggctcccccttcatggtgaacgcctacccctacttcagctacaacgccgccacgctggactacgcggtgttccgcccgaacgccggcgtgtacgacccggcgacgcggctcaactacaccagcatgttcgacgcgcagatggacgccatccacacggcgatgaagaagctcgggtacggcggcgtgcagatcgccgtgggcgaggccgggtggcccaccaaggctgaggccgggcaggtcggcgtaggccccgaggaggccagggatttcaacgccggcatgatccgggtgtgcagcggcgggaagggcacgccgctgatgcccgggaggacgttcgagacgtacgtcttctcgctgttcgacgagaaccagaagcccgggccggtcgcggagcggaacttcggcatcttcaacacggatctcacacccaaatacgacctggggctgctccgccaaggaccgcagtctggatctccaaccccatctccggagccctcgccgtcggtcggcggaggcaagtggtgcgtggccaagtccggcgcgagcgcaaccgacctgcagaacaacattaactacgcctgtgcctacgtcgactgtaggccgatccagagcggcggcgcgtgcttggaccccaacaacatccactcacatgcctcgtacgtcatgaacgcgtactaccaggccaatggcatgcacgactatgactgcgacttcaagggcaccggcgtggtcacctccagtgaccccagttacgggagctgcaaatacaacgcctcctcctgacggcgcgcagcaagtccagctggcactactgcaccagcctccagtccacatcgtcctccagctccaggctccagccatggccacgctggggacgggaggaggtccgtactgccgccgggcttgcgccacatacttgtatactcatgtctcacacccatgcttcttgttgctctcaaccactactagcactactatttgtctagttccataattacaagtccctctcccctcatgttaacttgatcattgtccgtgtgtagtggactagtggtggtgaataaaatagcttccattccatgtagacaaacaaacaaattgtaacatctgttatccttgggttatttgatatatttatttttcatatagt

SEQ ID NO: 3323 - DNA, 1317 bp, Zea mays
  Clone ID: 700260205_FLI
gactagccttcagccttctccagttctcctctcctcctcgttttttcccctcctcaacgcctggacggaactgaagccagccagcctgcccagccaaggtgaccggagacaagtaaaaatctcgccggtcttctcacagaccacaaacattgcgcttgctgcccagctataagtactcgccggactaggcggccaactcatcccatcccatttcatccatctcggagcagaggcaacgcaatccggcaaaaaggcgcttctttcttgccctgttcgggacaggacacagacacagagccaggagaaggaaccgccggaggctaagcttcttcttcgtctttcctgggcgcgctcaagtggcgatggcatttgcggtctccgacgagctgctgggcaccttcgtgccgattgcggtgtactggctctactcggggctctacgtcgtcctggacgggctcgggatggacgactacaggctccatcccaagggggaggaggaggccaagaacatcgtttccaggtggacggtcgtcagaggcgtccttgttcagcaggcttttcaaatcgctgtctcccttcttctcttcacggttcttggtgatgagaatgaggctgcgaggaagcaacctccggctctggtgttggcattgcaatttatcgttgcaatgttcgtcatggacacatggcagtatttcatgcacagatacatgcacatcaacaagttcttgtacaagcacgtccactctaagcaccacactcttgtcgtcccctacgcttttggagctctgtacaaccaccccctggagggactcatcctggacaccatcggtggcgcgctctcgttcctcatctctggcatgaccccaaggactggcatattcttcttctcgttcgcgaccatcaagaccgtcgacgaccactgtggtctgtggcttcctgggaacatcctccatgtattcttcagcaacaacagcgcttaccatgacatccaccatcagctctacggcaacaagtacaacttctctcagcccttctttgtcatgtgggacaagatccttggaacatacatgccttacactctggagacccgcaagggaggtggtctcgaggcgcgcccggttaagctcaaccaagcacagcagaccaaggctgattgagcagtgtggtttctcctgtttatctactacttcccctgattttttccccttctgactgcatttgtactgtagaagtatttcctgtccatatagtaaaatcatttaggcaaatgccatgttgtacccaacagatatagcaaataaaacatcttgttaatgg

SEQ ID NO: 3324 - DNA, 475 bp, Zea mays
  Clone ID: 700260242_FLI
acaagatgaagtacctagccttccgaccacacaagactctccagcaacatcaatggcaaaactatctacctgtagcaacgaaagaaacgagggtgatgatagcgcataagtgaactcaacaagcaagagatatcgtcaccaccaaaatggataaaacatagccacactagcaacggcataccagatcttacagaccccaaaaagaaaagctcctaaatcgtcatcaacttcgtgaaggtgtttgctttttgcgcacctatcaggagcaccatcacttttggaccatgaatgcttccctatagatatgaacctactgttagactatttgtggatatgtacatattgacttaacacctgcaagcacactgttgctaagtgttgatgtatgatagttgaatgctacttagtatgtattgtagtctaaatccactctacaactggtatcaactattacataaaaacaacgttatatgct

SEQ ID NO: 3325 - DNA, 789 bp, Zea mays
  Clone ID: 700260334_FLI
gtctgtgcgaaggcgaccattccttcttcgctccttcgccgccgctatggttaagtactcgcaggagccgggcaaccctaccaaatcggccaaggccatgggaagggacctgagggtccacttcaagaacacaagggagacagcttttgcgcttcgcaagctgcctttgaccaaggctaagcgataccttgaggatgttattgctcacaagcaggcaattcccttccggagatactgtggaggtgttggtcgcaccgcacaagcaaagtctcgccactccaatgggcagggtcgctggcctgttaagtcagccaggttcatattggatttgctgaagaatgctgagagtaacgctgatgtgaaaggcttggacgtggacaacctctatgtttcacacatccaggtgaaccaagcccagaagcagaggcgccgcacctaccgtgctcacggacgcattaacccttacatgtcctccccttgccacattgagctgattctgtcagagaaggaagagcctgtgaagaaagaggctgacaacattgtcgcggcaaggaagcagtgaagtatgttagcctgctgataatggcatcctttcgaagcattatagccgtagctcttttatgtaccttttcaggctggtaccgataccgtggatctggatttgctatgttttgtactgtgctcgagtgtaaggtcagttcgtaatacaatcaatctgcgtggaacaatttgatatccttgaatatgttagtgagatcatttcgacaatgaaagttgagaacagaagtt

SEQ ID NO: 3326 - DNA, 1398 bp, Zea mays
  Clone ID: 700260366_FLI
cggcgtccttcttcctcaacgcgggggcttcggtggggccggactttggggacgacgtgggcaatggcccgcactcgttcctgcagggcaacaagcctttccatggactcatgcagctgcccgacctccaaggcaacggtgctggggggcccggcggctcaggccccagcctcttcaacctgagtttctttgctaacaatggcaacagctcggggtccagtcacgagcatgcaagccaggggctcatgaacaataatgaccacttcaacggcggagcaggtggaggcggcgggggttcggaggcttcggaggctgggattttcggcggaaacttcgttggtggtggagatcaagttccaccgcccgggctctacagcgatcaagcctccatgctgccgcagatgtcggcgacagctctgctccagaaggcggcgcagatgggcgcgacctcgagcgcgaacggcggcgctgcatccatgttccgaggcttcgtgggctcttcccctcacgtgcggccggcgacgccgcacatggaacagagcgacgcgaacctcaacgacctgatgaactcgctcgctggaggtggtgtcggcgccggaggaatgttcggcagcagcaacggcgccggaggcccggggatgtttgatccgaggcagctgtgtgacatggcggagcacgaggtgaagttcggccatggtggcggagacatgacgcgggacttccttggcgtcggcggaggaggcatcgtgcgcgggatatcgacacctagaggagaccaccaaagcagcagcgatatgagctccctggaggccgagatgaagtcggcctcgtccttcaacggaggcaggatgccatgaccgacccatcggtcgagcttataaacaagacataagctcgcgcacagtaagcaagagacttgatcaagcagatgcagtgagaagagtaaggtcatcgttatatagcgtagtagcaatcaatgcaagttatcaactgagtcgcatgagtgagttcatgcatggataaagctggctagcttagctagctttcatcatccgaagggaccttgggtgagagagaggcgtctttctccgactaatggagtaagctagagtgcgagttggacgcatgtgatgacccctttggtcgtggtgggggttggtgttcctgttggttttcccttgctttgtagttggataatctttgttggattaagtatagtttctggtgatagaaccaataaggatgtttgtagctagcttataatgagggcgtgaattgcagcttaatttgcttcactcccctcctattttttattaccttttctctttttgcaaagcaatattctccttacaatgtcattaatcgtgcaagctgaaattcatgctattttcttgtgtc

SEQ ID NO: 3327 - DNA, 1989 bp, Zea mays
  Clone ID: 700260423_FLI
gggggcgcacgggggtgtcacgatctcccccgggagaagcggatcttgcggagctctcatgtccgccgggagggcgacctgtcagtgattggacagtgcagctgcacctcgtcccggcagcatgctgcccgcgtccgcgtcttttctgctgcccacattccccaacgccgcgcccgtaccgtgtactggtggtggtcgccctcccctcctcgtcctcccagcttgtcctcttctttccaccagcttgcttttggtcgctccaacgccgccgctacgtgctaaaccatgggggaaaggaaaggttgagaggctagtgctgagccgcgcctgctagcaggactagtttactgctgctgagggaacacgctgttgtggagcaggtgagtgagctccttttagtcggggtcaggtgaactcacaagcaaaacggccgcccattggattggcgcctgtccgcctcttcccctttcgttgtgcctattcgttggcgtgcactacccgtctggtcatttcgtcctcccttgggcttgtgctgctgcctgctagtggttctcgatttcgcctgggaaaagttttcaggtagaacacgcgtgcatttggcaaatctgcaggtgttatcttgtgatatcgtctgcaaagatgagattgtgatggatccgctccaagattgcttcggtccctggaggagttaggagtcctagaattcaaatgcagaaaccagtctcctgacagaaaaaaaggacagtcgcgcacgtggtgttcgtcaaaaagccgcaccgcactgagggagtcgcagcttgcgaccatcagaatcgtcacaatgagagattttgcatcttgcctaagccaaagtgccgtccaggttgcgcattcctcttcctcaagtgggcagaacttcgtgcagtctgcgtacgtggcacgcctgcgtgacaagcgttgcgtggtcacggtcacctggagcaaggtggccatggggcaggctttcgccattgccatccatgactactccaaccgttgcctctgcaaggcagaggtgaagccctggctgttctccaagaggaaaggttccaaggtcatggaattggatagtggcaatgtggagatcatctgggacctgtcagctgcaaagttcgcagcagggccagagccactcgaaggcttccatgttgctctgctctatggtcttgaagttgtccttgttttaggtaacctaagcaaggaggaggatcaccgggttttgtcagatgcttctcattgtgatgcagtcatgatagctaggaaagagcacatttatgcgaagaagatgtattccgcgaaagctcgatttttggacattggtcagattcatcacatctccatagagtgcgacatggcaggggtgagggatccctgcctagagattaggatcgacaagaagaaagtgttgcacttgaagaggctggcatggaaattcagagggaaccagactatttatgtcgatggacttccagtggaggtgctatgggatgtgcatgactggctatttggttccacaaatggatgtgctgtgtttttgtttcaatcaggccagtccatggaaaaaatctcgttcagaacatgctcacagaatgaaaaggaggctcaagcacatcgtcttggtttcacattgatattaaaagcgtggaagactgagtaagcactaggctgaaacatgatggcaggtttcttcaaccactctgctcttaatgttgaattagcaacagtaggaatctaggatctagcaagtgtaacaagatccttcacaagaattctgtgcttgttacatatgctgtcctagcggtagttgagaagttgagattttgaatatgcatatgatctttgatatatcatcaaagctagttagataggatgtgggactctggtgctcaggtcatttgacataatgtctcacaatttatactttttgatgggaagttcatgatagaatattgaaaatgatgtctacacttc

SEQ ID NO: 3328 - DNA, 3187 bp, Zea mays
  Clone ID: 700260445_FLI
ctgttcgtcgagctgtggaaggcctgcgcggggccgctgtcctgcgtgccgccgcttggggagaaggtctactacctcccgcagggccacatcgagcaggtggaggcatcgacgaaccagcttgccgagcagcagggcacgcccctctacaacctgccatggaagattccctgcaagctcatgaacatcgaactgaaggttgagccggatactgatgaggtgtacgcccagctcaccctgctccctgataagaagcaagatgagaatacatctacaacagtggaggaagaggaggtggtggtgcctcctgcgctaccagccacaaatgagggtcctcacatccattccttctgcaagacattgactgcctcagacacaagcacacatggtggtttctcagtgttgcgccggcatgcagatgagtgcctcccaccattggatatgagtcaacatcccccaaatcaagaattggtggccaaggacctgcatggggccgagtggcggttccgtcacatctttcgaggtcagccacggagacatctcctgcaaagtggttggagtgtttttgtgagcgccaagcgtcttgtcgcgggggatgccttcatatttctcagaggtgagaatggggagctccgtgttggagttcggcgtgcactgaggcaccaaaccactatcccatcttcagtcatatcaagccacaatatgcatcttggtgttcttgcaacagcatggcatgcagtgaacactgatagtatgttcactgtctactacaagccaaggactagtccagctgaatttgtggtttcgcgagataggtactatgaatcactgaaacgaaattattcaatagggatgagatttaagatgagatttgaaggtgaagaggcagcagagcaaagattcactggcacaatagttggaataggtgcttctgatccatctggttgggctgactcaaaatggcgttcccttaaggtgagatgggatgaaccttcttctatttctcgtcctgaaagagtttctccttggcaaatagaaccttctgttagcccatgtcatgtgaaccctcttccagttagattcaagaggtctcgatcaagcgttaatgctttgccatctgacgtgtctactgtaaccagagaagtcacttctaaagtcatggcagactcgcagcaaaatagtctcacaagagccttgcacaatcaaggaaggacacaattgacagttcgataccatgataacagtgatgtgaagactactcaggatcttaccgtgtggtcttcaggaactgagcaacagagaaacaatattgctgcccagacaaagctatgtctggagggttggacgccaactagaagtcctgaaggctacaatcagatattctcggcatttaaaccactgaaagatatacataacccacttggtccttttcctagtcaaatatctgggactcactcaaatagctgggacacagctgatgctcgttatccagtccaacaagctaattacagcatgttacctggcacatggtctttgaggcctcataacagtggttttaggatgaatcaacaaaattatctagtgatgcctgaaggtgcaaattttacggggaaatcagctttcacttcacttcaggaccatggcactgataaatgctccacaggctgctttggtcatattgagtcaagttcccacacagaccatgcatcctcaagtttgatcaggccccagcctttggtccttggaaatggtgttcagaaaagcaaaggcacttcatttaaattatttgggattccccttggcagcccagaaaaatctgaacctctggtatccccaccaagtgtcgcatatgacgggaaacttcaaacttctccatcagaaaaagggaatcagctagacgtagttgaagtggataattgttctcatccttctaagactgtgaagccacttgatggtcctcagtcagattctattacagagaataatcagccttctccagaagctacccttaatatccagaacaaagtgcaaagtagttccaccagaagctgcaagaaggttcatcatatgttgcacctttttccttgctagtagtcattccttgatacataaatgcttactaggcccaaaccttcaattgaatacttctcaaagtatgctccaaagaagtttatgtactcttgatcccttttggcaacttgttttatgtatctagaagcaccggtccaataaaacctgctagttgtgtaacctactaacctttcatgctaataaattacttgagtttttcttgccccttcaagtgtcgtatttggatctgtttggcatcatcaaaagagctatttatccttaagtttggctgtcaagaaagaaaaaaaaagctgtgggaatcctgtgatgagactttttaatctttaagcagtatgccttttggatatatagtctagcattatgcaaatggttattaaatacaatgtggatgacaaatgtcacgttgtcattagattggtgacatgggctttgagaaatgttagctttctaatgataacggtcaaatgttctatctaattgcatccatttttctccggttgctttttattttattttatttatttgaggggaaggataggcctgacacaatataccgagtaaaggccttgggttcgacgcagcttttctgcaaaaatgtagggatatggcgtgcctcggttattacttcatcggactccactcaagtgttcataagcaagatgtttgacttcgatggtgagctgaagagtccatgcaaaagttggttagttgtctacactgacaatgaaggcgatataatgctggttggtgatgacccctggaatgaattctgcgatatggtccacaagatcttcatctacacgagagaggaagtcgaaaggatgaacccaggtgccctgaactcaaggtctgaagatagtctatctgactcgctgggaagaggggtagcttccagagatccccgaggaggcgggtctacttcggctctcgattccgagaactgctagtttgttcagtcagtgaggcctttggaagtgaagcagacaaaaggcgtgaatcttgcggtgtagagtgtagttggtacattgtgtgtatgcctccgggtaagccctgcggtacccagtttgtgtcctggcgccagtttaccatttaagct

SEQ ID NO: 3329 - DNA, 727 bp, Zea mays
  Clone ID: 700260476_FLI
cagccggattaagcactttgagagcgctagatacgtgtcatatcacataaacaatggtgaaggctgttgctgtgcttggtagcagcgatggtgtcaagggcaccatctttttcacccaagtgggagatggccctaccactgtcaccggaagtgtctctggcctcaagcctggcctccatgggtttcatgtgcatgcgcttggtgacaccaccaatggctgcatgtcaactggaccacactacaatcctgcgagcaaggaacatggagcaccagaagatgagaaccgccatgccggtgatcttggaaatgtgacagctggagcagatggtgttgcaaacattaatgttaccgacagccagatcccactgactgggccaaactcaatcattggcagagctgttgttgttcacgctgaccccgatgatcttggaaagggtggacacgagctcagcaagagcaccggaaacgctggcggccgtgttgcttgtgggatcatcggactccagggctgaactgaaacgaatggtcgctggacttcgggggcgcctgggagtgccgtcaccactcaccagcaggctagaataacatcccgagacatcgtgaaataataataataagagcgcctgatatgtgatcagtggtgtactcgccattaagcacctgtggcaaccgatgagctgaactgtgttggactgttggataatgctggttcgcctgagcatgtgtt

SEQ ID NO: 3330 - DNA, 936 bp, Zea mays
  Clone ID: 700260657_FLI
gctagttgtagatcggcgaggccgtctccgttcgcacaagccagacctcttcgcgccggcaatggacaggctcggcgcgaatccggcgaactcgtgcccgctgacgccgcttggcttcctggagcgctcggccaccgtcttcggcgattgccactccgtcgtgtaccacgacacggtcttcacctggtcccagacacaccggcgatgcctccgcctcgcctccgcgctcgtctctctcggcatcaaccgcggcgacatcgtgtccgtgctgttgcccaacgtgccggccatgtacgagatgcagttcggagtgcccatgagcggcgccgtgctcaacaacatcaacatgcgcctggacgcgcgcacggtcgccgtcctgctccgccactccggctccaagctcgtcttcgtggacccggcgtctctaacgcttatcagagacgcgctgaagcagctcccgcaggggcacccggcaccgcgcgtcatccccgtcgaggatccccacgagaaggggctccctgccgccccgcccgggtcactgacgtacgaggggcttctcgagaagggcgacccggagttcgcgtgggttcggccggccagcgagtgggacccgatggtactcaactacacctccggcacgacgtcggagcccaagggggtggtgcactgccaccgcgggatcttcttgatcacgctcgactcgctcatcgaatgggccgtcccgccgcagccgacgtacctgtggacgctgcccatgttccacgccaacggctggagcttcccatgggggatggccgtggtgggcgggaccaacgtctgcctgcgccgcgttgacgccgccgaggtgtacgccaccatcgcgggccgcggcgtcagccacctctgcggcgcgcccgtcgtgctcaacatgctggccaacgccccggagggcgtgcg

SEQ ID NO: 3331 - DNA, 1595 bp, Zea mays
  Clone ID: 700260679_FLI
ttggttcctcgcattagccacccactggattttcttgccaacgagcttcgactacaccaacgccgcttcgtcccagtgcttgctaatcatcggctcctcttaattgcagcaaccaccacgcttcgtgttttcagatcaaagaagtgggaggaacaacacagatttggagcggcacgccagcaatacggaccgggggtgacctgaggcgtggagatttttggccgctgcctgcatctccacgtcgcggtcccaatcaagatcattatttctttctccttccttgtccccgcccaaatcgcaaggcttcgttgcgaatcgcccttggcgtggccccaggattcgacgccccagcgccctcgctggaatcgtgggcgctgtggaggaggactcgaggcggccgtcgcgcttgtctcgtctctcatcaatctcactctctctctggtctctctctttttttttaactgcggggattcgccctgatttagaggagcgagttgctggtctcggcgccgtctagctcgtcccggaccgacgatttggggcagggcaggtccaaagcttgagagatcatccacttccgcatgcctcagttgggcctgtctcgtgatcttcctgtaatgcggtttgcggcaggcagcagcatcatggaagattgagaaaatttggaggcatctactacaaggttttcctgtgtgccctcaagacagggcgctgtgccgtgtgggcctcctcttgggcatccatggggttcctcagccttgtgggcaactcctttgggtgctctgcttccggtgagcgtcttgtctcagctgcccgcgacggcgacctgcaggaggcacgcgcactcctcgaatacaaccctcgccttgcccggtactccacgttcggcggccggaactcaccgctgcactatgccgcggcgcaaggccaccatgagattgtctctctgttgcttgaatccggtgttgagatcaaccttaggaattacagggggcagactgctttgatgcaagcatgccaatatggccactgggaggttgttcaaacactgatacttttcaatgcaaatgtgcacaggacagattatctgaacggtggaactgctctccattttgctgcactgcatggtcatgcccgatgcctccgtcttgtgcttgcagattatgttccaagcgtaccgaatttctgcaccctggtgaatcataagtcatctgaagaagattcagctgctgattttgatcatgagtatgcaggatagctagcatgttttctctgtactagtttattttagtgcacaaatcatgtgatagtatgtctttgttaccagtgctttggtcaagatggtgaatcagaaggcggatggaggtttaaccccacttcatatggcagcattaaacgggcatgtagagtgcgtgcaattgttgctggacttaggggcatctgtttctgaggtcactattgaggatggaacaactatagacttaataggtatcacttttgcctttttggtcgcatactcttgttgtaagtgcttaaccttggtgagaactttgtagtaagcaaatcaacaccaacctatatgattctttgtcttg

SEQ ID NO: 3332 - DNA, 649 bp, Zea mays
  Clone ID: 700260730_FLI
caggcgcccgtcgccgcctggtccaccgggctctgcaactgcttcgacgactgccacaactgctgcgtgacgtgcgtgtgcccgtgcatcacgttcgggcagaccgcggagatcatcgaccggggctccacgtcctgcggcaccagcggggcgctgtacgcgctcgtcatgctgctcaccggctgtcagtgcgtctactcctgcttctaccgcgccaagatgcgcgcgcagtacggcctccaggtgagcccctgctccgactgctgcgtgcactgctgctgccagtgctgcgcgctctgccaggagtaccgcgagctcaagaagcgaggcttcgacatgagcataggatggcatgcgaacatggagaggcaggggcgcgccgccgccgccgtgccgccgcacatgcatcctgggatgacccgctgacgctctgccgctcgcctcacttctgctgaggaaatcaagtgatttggtattggtccgctcccagcaggcagtatcaactactgtaaccaatccatgatctgtatgcggtatcgggctgaactgatactttatggacttgttgcttcaacttagtccgtaaaacgctcaagaccacatgaaaatatggtccataaaacttgttcaaaaatagacattttgcact

SEQ ID NO: 3333 - DNA, 1729 bp, Zea mays
  Clone ID: 700260760_FLI
gcttgcggttgcgggagggaagctgcgcgcgctaggctgccatggcggtggagaagacgctgcccggcgcgagtgcggggaggaccgtgctggtcacgggcggggcgggctacatcggtagccacgccgtgctgcagctcctcctcgcgggcttccgcgccgtcgtcatcgacaacctctctttccacaagattgatctccgtgacaagggagcactggaaatggtttttgcttctacaagatttgaagctgtcattcacttcgctggattgaaagctgtgggtgaaagcgtacagaagccattactttattatgacaacaacgtcattggcacgataaatcttctagaagttatgtctgttcacggttgcaagaagttggtgttctcatcatcagctgcagtttatggatcacccaaaaactcaccctgcacagaaaattttcctcttactccaaacaatccatatggcaaaacaaagctcgttgttgaagatatttgccgggatatctaccgttcagatcctgaatggaagatcattttacttaggtacttcaatccagttggtgctcatcctagtggatatcttggcgaggacccacgaggaattcccaacaatcttatgccctatgttcagcaagttgcggttggtaggaggccagctctaacagttttaggaaatgactatgcaacaagagatgggactggggtccgagattacatccatgtggttgaccttgctgacggacatattgctgcattgcagaagctttttgagaactctagcatagggtgtgaagcgtacaaccttggaaccggaagaggtacatctgtgctggagattgttaaagcatttgagaaggcttctgggaagaaaatacctctgatttttggtgaaagacgcccaggtgatgcagagattctgttttcagagactactaaagcagagagggagcttaactggaaagcaaaatacggtattgaagagatgtgccgcgaccaatggaactgggccagcaagaacccttatggctatggatcacctgactctatcaagcagaatggtcaccaaacaaacggatccgctgactcctccaagcagaatggccaccgcacaaacggttcaactgactcacccaagcggaacggccaccatgcgtatgggtctgctgactcacccaagcgcaacgggcactgcgtttttggatcatcagacctcaagccgaatggtaatggccacctgcgctgagcagaactgtttggcctgtgagctccctgtacattcggttgcgatgtgagctccctgcacgttcggtcgaggtctatcgtgaacccactatccgagattgatgtggatcattgggttgacaggtcatacagtatagagccggtggcagaggaattcctgtttgctgtgggtaaagcttatcttctgctttcgtgttttttcttgcttctttcgattatggtgtaggaatgtggtcataatgtattagctgattatcctttccctgctaattggactttattacgcttcattaagtttggctgattactgtttaacggggaaaagttgcacctgtgtacgattatttatttgtacctgtaatatttatggagaactagcctcgccgcaaatagccctgatgaattcagctgcagtttattcccagattggactgttgtttaatgtgaatgtaaatatgatgcctctgcaaacattgagcagat

SEQ ID NO: 3334 - DNA, 618 bp, Zea mays
  Clone ID: 700260815_FLI
agcatacactagtgcttttgctagctacttgtgcgagaagagagagcgcacggcgatagatatggcgcatagcaagcgcgaaatcaagcccgggagggcgcataccaaggtggccggcgacgacgagatgctgcggaccgggttcttcgacggcacgccgctggagggcggcaagatcgccgactcccagcccgtcgacctcttcgccgctgcccgccgcgtcgccgacgccccgtactcatcgcagcaggaaggaccacacgaggaggggaccaacaagaacgccgtcatcgcggagtcggagcccgtcgacctgcccgcgagcgcgcggggcgtggcggaggtgaaccgtgctgggccggaggagcagacaggccgcggtcggcagggcatggccgagcccaccgccggtggacgtcgcttgggattaggtcgcccggccccggcttaacgatccagatcaagcagtactcgactaccgccactacactacctgctctgctcgtgtcttgtttccagttttctttctctgtaagcggtgtagggtttgccaaacttttatgtacgaattatgaatatcaataaagtcgatctgctgctgcgtttcttggcaccaac

SEQ ID NO: 3335 - DNA, 1676 bp, Zea mays
  Clone ID: 700260850_FLI
cagccttggccgtcgagcgccccagctccttcctctccctctcgattctctgttgaccggtgccctgctcgaatttccgcccgccaagctcccagccgagctcttgcgctgggtttctctccctggtgtgctcgcctgtaccacacttctgctcgaacagcgcccaacctgcttgccaaggcttttcccctcggcgtcgacctccctgcgcgtccccggcctcagcccctctgttcttcgttcctgctcagccgctccctcccctccttccctgctcaaccagctcggttccatggcagcgcgcagctcccctttgctcgcccagccgtcgagtttccccatgcgcaatctcctgcagccatggcgcccggccggaatttcccgtctagttcgcgtcctgctcggtgttcctttgctcgtcgcgccggagctcccatcgccgtgcgcagcttcttctctggtggccacgcgcccttccagctcgccacggcgctcagtcctgtccatctcgccgtgttcggatttagagcagcacactccctgcgtgtcgcgccgttcctggttccctgaacacgcgagttcttttactagcgttgttcccggtgtcgcgcgccgtgcagtagcacgccctttgccgaacctgtggtcacggtctcgccttgctgccacagccacgcctattgccgcgctcggtcttcgtctctgtcgcacacgcgaattttcttcgcttggtcttaattcccgtcgcatcgtcgatctcgccaaatgcgttcgtcgtttggtcctgtgtccttaggatcgttgaccgtgtttgctaccgcgtgcgcttgtttcttaggcgcatcccgcagtagaggggtctcgcgcgcgtggttttgaagctatgcgcgttcgtcgtgccgcgtcgtgtgctgatattctctcccagcagactttgccgtcgaccatgttcaagtaattgttcggctcctcgcatcccatctattcaataaaccacccaaatccatagactgtcgacgcactgctgccttacgcggctgtctctgtcacttgcatcagcccgccagacctacagctccatatacgtcgctctcccgtatcgtcgtcgagcccgtcgaacctcgttcttccatgctcgatttgtcgaaccctgaatcccagactttagacaaaaataagcgaggtccctgtgcatcgcttatcaagtactcggtcgaagacttcaatcgaagatcatcgttgaccccgcaacttcagctcgagttaattatggtaagttgatttattattcctgtcgactaaataaatggtaggattaaatagaagaattcattgcgatgattctcttgtttattactcgatgtagagattaagttgaattttagggttatgcgataagtatattggtagacatatataatacacgagttaaccggtaaattagtttagaaagttaataaaagtttttctatcaaattttttaagtattagatgtctaaaaattgtgaagttacaagttataagtcgtttagggtactctctaaactagatatcatattctatgtgtgttagtggcttttataattggaatggatggtgattgtgacctcgactatttagctaagttgtaagagcatgatcgtcgtaagtaacaatatatcgatactagtgtccgt

SEQ ID NO: 3336 - DNA, 1243 bp, Zea mays
  Clone ID: 700260909_FLI
gacagatcaagtcacacaacagggcctgccgaaaactgaaacgaggtaaagggtcaaaaaaggcatatgtgcatgaatacaacatgtagtgcgaacatataggccatgtgcttactccactctctcgtcacggcctcacactgcagaggcttggacggacgggatggacatggcgcggtacgagtcatgctaccggcactggatcgccgggcaggaggcaggcctcgccgagctcgaggcggcgtcggccaatgccgccgcgggccgggcaacggacgccgagctgcggaccgtggtggagcggtgcatgctcgggtaccaggactacgccacccgcaggcgcgcgctgtcgcgggaggacggcgtcgccttcttcgccccgccctggtgcaccgccttcgagaactccgtgctctggctcgggggctgccgcccttcgctcaccgtccgcctgctctacaacctctccggggagggcctggaggcgcaggtggaggagctgctcggcggcctcagcaacggcgtcatcccgaccggggccctggggatcacgtccgctcagctggtgctcatcaacgacctccacagccggacggtgcaccaggagaacgccctgtcggaccggctcgccaccctgcaggaggacatcgccgaccgcccgctcctgcccatcgtgcggcagcgcgagctcgctgccgcggcacggttgggagctgcagctgctgccagcggaagctgcgacggcgcggcgcggcggcggctcagggcggcccggctaggagccgcggacgccgaggtggacgcggcgctggacagctacaaggccgcgctgtcgcggctgctggtggaggccgacgagctgaggatggcgacggcgcgggcgctggcgacggagatcctgacgcctcggcaagcggtggagatgctggcggcaggcaagcacctgcacctctccgtccgcgactggagccgccgtagggaagcagcagctggcgcacagcaacagcttggcgggcagagcgccggaacggacaacaccgtccgcccgagcacatgaaaggcttgccattcctcgcccttgcctgcagctagttagtagcatcccgtgtgtagcttggacaccacacaacctctctagtacccgcctgtctttctatatagaccgatcgatcaccatgtgcatggcgtccattaatatgtacaaagttggtgcttggtgtttttgttcctaagaacctaaatt

SEQ ID NO: 3337 - DNA, 1141 bp, Zea mays
  Clone ID: 700260940_FLI
accaattaactagcttcttctagctctagctaggctcgtctgctgcaagaaggtaacagcgcaggcatggaggggaaggaggaggacgtccgcctgggcgccaacaagttctcggagcgccagcccatcggcacggcggcgcagggcacggacgacaaggactacaaggagcccccgccggcgccgctcttcgagcccggggagctcaagtcctggtccttctaccgcgccggcatccccgagttcgtcgccaccttcctcttcctctacatctccatcctcaccgtcatgggcgtctccaagtccacctccaagtgcgccaccgtcggcatccagggcatcgcctggtccttcggcggcatgatcttcgccctcgtctactgcaccgccggcatctccggcgggcacatcaacccggcggtgaccttcgggctgttcctggcgaggaagttgtccctcaccagggcggtgttttacatcatcatgcagtgcctgggcgccatctgcggcgcgggcgtcgtcaaggggttccagcaggggctgtacatgggcaacggcggcggcgccaacgtcgtcgcgcccggctacaccaagggcgacggcctcggcgccgagatcgtcggcaccttcatcctcgtctacaccgtcttctccgccaccgacgccaagaggaacgccagggactcccatgtgccgatcctcgcccctcttccaatcgggtttgccgtgttcctcgtccacctggccaccatccctatcaccggcaccggcatcaaccccgcgcggagccttggcgccgccgtaatttacaaccagcaccatgcgtgggctgaccactggatcttctgggtcggccccttcatcggcgctgcgctggctgccatctaccaccaggtgatcatcagggcgatcccgttcaagagtaggtcttaaaggagccgatgctgctgcttcgagatgctgccggtcttgaaaggatggattcgtggctgtttcaaatgatcccctactatgttacgtggagttccattcctctttcaaagttcggagctgcttttatccgaacccagacttgtaattcatctgtaccaattgtgtaatatgccgcgcctctgttatgtgcaattcaaaattatgagac

SEQ ID NO: 3338 - DNA, 649 bp, Zea mays; identical to SEQ ID NO: 3332
  Clone ID: 700260992_FLI

SEQ ID NO: 3339 - DNA, 1341 bp, Zea mays
  Clone ID: 700261105_FLI
atccgataaaattggaacgatacagagaagattagcatggcccctgcgcaaggatgacacgcacaaatcgagagttctattcttccagtatactagtatttagttgtatatctcgatgaattccaaccatgcatggaacatggttcccatgtcctgatacaagttatgatggactgtcgagcaggtttttaatgatgcaattgaagcactgagggtctcttacaagaaaatgaacccattttgtgttccttttgcaactacgaatatgggctctgcgatccttgcaatggatctgggatggatgggaccaaactattctatttccacagcttgtgctaccagtaacttctgtatccttaatgcagcaaaccacatcagaagaggcgaagctgacgttatgctctgcggtggttctgatgcacctcttatcccaatcggattgggaggttttgtggcatgcagagctctttcacagaggaacagtgacccaacaaaagcttctcggccttgggacatgggacgtgatggttttgttatgggggaaggggctggtgtcctcgtattggaagaacttgagcatgccaaggttttaaacatgcaatttatgaaagaggtgcaacaatatatgctgaatttcttggtggaagcttcacatgtgatgcttaccacatgactgagccacatcctgaaggaagagggattactctctgcatcgaaaaggcactagctgatgcaggggtagcaagggaagaaatcaactacgtgaatgcccatgcaacatctacacaagcaggtgacttgaaggagtatgaggctatcgtgcgctgttttcgccagaaccctcaactgagggtgaactcgaccaaatcaatgactgggcatcttataggagcagctggtggaatagaagcagttgcttctatacaagctataagaactggttgggtccatccaaatttgaatttagaaaatccagaggacaccgtggacgtgggcgtcttggtagggtcacagaaggagagatgtgaagtgaaggtggcgttgtccaactcattcggattcggtgggcacaactcatcgattctctttgccccctttaagtgaacatgaccgaggcgaagaaccgacatcttcatcatcgcgcaaatggcttcatatatctggaactccacatagaaatctggtggattctgcaacttcctccgtgccacacatactgcatatggaggtccaaagtgagggtacaatactatgccacacacatttgagcgaacaaaacatcagcccccctacatgtttcatctactatcacaaagttgcaaaatatatatggtaactatc

SEQ ID NO: 3340 - DNA, 1282 bp, Zea mays
  Clone ID: 700261120_FLI
cttccctcctccgctcctcctagttcctaccaactcccgttgttgcctacggcgattccaaattcccatctgccctcctgctgctccactccactccactccaggctcttttccctgctcctgtgggctgtggcgagcgcaaaccagcctcgcttcccaaaccctagctcctcgctctcccgcccgcgtggcctgccaggcaaccacccccggatcaactccgtacagcgtgcctccgcctcccggactccagcggcggcgggatgtggtctcactccaaggacttgctcgagatcgagcccctcgagctccgattcccattcgagacaaagaagcagatctcgtgctctatgcagttgacaaaccgaacagatgactacatcggctttaaggttaagacgacgagcccgaagaagtactgtgtccggcccaacagcggcatcgtgccacctcggtccaccagcgatgtcattgtgacaatgcaagcacaaaaggaggcgccaccggacatgcagtgcaaggacaagtttcttgtgcaaagtgtcgttgtggcggaagggaccttagtcaaggacatcactggcgatatgtttaccaaagaatcagctaatgtggtggatgaggttaagctgaaggtcgtctacatcccaccacccaaaccgccatccccagtgcatgaggaatctgaagaaggctcatcaccccgaccttcattgtccgatggaattaacttgaattatcaagagatgcagacaacgagggaatctgatgagtcactgttgttctcggctgtaaaaactcatatagatcaaaaggactacacctccgagacatctgctttgatttcaaagttgacagaagagagaaactctgccattcagcagaacaataagcttcgagaggaactggaccttacgaggagggaagccaacaagcagaatggtggattctcctttgtggtcgtggtggccattgctctcctgggaatgctactgggatatatcatgaagagatagatgggctcataatgactcggcctcatgttagaccgttttcctcacagtattgaatattgtctaatgcacttatcacatgcacactgctactccatagcatattcatctggtgtcttacgtgatctgtttcgtgcttgggattgggatgactagtcaccagtcgcaacacaggctgtcaaacaatggtctgtgtgcttaatcttgttttagctgttatgttagtgtgtgcaactaaaactgggtaattaatgatgtcgttttggtcg

SEQ ID NO: 3341 - DNA, 511 bp, Zea mays
  Clone ID: 700261160_FLI
gccggacctgcccggccaagggcaccgaccgccggacgccgctggacgtgcgcacgcccgacgcgttcgacaacaagtactacgtcaacctggtgaaccgtgaggggctcttcacctccgaccaggacctcttcagcaaccccggcaccaggcccctcgtcgagaagttcgcgcgcagccagagagacttcttcgaccagttcgccttctccgtggtgaagatggggcagatcaaggtgctcacgggcgcgcaggggcagatccgcaggaactgctccgcccgcaacgcaggcatgacgtggtccgtcgtcgacgaggctgcacagcagagcttcgtgttctagactttgtacgtactggctgccgtgtgggaggcggtgtcctgtcaacagaacagatagctagcactagcagtagcactggacggcatgcagcgcccccatgcatctagcttggacaaataaaagtggccatgcataaataaatctaccgcaaccgatcttcaaatagt

SEQ ID NO: 3342 - DNA, 913 bp, Zea mays
  Clone ID: 700261171_FLI
attaatcacccactctactactcgaagttactaccagcagcttgcttcaacagtagaagagagcgagccgaggatggcgtcaccgaagccctcgtcggcggccctgctcctcctggcggcggcggccgtgctggcgctggcgcgcgcggacctgacgcacgacaactgcgtgaagaacaagaaggtgacggtgcagaacctgtgcagccacgacgtgacgctgacgctggagccgctggccaacagcccgccgctgttcgcgggcacctacacgttgcacccgcgcagccacgccgagttccccgtgtgctggtggacggggcgcctgcgcgcgcccgacgccgcccaggtggagttccacgtcggcgtcgacggcggctccttctacctggcccccaacgcgcagccgggccagcgcgtcccggtctccgtcaccccgcacggctcgccgctgcagggccgctgccccgccgtcggctgcgccatccagggccgctgctccgtgcaccaggtgcccagcggcgactgccgcaacgtccaggagatgaagatcatctactgtaacccgcacgtgtgatgcgatgcggacatggggtcgtcgcgccatctcgcggcctgtgttgtgctttctttcatgtcgccgtcgccgtcgtgtgtccaaccgccattgtcgttaggttgttgttgattagccgtttgcttcgctcagtagccttgctctccagtgtattatcactcgcatgcatgtgatgtgagccactgcacgcgtgagtgtcacatgggtcgtcgtcctgtctcgtctcatgtgtttcaaactgtaggcagcagaggatcgagatgcgtgtctgctttgttcgtgttcactgctgtcagtctgtcaccgagttcaataatttagctttgtttcatcggg

SEQ ID NO: 3343 - DNA, 1572 bp, Zea mays
  Clone ID: 700261217_FLI
cctttctggtggatgttgatgcaggttctggaaaatggtctccttgttgatccccatgatcagcatgcaattgcagatgccctctataagatgctttctgaaaagcagttttggtcaagatgtcgagaaaatggattgaaaaatatacaccaattttcttggcctgaacattgcaagaattacttgtcaaggatatcaagtcttggtccaagacatcctgctttcgcatgcaaagaagaccacaaggtgcctgtgaagtgcaggaagcatatatctatcattgctgtagactctgttaacaaggaagatttaattcaaattatcagaaactctgttgaggctacacgcactggaactatgtcaggttctacaggttttgtgctgtcaacttcactgacaatagcagagctacagtctgtaatagtacgcacaggcatgctcccgactgactttgatgcctttatatgcaatagtgggagcgatatatattatccattacagtctagtgatgtgccaagcaattcccgtgttacatttgcgttggaccataactaccgatcacatatcgagtatcgttggggaggagaaggtttaaggaagtacttagttaagtgggcttcttcagtagtagaaagaagggggagaactgaaaagcaagtcatctttgaagattcggaacactcttcaacatattgtcttgcatttagagtggttaatccaaatcatttgcctcctttgaaggagctgcaaaagttgatgagaatccagtcactgcgttgtcatgctctgtataaccatggcgccaccaggctatctgtaattccaatgcatgcatcgcgatctcaggctctaaggtatttgtctattcgctggggcatagagttgccaaatgctgtggtcattgttggtgaaactggtgattctgattacgaggaactgtttggaggtctccacaagacagtcatccttaagggtggattcaacactcctgcgaataggatccatacggtcagaaggtaccctttacaggatgttgttgctcttgatagctcaaatatcattggaattgagggattcagcactggtgacatcaggtctgctatgcaacaacagcttggtatacccacacaatgacaccaactgcaatctattttgttattaatagaaagaaagaaacagacaacagaaatatacgatacaaatacttagtttccattctattggaaatgtccgattttgcctgccagtcatttaatgtatgtgtgtggtggtccctgcacgggttatgaatgacattcccttggatcccgcactggagattttttggattgaagagcttgttaatggatacatccaactgtacagacggaacaaatttgttcaaatgttgatagtgaaaacattttgtggaagtattttcagcaaacaagcttccaatatacaaagttcacactttccatcgcttcaatgtggagcatctgattacagtgcaatcgtctaagggcttgtttgtatttacctcaatccatatgtgttgagatagattgagatgtaactaaaactaatttacac

SEQ ID NO: 3344 - DNA, 972 bp, Zea mays
  Clone ID: 700261537_FLI
gagtctggggccgctgctgtacacgtcgtgcagcagcacacgccagcacaggtgtctcggactccgtcgagggcagcgcctacgacgctgtctgcggccagagagttgctacgccaccccctagctgtaggatctaggacaccggctagagggggggtgaatagacggttttgactaaaaacaataatactaagtaaatttaatcaatacaacaagagaaataaatttactagtgtcaataagtaaacaatgtatgaaagacaactacggagattgaatacttgaagaacaataagcaaaacactaatcaattgcaaggcaataagtaatgctagaaggaatagacaccgaaatttatcccgtggtatcggtgatttgccgatcacccctaatccacgttgaggtggacttcaagctctcacttgctcctctatcaagacacgacttgatctttgagccaagtggacaagaaatcactcaatacctcgattccactaatgtcacctttgccgctccggcgaggtaggcgcgaacccctcacaatcaacaccgcggcttcaccacaatcttcttggagagctcgacggagacaatcacccgagccgtctaggaggcggcaacctccaagagtaacaagccaacgacgcttgctcggtgtaccacctagtgcctcaagaatcaccaaatgatgcaaatgcactaggaaccctcaatctctcactagaatgcaatctcaagcaaagagtgtgagagagtgagttggaggatcacaaatgagctcaatgtatgcaaggaatggccaagagaggtctcacacacgagctacccttctatttatagtcacccatctaaaaccaaccgttatgagcaaaagagggcagttctgcgcacacgcggaccgtccgcgccctagggccggacggtccgccgtacaccataacggctataatgaccgttgaaacatgtcagagc

SEQ ID NO: 3345 - DNA, 1496 bp, Zea mays
  Clone ID: 700261552_FLI
agcagcttcaacgctgccaatcatttaatgagcagaagcctccgatgcatccacagcaacaacagcaggaaccacagaagcagcaatgcgtccaaacaccacaggatcaacaaatgcaagaacagaagcatctgcacaacttccactccttgccagatgcattatcggccttttctcagctttccccagccactcactccccaccttccgcattgcagacagttccagcattctcgcatcaacaaaacttcccagatacaaacattagctctctctcaccatctactggcccttcaatgcatggcatgttggggagattaccttccgaagcagcttcgagcctcccatgtgtggcaatgaacgcccctgtatcggtatctgacccatggtcatccaagagagttgcagtggagtctgttaacccttgtcgacctcatgtttcaccacatatagaacatttggatatggcgacgtgtaacatgccgcagagctctgcactagcaccattacctggacgagaatgcctagtggatgaagatgggtgctctgatcctcaaaatcacctcttgtttggtgttcacatagactcacattcacttctgatgcaagggggcattccagcccttcagaatgataacagttcaggcactattccatactcaacctccaatttcctgagcccttctgataacgatttccccttgaatcaaccgctacgcagcgctggctgcttagatgagtcggattatcttccatgtgcagagaatgccgaacaggcaaatcaacagtttgcaacctttgtgaaggtttacaaatccgggaccgtcggaaggttgctcgacatcactagattcagcagctacgacgagctccgtagcgaggtggggcgtctgtttggcctcgagggccagctggaagaccctttgagatcaggctggcagcttgtatttgttgacagggaggacgatgtccttctggttggcgatgacccatggcaggaattcgtgaacagtgtgtcctgtataaagatactttcaccggaggaggtccagcggatgggcaagccgggcatccagctcctgagctcggctccttcaagaaggctgggcaatggctgcgacagctacgcgagcatgcaggagccgagaggcctggacgctgggatggcgccggtgggttcggtcgagttctgaagacggcggaggggagcccatggccctcggctcgaggattactctccctcctgtatgtttctgcagcacttgctagctctgcgacttggaacaaagcacgtagatcaaatggagctctgtgctgctccccgtctgatgatgtcttatggtatagactcgtagcagtaactactacatgttgtatacatgccgggcacttcagttcttatcgagtagcaataccgctagtttagtccatccaatcaactacgttcttgttcctatgatcctgttgttgcgatgcagtaaaactttttttttcat

SEQ ID NO: 3346 - DNA, 1138 bp, Zea mays
  Clone ID: 700261644_FLI
ctgcccagccgctgtgcgttcgcgctctctcccacactgtctgcgacgactgcgtgggtgggtgggtgggctaccgccgccgcccgtcgccaggtgccgatctcttaacacccttgaccctcctctcgcgtctgccgtgcgagaacgtaccgccacgacgaacgatggggaggccgagcagggggcggcagcgcatcgagatccgccgcatcgaggaaggcggccggctgcatgtgaccttctcgaagcgcaagtccggcctgcaaaagaaggccgccgagctctccctcctctgcggctcgccggtcgccgtcgtcgtcttctcccccggcaggaaggtgttcgcgctgggcgctccctcggtcgaccacgtcctccgccgccacgctcctccgatccccggcgaaggagaggaggacgggctccttccgacgctccaggacggagacgtcgtgatgagcagcagcgccatcgccgaccgcgcggagttggagaacatcgtgcggcgtacggaggagacgaaggcgcgttcggtggcggagaaggcgcggatggacgccgtcgggaaggccgtgaggcaggccgcggcaaaggccggaaggaggttctggtgggaggcggactccggcgagctcggggacgctgagctgccaggattcgccaaggcgctccgtcggctcagggtcaacctgcagcgccatttggactcgctgtcggcgtctgctaataagcaactgcagtaggagcggctgtgcaaaactggctcatttcatttggtgttgcttaggcacttagggtatattactaatgtttacaacgttaatatcatgctaaaagctaggtcttcacgcgtagaggcacgcccacggtgcatctcttaacactaaaagcgctactccttctcactccgcaagaagttttgttagcactttaagagcctgtttggttcgtgattaactgtgtcacactttgtctaaggttagtcgtctaaattgaagaactaaccttagtcataaaagttaggcaaagtgtggtaacttagtcatcaaaccaaacatgccctaaagctcgtgttgtgtaaggaaatcggcctgtaatcttcaactgaagagggtgagttggttttgggatcaggatc

SEQ ID NO: 3347 - DNA, 1417 bp, Zea mays
  Clone ID: 700261834_FLI
ggccagcgcccctctttctctttgtgatgtgggcggcatgcactgcacgatagcgacgtggcgcgcccatccaattccgtgagcccatccagttcgtgttcgcgtaagaataacggcagccagccacagcccacaggcccccaaggactctcgtcgctcgcctttcccccaactttctccccccgctcggccatacggccactcgcctcgcctcgctgaaaccaatcgcctcttctctccctctccctctccctccaatgcttcccaccgatcgctcctgaagcggctcaactgctccagattttctcgaggctgaaattttggtgtccttgctcagccatgggtagtaggagatatgacattgatacgaggagatgtgggatccactcaagaccaaccaaatcaatgtatctggatgctcaacaaatcgtcagctgccaaactagagtgggagaccacgatgttggttcctgtgctgtgaagcatcacttcccgtctccaatcgtatcttggatagaagatctttccagctttggcaatgcttcttttaatcctgtctctgaatatgtggatgagcaagccagagcttcagtgggacagtcttcagcatcaagtaatttgcatgacatgcaaatatcagtgagattgacagccgaattcatggagcttgcaaaggagaatacaagcaataatctagagacttgtggaattcttggtgcttcatttagggatggaacttattttgtcacgatgttgattataccaaagcaagaaggaactgctcactcatgtcaggctgttagtgaggaggagatacatgccgtgttatcagagcagtcactttatcctgcagggtggattcatactcatccttcacaaacatgctttctatcatcgatcgacttgcatactcaatactcttaccaggttatgttaccagaggctgttgcaattgtggtcgcacccacagatccaaccaggagttacggaatattcaggctgactgaacctggagggatggatgttcttagggagtgtgacgaaagtgggttccacactcaccgagagacaaccaacggcagcccaatctatgaaacctgctcgaaagtgcacttcaatcccaacttgcggtttgagattgtcgacctgcgctcggctcaatgatcaatgggactaaagctatggcagcacgtgctcccttgtgctccctcttggcagaagtatataccatagagcttgctgacgatgcgtgataggtatagtgacagcgccaagccggaaccaagatgctcatgttacttatctgacatctgcgctggtatttgtcaaagaaaaggagtaactgaaaactagcactggttatcttgtctgttcggccagcctttgagttggtattttaagtaatactgtatataac

SEQ ID NO: 3348 - DNA, 1056 bp, Zea mays
  Clone ID: 700261906_FLI
atccaatctagaagctcccctctccctccctccctctctctctctctcttcgccgtccgaagctccgcacccaatctaatcgacacctcaccgagatgggccgcaagttcttcgtcggtggcaactggaaatgcaatggaaccacagatcaggtcgagaagattgtcaaaaccctgaatgaaggacaggttcccccttcagatgttgtcgaggtcgttgtcagccctccttatgtcttccttcctgtggtcaagagccagctgcgccaagagttccatgttgctgctcagaactgctgggtgaagaagggaggtgctttcactggtgaagtcagtgctgagatgctcgtcaaccttggtgttccctgggtcattcttggacactctgaaaggagagctctgctgggagaatcaaatgaatttgttggagacaaggttgcgtatgccctgtctcagggactaaaggtcattgcatgtgttggtgagacccttgagcagagggaggctgggtctaccatggatgttgttgctgcacaaacaaaagcaattgctgagaagatcaaggactggagcaacgtagttgttgcctatgaaccagtttgggctattggaactggtaaagttgccaccccagctcaggctcaggaagtgcacgcctccctgagggattggctaaagaccaatgccagccctgaggttgctgaatctactaggatcatctacggaggctctgtaactgctgcgaactgcaaagagctagcagcacagcctgatgtcgatggttttcttgtcggtggagcttctttgaagcctgagttcatcgacatcatcaacgcggccaccgtgaagtccgcttaagatgctacgctgaagacgaacatactttttttttgctcaactgtgctatgtaagctagtagcttttgcgcaggagcagagactgttttgcctgcccccaacttctagcttgagcttgctaataatgtttacctctggacgtatcaataatggtgcttatgtatccccttttttttgtgccgaattacggtggatccgtc

SEQ ID NO: 3349 - DNA, 959 bp, Zea mays
  Clone ID: 700261908_FLI
gcagcccaccagctccggtttcttccgactgcgagcttccaagtggcgactgcccgagtgcgagaagagggagagaagcggttgtcggaatccactccggccaggggtgcggaggtcggaatggggggaggattggatgaggcggtgaaggtggtggatttggaggacggtgaaggggaggaggaggcagaggccgccgcggcggagggatcgagcatggagatggggatgctgccaaggatgccggtgcgtgtgctgctcgccgaaggcgacgactccacgcgccacgtcatctccgcgctgctccgcaagtgcggctaccgagttgctgcagcctcagatggtgtgaaggcgtgggacctattaaaggaaaaatctttcaaggtagaccttgttttaactgaagttgaactgcctttgatgtctgggttcctcctgttatccacgatcatggaacatgatgcgtccaagaacatccccgttataatgatgtcttcgcatgactcagtaagcatggttttcaaatgcatgctaaagggtgcagcagatttccttgttaagccgataagaaagaatgaattaaggaacttgtggcagcacgtttggagaaaacaactggcaaacggtgggcctaatgttcagcacatacaacgagaagagaatcttgcagaaagaatccaacagaagactggtgtgacaaaagctgataatttggacagagatgtgccctgtaaaaatagagaatgcagtgaacaagaaagtgatgctcaaagttcttgcacaaggtcagagctggaggctgaaagtaagcaaacagacaacattttggagtataagcaatcaactcaaaggcacttgtctattcctagccacaagaatgttgagctaaatggacagaccaaaatacaaagagctaagggtaataacttgatcccagcaagcgaagacgatttatcgcc

SEQ ID NO: 3350 - DNA, 1164 bp, Zea mays
  Clone ID: 700262001_FLI
gcgaagcaagcagcctaaaaaaaccgtatcgtctcgcctgttcagtttccttctcctcttcccgcagcccggtttgccgaccaggttccaccgttccagagtagccaagcgaatcccgtgtctggttcgcgcgatggcggaggagcagtccaacccccagcaccagcaagcggaggagagggaggttatggtggagcagcagcagccgaggagggccccgaagctgaggtacctggacttcgtccaggtggcggctgcccaggccgcggtgtgcctcgctgggctctacggcctcgccaaggaccacgccggcccgctccgccccagcgttgacgccgtcgagtctgccgtcaagggcgtcgttagccccgtctacgaccgcttcggcggcctgccgctcgacgtcctcgccttcgtcgaccgcaaggtggacgacacggtgcacgaggtggacaagcacctcccgggcgcgctgaaggcggcgtcggcgcatgtctacgcggtggttcggggcgtgccggaggtggcgcgcgagctggcggccgaggcgcagcggtcgggcgtgaggggcgcagcccgtgcggcgctcgcgatgacggagccggtggcgcgggacgtgtacggccgcgtggagcccgtggccaaggacctctacgtgcggtacgagcccgcggcggagcacctggccgtctccgcctggcgctcgctgaacggcctgccggtgttcccgcacgtcgcggagatcgtcgtgcccaccgccgcgcactgggccgacaagtacaacagggcggtcgcagccgccgcggagcacggctacgcgggggccaagtacctccccgccatccccaccgaacgcatcgccaaggtgttttcgtcggcgccagaggccgagccgctggcagagggccagtagtgtgtgtgtgtgtgcgcgcgcgcgcgagctcgtctttgccggtggtgactctggatttggatcaccttccgaactgaactgaaaataaggaagcgtgaatccgggggccagttaaagatggtggtatggtatggtagcggcgttgtactagatgcgtgatgggacgatggttacggaccatgatgatgacgctgtgttccatttagctctctgctgcgtgcttttgtataaaagaagtggttcgatgtcgc

SEQ ID NO: 3351 - DNA, 1686 bp, Zea mays
  Clone ID: 700262031_FLI
ctggggtcttggcaagctgattgctttctacgatgacaaccacatttccatcgacggagacacggagattgcattcacagaggacgtgagcacccgcttcgaggctcttgggtggcacacgatctgggttaagaatgggaacaccggatatgatgacatccgcgcagccattaaggaggcgaaggcagttactgacaagcccaccttgatcaaggtgactaccacgatcggttttggatctcccaacaaggccaactcatacagtgttcatggaagtgcactgggtgccaaagaggttgaagcaaccaggcagaaccttggatggccctatgacacattctttgtaccagaggacgtcaagagtcactggagccgccacacacccgaaggtgctgcacttgaggctgattggaacgctatgtttgcagagtacgagaagaagtatgcagatgatgcagcaaccttgaaaagtatcatcacgggggagttacccactggctgggttgatgctcttcctaaatacactccagagagcccaggagatgccaccaggaacctctcccagcagtgcctgaacgcgcttgctaatgttgtgcctggtcttattggaggcagtgctgatcttgcatcctccaacatgactctgctgaagatgtttggtgacttccagaaggatacagctgaagagcgcaatgtccgctttggagtcagagagcacggaatgggcgccatttgcaacggcattgctctgcacagcccagggtttgttccgtactgtgctacattctttgtcttcactgattacatgagaggtgccatgaggatctcggccctgtctgaagccggagtcatctatgtcatgacccacgactctattggtctcggagaggatggcccgacccatcagcccatcgagcacctggtgagcttccgtgcgatgccgaacatactgatgctccgccctgctgatggcaacgagactgccggagcatacaaagtcgcggtcctcaacaggaagaggccgtccatcctcgctctctccaggcaaaagctccctcacctgcctggcacctcgatcgagggcgtggagaagggcgggtacaccatctctgacaactcgaccggcaacaagcctgacctcattgtgatgggcaccggctccgagctggagatcgcggccaaggccgccgacgagctgaggaaggagggcaagacggtccgcgtcgtctcgttcgtctcctgggaactctttgatgagcagtcggatgagtacaaggagagcgtcctccctgctgccgtcacagcgaggatcagcatcgaggccgggtccactcttggctggcagaagtacgtcggagcccagggcaaggccattggcatcgacaagttcggcgcgagtgctcctgccgggacgatctacaaggagtacggcatcaccgtggagagcatcattgcagctgccaagagcttttaagagctaacaacggtctggagttttttttattgtcgtcgttgatgccaaaggaacactgtacctagaggacagtcctatgcctcggagcttggaataatgatgatggagggagcggaaggatgcctgccatttgttggagcgtgcgtggtagtatttctaggcctgtaataaacaatgcctttttccatttacgttgttggttttatccggtg

SEQ ID NO: 3352 - DNA, 374 bp, Zea mays
  Clone ID: 700262053_FLI
cggggttactctctctctctctctctttcggatggcgcgccgtacctcaggaagatcgacctcaagacttacaagaactacaaggacctgtcgaccgcgcttgagaagatgttcagtggcttcagtactggtgagatgtctcggggttactctctctctctctctctttcggatggcgcgtcagtgagtaattatgtttcgttttgatgtggatggtgttagaagtacatcaagaagcctttaaaaagcagcatactcctacttgattcctaggataagcaatagcttgaacttaccccgttatattttgagtaattgtaagattacaaacaatctggcaccccttgttttgttaatttttgggtgaacttttt

SEQ ID NO: 3353 - DNA, 1470 bp, Zea mays
  Clone ID: 700262123_FLI
ggccatcggggtcggaggatctcactgttttcttcctgctgcctgctgcatttttcgcagggtgtgggagctgagttgggaggaggactgctgcagccatgaaggccctcattctcgtcggaggcttcggcacccgcctgcgcccgctcacgctcagcgtgcccaagccgctcgtggatttcggcaacaagcccatgatcctgcaccagatcgaggctctgaaggaagttggtgttacagaggttgtcctggccatcaattaccagcctgaggtcatgctcaactttctcaaggacttcgagagcaagcttggcatcaagatcacctgctcgcaggagacggagcccctcgggaccgcaggcccgctggcgctggcccgcgacaagctcgccgacggatccggcgaccctttcttcgtgctcaacagcgacgtgatcagcgagtacccgttcgccgagctcattgagttccacagggcccacggcggcgaggccacgatcatggtgaccaaggtcgacgagccgtccaagtacggcgtggtggtcatggaggagggcaccggcaaggtggagcggttcgtggagaagcccaaggcgttcgtgggcaacaagatcaacgccggcatctacctgctcaacccgtccgtgctcggccgcatcgagctgaagccgacgtccatcgagaaggaggtgttcccgcgcgtcgcggcggacggggccctcttcgccatggttctcccgggtttctggatggacatcgggcagccgagggactacatcacgggcctgcgcctgtacctggactcgctgcggaagaaggcgcccgccaggctcgcgtcgggcgcgcacgtcctgggcaacgtgctggtgcacgagaccgcggtcatcggggacggctgcctcatcgggcccgacgtcgcggtcgggccaggctgcgtggtggaggccggggtgcgcctgtcccgctgcaccgtcatgcgcgccgcgcgcgtcaagcagcacgcctgcgtctccagcagcatcatcggctggcactccaccgtcggcaagtgggcgcgcgtcgagaacatgaccatcctcggcgaggacgtccacgtctgcgacgagatctacagcaacggcggcgtcgtgctcccgcacaaggagatcaaatccagcatcctcaagcccgagatcgtcatgtgatccgggagtaaatctggggcgccaaatccaaatcacaaggggcccttgcattgcattgcattgcatcgcatcgcatcccatcccatcccgatatgcttcatacttttgttgtttgattttttgctcggttgtttgtctgcaagtgtaaccagttgtcgagtgtttaatttgtcggctatatagactattttcaagtttcgctccgtgcttgtagataggtatcagtcgtctatcagatgagtggaaataacaacttctcttcgtatactacaagttgagcaactcc

SEQ ID NO: 3354 - DNA, 1461 bp, Zea mays
  Clone ID: 700262127_FLI
tgcgttgcgttcacggttctcctctctgtctctcgcgcacgggatctcgttctccgcggcagctggtgtttcgctcccttctcgccctccgacggctggtgggctgccggcgccggcgccgccaaacgccaggtgctgaggccttcgccagtgtcttcgacggcgacgagcacgtaccagcaccaagcatcatgtcggaaagaggtcgcctggcaggacgattgattgataaccgcagcagagggtaccatgtagtccctctagttgaggatcccagaggccatcctgaagtcctcgtggatggggatcggaggggctactctgacattcgtggggttcagcagcgtcggggctaccctgacacccatctgcttgaggaacctaggggctaccctggtgttcgtgtggtcgaccataggggctatcctggcagtcgtggggttgatgaacgcagggcctatcctgagctccatcaaggctcacgcatgagggcggctcctcccccttacccagctgccttcgaggatgagcttgagttacaggaagttgaactccggaggctttcggcacataaccgtgctctagttgaggagcgtgaactgttaagcagggaaatacaagctggaaaagatgaggtccgccacttgaatgtgatcattgctgacattaacactgagaaagaagcttatatcagtaagcttatggacaagaggaggaagcttgaagctgaacttggagcaagtgagcacttgtgtgatgaggtcaggcatcttcgtggtgaaattgacaagctcgttaccgctcggaaagaactatctgcagaggctgcatctctcgtggaagagctgaacagggagcaatctgttaaacagcagctacctgtgctgaaaacagaaattgatggtctgcaacaggaacttgttcacgtgaggactgcttgcgggttagagcagaaggggaatttggaattgctggaacaaaggaaggcaatggagaagaatatgctttctatggcacaagagatcgagcagatgcgaggcgaattagctaattttgaagttagaccaaggggcccaggtggagcatatgggatgcagattgggagttcggaagtgaccttcactaagaacccatatgaagatggttataatgcttatgtgggggttcctgagaaagatcctttgcatcctcctgaatatgcttcgtgggggacatatgacaggagtcgccttcagtaccgctaagaccagaacttagtcattggagaaagaattgccttctaggttttaatggccatgtcttgtcgtttacagtaccgaagctttatgcctgctgcttggttttccattaagagttgtccttttcaatgcttctaatcataactttttccattacaaactggctagattattaaactattggtaccaagatgtccagcaatgtgcggaaagcaccttacat

SEQ ID NO: 3355 - DNA, 1017 bp, Zea mays
  Clone ID: 700262142_FLI
agaaaaacatgcttcaaatagctatgccaaaatggttatatatattgaagcatgtgaaagtggcagtatatttgagggattaatgccagaagaccttaatatttatgtcacgactgcatccaatgcagaagaaagtagctggggtacatactgtccaggaatggaaccaccgcctccttctgagtacattacctgcctaggtgatctatatagtgtctcttggatggaagacagtgagactaacaatctgaaggaggaaacaataaaggaacaatatgaagtggtgaagaagcgtacttcagacttcaatagctatggtgcaggctctcacgtcatggaatatggtgacaagaccttcaagggcgagaagctttacctttatcaaggttttgatcctgcaaatgccaatgtcacaaataagctgctttggtcaggccaagaggctgtggtcaaccaaagggatgcagatattctcttcctatggaagaggtatgagctcttacatgagaagtctgaagagaagcaggaagttctgagggagatcaccggaacagtaaggcataggaagcatctggacaacagcatcaacttcatcggaaagcttctcttcggggctgagaaagggccttccacacttgaggccgtcaggcctcccggccagccactcgtcgatgattgggactgcttgaagcaaatggtacggatcttcgaatcccattgcggatcgctcactcagtacggtatgaggcatatgagggcgttcgcaaatatatgcaacagtggcacgcctggcgcttcgatgaagcgagcgagcatgggtgcttgtggcggctacaactcggcgagatggagcccgttggctcagggctacagcgcttgatcttctgaaaggttccggggatatgagtgtgtatactgtaaaagttggcctttgtgcctctgtaatgtacgtagcagttgtcttgtatatatctcggtggtgtgtttctgacttggtatgtttcgccaggtcataat

SEQ ID NO: 3356 - DNA, 1135 bp, Zea mays
  Clone ID: 700262211_FLI
cttttttttcttcaatctttggcgatggtggtccccttggcgccggtgatctgcatgtgcctgtgatctactgctggctgcatcacctcaatagtctacctgggggcgtatgacagcgaggaggcagctgctcgtgcctatgacctcgcagctctcaagtactggggtcctgagactctgctcaacttccctgcatcaccacaacgggaggtgggaggcacggattgggcgagtctttgggaacaagtacctctacttgggaacatttgacactcaagaagaggcagccaaggcctatgaccttgcggccattgaataccgtggcgtcaatgctgtaaccaacttcgacatcagctgctacctggaccacccgctgttcctggcacagctccaacaggagccacaggtggtgccggcactcaaccaagaacctcaacctgatcagagcgaaaccggaactacagagcaagagccggagtcaagcgaagccaagacaccggatggcagtgcagaacccgatgagaacgcggtgcctgacgacaccgcggagcccctcaccacagtcgacgacagcatcgaagagggcttatggagcccttgcatggattacgagctagacaccatgtcgagaccaaactttggcagctcaatcaatctgagcgagtggttcgctgacgcagacttcgactgcaacatcggatgcctgttcgatgggtgttctgcggctgacgaaggaagcaaggatggtgtaggtctggcagatttcagtctgtttgaggcaggtgatgtccagctgaaggatgttctttcggatatggaagaggggatacaacctccagcgatgatcagtgtgtgcaactaattctggaacccgaggaggttttcgctttccaggtgtcctgtcttgggtaatccttgatctgtctaatgccacagtgccactgcaccagagcagctgagaactttcttgtagaaagcccatggcagtttggcgttagacaagtgtgtcgatgttctttaattctttgaatttgcccctaggctgcttggctaacgttaagggtttgtcattgtctcacttagcctagattcaactaatcacatcctgaatctgaagtggttgtgcttgtgcagt

SEQ ID NO: 3357 - DNA, 752 bp, Zea mays
  Clone ID: 700262287_FLI
cagaatcaaaaatatctgcctgcctacctaccgatggccgccgcgttgtagttgtagtgtaacctagccacacgacgcatccgcggttcatcggcctcgcaggaaacgagcgtcgagcaaaaggtcgaattctcaactctcaagcaccagcaggaatcgagcgagcgagcgagcagtgtccgccccccatggccatggtcgcgtccacctccttcgcgtaccacaagccgcgtttcgcggtggtgtgcaggaagaacagggacggccgggacagggagcgggacggcaaggagcacaagcaccccttcaaggtcgtcgagatcacgccgcctccgcggtgcctcggcgtccgctgcttccccaccaacatccactgcggcgagagcgtgacgatcgaggggcaggcgtacacggtgtcggcggtgacgcaccggtaccagctgcgcaaggggcggtacgagccgagcgagaagcgcctcgacgtcctctccaccggcagatacatcctcaacctctacctccagaacctgctcgaccagtcctagctaccatatctgtatctgtactgtacatcagcatcgcttcactctgtatagatatacatacatatatatgttagctagtagcatcgaacacttgtcccggtgggtggcggacggagatagtgtttccctgcgtgctgctctgtgtaaactgaaaaatgcgagatgaggcataaagttcagtgaaaggttgcatacattttcttgaag

SEQ ID NO: 3358 - DNA, 2020 bp, Zea mays
  Clone ID: 700262322_FLI
cagcgagccacagtgaactcgtcgcgtgccccgccttatttaacgccctctccccgcagcagcagcggcacctccggacgaaatctgacccgggccaccgtcggcactgctctgacatggcgatccgctccaaggcctggatctcgctgctgctagcgctcgccgcggtgctctccgcccgggcggaggagcccgccgcggcggaggctgaggccgtgctcaccctcgacgtcgacagcttcgacgaggccgtcgccaagcaccccttcatggtcgtcgagttctacgccccatggtgtggacattgtaagaaccttgctccagagtacgagaatgcggccaaggaacttagcaagcatgacccaccgattgttctcgctaaggttgatgctaacgaggagaagaacaggccgcttgctaccaagtacgagatacaagggttcccaaccctcaagatcttcaggaaccaggggaagaacattcaggaatacaagggccctagggaggctgatggcattgtggattacttgaagaagcaggttggccctgcgtccaaggagatcaagtcagcagaaggtgtggccgcccattttgatgacaagaagatctatatcgttggaatcttcaaagaattcagtggcactgaatttacaaacttcatggagcttgctgagaagctgaggtctgattatgactttggacacactttgcacgcaagccacctcccacgtggtgatgcatctgtggaggggccattgatcaggctgctgaagccttttgatgaccttgttgttgacagcaaggattttgatgttgctgctctggagaagtttattgatgctagcagcacccctagagttgtcacttttgacaataatcctgacaaccacccatacctcatgaagttcttccaaagctcagctcccaaggctatgctgtttttgaacttctccacgggaccattggattctttcaagtctgtttactatgctgccgctgaggagttcaaggacaaggaaatcaagttccttattggtgacattgaagccagccagggtgccttccagtactttggtctgaaagaggaccagacaccccttatcctcattcaggatggtgattccaagaagttcttgaaggatcacattgaggctgaccagattgtctcttggttgaaggagtactttgatggcaaattgacgccgttcaagaagtctgagcctattcctgaggtcaacaatgagcctgttaaggttgttgtggctgacaacatccacgatgtggtcttcaagtctggaaaaaatgttcttattgaattctatgccccctggtgtgggcactgcaagaagctggcgcccatcttggaagaggcagccaccactcttctaagtgacgaggaagttgtgattgctaagatggacgcgaccgccaatgacgtgcccagtgagttcgaggtccaaggctacccaaccatgtacttcgtgactcccagcgggaaggtcacctcctacgacagtggcaggacggcggatgacatcgtcgacttcatcaacaagagcaaggagaccgccagcgccgtccaggcgacggcgacggcatctgggaaggcagctgacgcagccgagaagaccgagcccgtcaaggacgagctgtaaacagccttggcgtggacgctatgggtaatgggacagaggaggggggacaaaagctggcgccaacgtactcgccaagcctccggctttagtttttgcgagggaagagggcaaagtaagagaatgggagggaggggtctgtggcgtgttttgctctggtgcggcatgcctgtgtatcccattgagattctgtacaattgcaaacagagagcggtacctttttagttaattatcagagatgactgtagaaagaaactgattgtggtgaggttgagtggacgaataaatggcgagtctgcctcattggatgcatcatgaaacgggcacttttgaggagggatggtaatggggaaatttccgtggagaat

SEQ ID NO: 3359 - DNA, 1428 bp, Zea mays
  Clone ID: 700262392_FLI
gccaacgccggttgagctattcggcgcgctcgatggcagcctcgagaaggaaggcgtcggagcaaaggagctcgccatcaagcagcgcagcctcaagcgccgctacgaccgggacgttatgaagaatgctccgcccgccgataaacacgaacgccgcctctacctcctctccaagcacgtatggggacgcgttccgccaaccagaccaccggttgccaaggtccgaagtgctactcaagcgaagtgcgccggcgcccaagcaagcaacgccgctgcccaagcccaagcgaagagcgccgaccgccagtccggcaaggaggcgctgaagcccaaggccaagactttggatgagatgcgcgagctgtatccttacctggttgatgaggccacgatccttgtcgaaccggcggtgctggagagagtgctcctcaacattgaagacatcgacgcccaggtgttggacaagaagatcaggaaggcgaggaagcagctcgccggtgccatcacggaatcggcaaggattaacaacatggaaatgcctacaatatttctgtttacatccagcaagcttcaaccagaaaagttaagagtggaaaatgacaataatcttttggttgatcatttggagaaaatggatgatgtggatatttgtgctaaacaacgattggcaagagtggaacatgaagtaatggagttgagacagactgtaatagcttaccaggctcaggcaaagggtataatatgtgaatcagccaagagtggtcttcaatcaattgtagctgaaaatcagactccagccaatgtactacaaaagaagacagaagtaccaaatggcttgatccataaaaagaatgcggcggttacatcaaaatattattgtgccgttccccacaatgttcctcccaataagccggcatagccattttggcgctgaagaccaaagcaacaattacttttttaccaaagtaattgttcccactagatttgtaaggggccatatgttgattaggttataaaggcgacgaccaggtttcctttgtaacatagctctactatgtgtttcataaaaaaaaatatgtggcagcgagatcgtgctttgttgattctgcccagcatcgtctacatttcttgctgggtatgtcttgccgcatctcattttggtccaagctgcaccatgatccagcacagcagtatgtatggctcgaactgttctgggtctcataagactaccgcaccctgtaaatatagtagtgggtctatattttggtgaaatgtctgcaaaaaaggttatctagatgttgcagatgtcctgtcaaactgatgacattattagcaacgagtgtcctctgatgcactagtaccactgtaagattgttgaactctggttgtaatccttgttaagcaatgaagctcacatcttatatgctg

SEQ ID NO: 3360 - DNA, 353 bp, Zea mays
  Clone ID: 700262483_FLI
cttggagttaggatatgctcggatggcaaatgaatggccttgcctttacactcttgtccttgatgcattactggaccgctggtagcatacatgacagacgtccgtcttattgtgcgcagataagacatgggtcagattttgggttagttcaggttgatcagtcaactgtagccatcaaagaaaattttggcaaattcagcgaggtcctggagcctggttgccacttcctgccctggtgcatagggcagcagattgctggttacctctccttgcgtgtgcgccagctggatatccgctgcgaaacaaagacaaaggttttctccgtcgcattccattttgatgtctgatttgtg

SEQ ID NO: 3361 - DNA, 830 bp, Zea mays
  Clone ID: 700262525_FLI
gtgtaggcgctcatcgatcggtccgggttcatctggctctgggtggttttttgatttggttagggttttgtttgtactgatatatggagaggaactgagaccaactgcggtctgcggcactgcgctcgccgccagcctccctagggtttccttccccgtcgaccatcagcgcctccccagatttggacctaagccctcgcggacgtgcgcgccggccgcctggttgccggtcgaatccgccctccagccgctgccaacgtcgatctgctactgacgcaccgcaagggagcatttagctgtagtgagatggatatcctttatcagtgtaaggaggttttgaagatccagaagtttcggcgtatggtgtcatatgctggattctactgcttcacttccctcattacttatgcttacacaagcaatacgacaagggctgggatttcaagggctgaccagtattattcctcctaccctgctggtactgaactactaactgacactgcaaagctttacaaggctgcattgggcaattgttttgaagtagatgaatggggcccaatagagttctccatcatggcaaaacattttgaccggcaagggaaaccaccatatgcctaccatgctcaatatctggcacaccttctctcccatgggcagctcgatggaagcggttaaatgcaggatgtattgttgataactgcatcaacgcaactagaatttcactatatcttgtataaaaatgttgcctttgctagaacaatgagttcagactgcaccagtttagaagttacagaactggcatcagaaacaagttctgaatttttttggtc

SEQ ID NO: 3362 - DNA, 1102 bp, Zea mays
  Clone ID: 700262568_FLI
agcagttcccggctcagcagcaggagtcccagccggggaaggagcacgcgatggacccccggcccgaggccatcgtccaggactacaaggccgccaacaagctcaaggacaaggtggcgctcgtgaccggcggcgactccggcatcgggcgcgccgtgtgcctgtgcttcgcgaaggagggcgcgacggtggccttcaccttcgtgagggggcaggaggagaaggacgcggaggagacgctgcgtgcgctgcgcgacatcgggtccgagacgggcgcgcgcgagccgatggccctgcccgccgacctcgggtacgaggccaactgccgggaggtggtggagcgggtggcgtcggcgtacggcgggcgcatcgacgtggtggtgaacaacgcggcggagcagtacgagcgggagagcatcggggacgtgacggaggcggacctggagcgcgtgttccgcaccaacatcttctcctacttcctggtgtccaagcacgcggtgccgcgcatggagcccggcgcctgcatcatcaacacctcctccgtcaacgcgtacaagggcaacaagacgctgctggactacacggccaccaagggcgccatcgtggccttcacgcgcgcgctctcgctgcagctggccgacaggggcatccgcgtcaacggcgtcgcgccgggccccgtctggacgccgctcatcccggcgtccttcggcaaggagaaggtggagcagttcgggtcccaggtgcccatgaagcgcgccgcgcagccggccgagatcgcgcccagcttcgtcttcctcgccagcaaccaggattcgtcctacatgtctggccagatcctccacgtcaacggaggcgtcatcgtcaatagctagatacggaagctgttttgctgtcgtgtgatcgtgtccaagtccaagggaacaaagcgagtgtccgtgtgtaccagtcagtaccaggtagcagtgtcagtacgcgcacgcaggaaggcaaggcagggttcagttgtagcggtgtgtaatgctgtcagcacagcacttgtaaagaaggaacgtgtctgaataaatatgcgtccaagcatgaagacttcgtacgtggtttgcac

SEQ ID NO: 3363 - DNA, 1088 bp, Zea mays
  Clone ID: 700262622_FLI
cgaagcccctccagggtaaaaagagggctacaccacgggcctgctagaatcgtggcgtctccctggggataaagtacttctccagctcctctgcgtcttccgccgctcttgctgtcctctgtgctatccgctagggtttatctgctcgaggaatggcgtcggtgcaggtctccggcgcgggggtcggtgccgcggccttctctgtgaaggggaaggcctccaccggtgcgctccggcttcgctctacgttgaccttcggcgaggtctgcccggcgcggcgggcgttccgcggcctcgtcgtcagggccgctaccgtcgtcgcccccaagtatacaacacttaagcccttggctgatagagtgcttgtaaagattaactcttccgaggagaagacaactggtggaatcttgctccctacgactgctcagtccagacctcaaggtggcgaggtagttgctgttggagaaggaaggataattggggataagaaagttgatgtcagcattcaggttggagctcaggttgtgtattctaagtacgctggaaccgaggtcgcgttgaacgatcacagccatctggttctcaaagaggatgacgttataggtatcttagaaactgatgacgtgaaagacatgaagcctctgaacgaccgtgttctaatcaaggttgctgaagctgaagacaaaactccaggaggcctactgcttacggaaactgccaaggagaagccatctatcggaacggtcgtagcggttggcccaggccccctggacgaggatggcgagaggctcgcgctgtccgtctccgcggggagcactgtcctgtactccaagtacgccggcagcgagttcaagggcgccgacggcacgaactacatcgtgctgagggcgtcggatctgatggccgttctctcctgaactgggcttgggctggaggacgaacgaggtgcaggtgcaggagcaggcttagcaataccgtaggattcctcgcggctttcccgtcccctcccccctcctacttggttgtcttgtttgactgtcttctgaggaaccgaacaacagtaataagcacaccgatgccgttcatac

SEQ ID NO: 3364 - DNA, 935 bp, Zea mays
  Clone ID: 700262632_FLI
aaaaaaaccactcatcaggcgagacgcgagaagatcaatgcgaggatggagctgctcaaggagctggtccccggctgcagtaaggtatcaggaacagcgttggtgctagatgagatcatcaatcatgttcagtctctccaaaggcaagttgagtacttgtcaatgaggcttgcaactgtaaacccgaggggcgattttggtgggctagatagctttctgaccacggagtgtggaaggatagcaagcttcaactgcaagaacggaatcgacttggagcaggtaacctggccagaaatgggtgttcatggagcaaggcagctgatgcaactccaacagcagttctggcatggtgatttggcgcatccacaccaagtggtttcacagtgggaaaagcggggggatggccatcctcccgtcttcagcaactccagtccctctctcttcggctatgatctaacaagctctggagcccagcaaaacccggcgagcaagctaaagaccgagctttgatcgacaacggtaaatagcatgtcaggggagcaagatggacatatggggggagggggacacagaatttcagcaaattgatcaaggcacaaacgagctgcgaatgaatgatggctgtggatggttgatgtcaagcccagcgaaatcaacattttcagagaggggatgtacatatagcgatagagatactgttggtgttgagctgaagacggggatgcatatgatgggcgaggataccgcagtcgttggagagacaggcaagccctgttgctatcgttgcagagatggccaagcgataccctggtttcgttactgatgatgatgacattcttagtgtatttctgacgactataatggcagtcttaaggttatatgggcagcattttttacgaacgcaagacatttcaacaagcattggaaaatttggc

SEQ ID NO: 3365 - DNA, 727 bp, Zea mays
  Clone ID: 700262705_FLI
gttgaacctgggctggtgtgatggcatcactgacaagggggtgaccagcctggcttcgggatgccctgaactcagggccgtcgacctgtgcggctgtgttcttataacagatgagagcgtggttgcgctggcgaacggctgccttcacctgcgctccctgggtctctactactgccagaacatcacggaccgcgccatgtactccctggccgccaacagccgcgtgaggagtcggggccggggctgggacgcgacagcgaagagcggcggcggtggcaaggaccgggagcgggacggactggcgagcctgaacatcagccagtgcacggcgctgaccccgcccgcggtgcaggcggtgtgcgactcgttcccggcgctgcacacgtgcccggagcggcactcgctcaacatcagcgggtgcctcagcctaacctccgtgcactgcgcctgtgcgctgcaccctcaccgggccgggcgagtcatcctctccaaccacgcctactgaacgcaatgcgtgaataggcggcgatgctcagatgtgtggataggccgttcaaccgtgagcgacggtgtccgctgtttatgtgaggtgcttgttttgtgtttaggcgtcaaggcgtgtacttggggtctctactctctagggaaccgtgtagaagcaaccgagttgagttcatcgtctgtaaaaacatggactgtatctgactatctgttgtcatgtcttttg

SEQ ID NO: 3366 - DNA, 2074 bp, Zea mays
  Clone ID: 700262819_FLI
cttcttttacgacgaccggccggtgcagtacttcgtgtaccagctgctccgcgggctcaagtacgtgcactcggcgaacgtcctgcacagggacctgaggccgagcaacatgctgctgaacgccaagtgcgacctgaagatcggggacttcgggctggcgaggaccacgacggagaccgacttcatgatggagtacgtcgtcacgcggtggtacagggcgcctgagctcctgctcaactgctccgagtacacccaggccatcgacatgtggtccgtgggctgcatcttcggcgagatggtcaccagagagcccctgtttcctgacgacaccagcctcgggttcctccggagcgaccacgcccgcagatacgtgaggtccctgcctcagcatcccaagcaacagttccgcgtgcggttccccaccatgtctagcggcgccatggacttgcttgagaggatgctcgtgttcgatcccagcaagaggattactggtaaatcgatcttgttgttgcttttccttccgtggaatcatatcgcagttgatgaggctctgtgccacccatacctggcgtcccttcacgaggtaaacgacgagcccatctgtccggcgcctttcagcttcgacttcgagcagccatcgctcaccgaagaagctataaaggagctcatctggaaggagtctctcaagttcaaccctgacccgatccactaaatataatagctccctcccagctgtgtacacacgagcaaactaggacggcatgtctatcagctagctccatggggggcgaaaggcatatatagcaggatgactgtacaagtgaccacccctcatcatcatcaccttcatctcattcgcatggcttgtcaatggtgcgacaccctaacgtccaagtctggtcaataatttgtagtggagaaaactggcagcgccttgttaggttgtgtctatcttccttcgtttgtatgcttaagaagcttgtcactgcctgtgaaccatggtactactgcagttgtccacacactacagacagcagctcaccacgtcaccttacccgaatttgttccagcaattggcaccgttcccctgggcattacgcaaacattgcccatacaacagcataacgttcttcaaaccacaggcgcatgacaacaagctaggtcacacaccaaaactattttttaatagcaccaacaacatgcgtagcaacacgtttgttttaagggcactggcatcaagctttaatagacacatgaattgaacaggtaatcacaaattgacgggacaagcagacacagatctagagatatgattcggactctcttcccagctgggatgatcccaatcagaaacatgtagagcaactgaaaggtcaataagcactagcgagactgttgcattgaaacaatcctatattccagatgctaaatccagaatggaaatagaagtacatgcagtatagatcagccaggactaaaaagaatggaaattggagttatgttgttggcagcctgccaactttgactataccataactatcagcagacaaattgaactgcttaataagttactcaaggacatgctacctggtaattagaaaaacatgaatgtttacaaaactaatcggatgactgtaaaacaaatccacaagagtatagataaagcaaacagtattttaagaatctaaaattgaaatattctataaatcataaggagttgaagaactacacaggatgtaacatgtatcacaaaagactgtataatgcagggattgaaagaacctgtagtaaacaactggtaaaggtctattaaagagcatatggacatcctatgtaaaacaaatcaagaaatttgtgaattacagtccgttcacattacagctacagctacagcatcattcctttgcaacattccatgagttatgatgtcaacaactaacatcagacatgaagcccaaaatgattgctgatggcattagtgtacaagatgtcagacataccacaatacaatgctgtcacttgaggggaaccatatcttagcatccataaaactcagccaaacctggctgccagc

SEQ ID NO: 3367 - DNA, 1780 bp, Zea mays
  Clone ID: 700262823_FLI
ttctctgcctcgccggggaagcgatgcagccgctgcaccaaccgccgatgaacgggcaacacggcccgcctcctccgcagggatccggggttcccacggcttcgcagcagcaggcgccaccgccgtcgtactaccagcagcagcagcaggggccaccgcctcagtactaccagcagggtcccccacagccgtgggcgcagcagcaacagtacgctccaccgccgccgcagtacccgcctcagatgcagcagtacgctccaccaccgcagcagtacgccgctccgccgcagcagcagtacgccgctccgccgcagcagcagtacgccgctccgccgccgcagtacgctaccccgccgcagcagtacgcgcagctgcagcagtacgcgcagccaccgcagtatgggacaacgccgggaagcggtgaggtcaggaccctgtggattggagatcttcagtactggatggacgagaactatctccactacaacgccttcgcgcctgtggcccagcagattgcctctgtgaaaattatacggaacaagcagactgggcactcagaaggttatggttttattgagttttactctcaagccgctgcagaacatactctgatgaacttcaatgggcagatgatgccgaatattgagatggcttttaagctgaattgggcttctgctagcactggggataagcgtggagataatggttctgaccatgcaatatttgttggtgatttggcccctgatgttacggactccatgttggaagatgtgttcagagctaactatccttcagttagaggagctaaagttgttgttgataggatcactggacggcctaaaggatatgggttcgtgcattttggagatctgaatgagcaggcacgtgctatgaccgagatgaatggaatgatgttatctacaaggaaaatgaggattggggctgcagctagcaagaagaatacagatgctcagcagacatatgcaactaatggtgcataccagagttctcaaggcaattgttcagagaatgatcccaacaatacaacagtctttgtgggtgggttagattccaatgtagacgaggagtatctaaggcaaatttttactccgtacggagaaatttcctatgtgaagattcctgtaggcaagcattgtggatttgttcaatttaccagcaggtcatgtgctgaggaagccatccaaatgctgaatgggagtcagattggtggacagaaagctcggctttcatggggccgtagtactcaaaacagacaggcttctcagcatgatgccaacagccagtataatgggaacaactattatcgataccaacagccgggtaatgaaggttatagctatggtgcacccaatgcacaagacccaagcattcaaaactactatggataccctggttatggtaactatgagcagcagtcaacacaggaacagcagcagcagcagcctccaccagcacaggagcagcctccaccggcaccacagtaacaatcatcgtggtgacgattgcttgggcacttctggaatgctatcagattagagggactacagtcagagcagtgccgtgccgaatgagacgtcctgaagatatggagggcatatagtctcatgggtgttcttgggccggtgttaatctacgatgacactcctgatgtctcttttgtttgtcattgagatcttgacggctgaagtatgcaccgttgaaattgatgtattcgtcgtcgtcggattgtttatttgctcggaaccattttttgcacttt

SEQ ID NO: 3368 - DNA, 1044 bp, Zea mays
  Clone ID: 700262860_FLI
gtggctgcatcgtgtccatccacaagtatcagctccgtgacgctggtggggttgactgcgccaagtgtgctcggagcacccgtgctgccatggccccaccaagtcccgtatggacaaatcctattcatagttctcaaaatgtatctgacagaaaagacattactgtaaagagctggagacctcctgctgggcaaatttcaagtcagtggaggcagactaatctgtggagcgtgtccagtatacagtcagacttgcagcagcgtctagcttttgagtttgataggcctagcggcagtgaaaagctacttcctgggcgcacttttattcattcccaggaaaggaaatttgatgacatgcatgacagaccagcaactcctgcgggcatgaaccacattatgagggagagagatcccaatgggcacggtcagaccactaatatggatccagcatactcttataccctctatcacagagatggatcgcatccaaataatcttcatgattctaatcaccattgtggagaaaatgactctttgtcttctaggaaagtggcaatgccagaagcttctacaagtgtggatgctggtttcaagcttgattcacatcatacatctaatttaaaggatgatccaccatccctttcagttggtctggcttctaattttgcaccacagaatggaccgaaagaccatatcagaattgcacctactcagcagcaatcacaaatgacttcctcctcattgcagaaacaattctattctcatgctgtaactggttataatgaattccaagcacagatgcgcaatggaagacccagaatggattcaaaggctagatcacaattacttccccgctattggcctagaataacagatcaagagctacaacacttatctagcgagtatccgacacattctacttatgttaataagtaattttccttggcattactttctgtagtcataattcccaacttccatagatatgttattcgtttgaactctattgagttttacttaactttcaaacagttcaaattctgtt

SEQ ID NO: 3369 - DNA, 1461 bp, Zea mays
  Clone ID: 700262918_FLI
caccccgcagccgccctagcacccgcgacgagcaggatctgcccaggtaaatcgacttcaagccggatgcatgccggcagctagtttcttctctgtccctaattccccactccaagtgtttgtctggtcagtaggtaagattatggatggggatccagcacctaccgcacctgggctggttttctagtctggaaggagagcaacatgacacgctcgtgctggaatatagtgcgattttatgttcctgctacgttgcgactgctcatagaatatatgccaattttcatcttcctgctatgtccgtgtatcatgttttttgaaaaataatatctccatatccgcatcctcctgataccgcccatatccatgcatacatatggtttgcttgctatatgcaagcgcctcgaacccggattgctataatttgatgatttcgtgtctctcacttgatctttttttaaagaataagttggtgtcgtgattgtagatctaagaagtgtgacgtaactaatggaatagtgtatcctgacaaataatgcatggtgaaacgttttttatccagattccttgaatcccctaaattgtgtttgtttattgttagaaatgaacttcatctaccaaacaggattcgaacaggcctttctttaccatgtttcgtgcaactatgcactgctaacatatcagtaccatggtttgcactgctagaatatcagtttattaccattttcgtgcaatcgtgactgaggtggatggggttattgaacaacgtatttgaatatttgatgttttagctgcatggaagtattcattccaatccttctgttgaattgcaaagaattgcttaaaattgagatctgtatagttcagttttagttatgccttttcattggagcctgaattggacttcagttgtttgcatagttatagttataaatatagaatagcttgcttgtccatcaattttgaattgttacagtactgaatgagtcctcagagtgcatagtgttgttctctttttatgtgcctgatagttggtcctcttgtatttcagttgctcttgcggtagttcccccaactgtcaccatgcagaacgaggagggtaagactgtggacctctatgtccccaggaagtgctcggccacaaacaggatcatcactgccaaggaccatgcctctgtccagatcaacattggccacttggatgcgaatggcctgtatgatggtcacttcacaacgtttgctctctctgggtttgtccgtgctcagggcgacgcagacagctccttggacaggctgtggcagaagaagaaggctgatatcaagcagtagattttacatctagtttaccaagaattggacactgccttagctatgttttgaattcatgtcactatatgcaattgcagtgttgtgatttcagctggtaccttaaatctgaagatttagtatctttgttgggtt

SEQ ID NO: 3370 - DNA, 1102 bp, Zea mays
  Clone ID: 700262958_FLI
cacagcacggaggcactcatcagtcatcactagtacttcactagttagctagcaatattcctactcgctaagtagtggagaactggagatcgacatgagccaggggcagccgaggaggcggcagggcgaagagggcatgcacgcgcaggacaagcccgtcaagttcggcgacgtgctcgacgtctcaggcgagctggccgaccagcccgtggctcccagggacgccgcgcggctgcaggccgcggagcagtccgtgctcggcgggacgcagaagggcgggcccgccgccgtcctgcagtccgccgcgacggtcaacgcgcgagcgggccacgtaggcagggctcagaccgcgtgccccgtcgccgacgcgggcgccaccgtcaccgagaccgagctcgcgggccgccgcgtcgtcaccgagtccgtcggcgggcaggtggtggggaagatggtgagcccggcgccggtggcgatgacggacccgccgggcgcgctggagaaggacgccgtcacgatcggccgcgcgctggaggctgtgggcgcgatggtcggtgacaggccggtcgagcagagcgacgcggcggccgtccaggtcgcggagctgtgcgccacggggtccgactccaccgtccccggaggcctggccgcggcggcgcagtcggcggccgaccagaacgcccgcgccacgcgcgacgaggacaaggtcaagctccggaacgtcctctcgaacgcgagggagaagctgccggcggacaagggggcgacgcgggaggacgccgagagggtggtgtccgccgagatacggaacaagctggacatggcgaccacgccgggcggcgtggcggacgcggtgactacagcggcccggctcaaccaggagcgcccgaggccataggtcgtcgtggcctttatatcccatgtggaacagtggaagcgtgcgatcagaagcctgcgcgcggatgagcgtgcttaatagcacagtagcgcgtgccgtttttttttttggacttactaagaaaactacgtacgcttgtaaaaatgcgcgaacgacaccgtgtccgcagtgtatatagcaataaaatcgttgcgcgtgaagttccgt

SEQ ID NO: 3371 - DNA, 988 bp, Zea mays
  Clone ID: 700263035_FLI
ccactgcccgaggccccctcctcgctgacttggctcctccgccgtggccggaggcgaagcaagtgtaaaccagcccaccctcctccccgtctcctctccctccccatgcgctgttttgttctgtattgggttgtgcgcgggggacaggacgcctcctgcgccgaccgttccgttcgtgtttgtgcctgcctgtgccttcggttgttcctctgagcgacggcgagtcggcgaccgaggtggggttccgagcgccccagcccgtggtggaattcgtttggtctggttgttgcgggggaccacagaagcattagctgggtgaactctttcaaaaggggcaggtgcgctagtttgaatggctgctacaaagcttcaggccttttggaaccaccctgctggccccaaaaccattcatttctgggcgccaacattcaaatggggtatcagcattgccaacatagccgactttgcaaagccgcctgaaaagatatcttaccctcagcaagttgctgttgcatgcactggaatcatttggtcaaggtacagcttggttatcacaccgaaaaactggaaccttttcagtgttaacgttgcaatggcgggtacaggcctgtatcagctttcacggaagattaggcaagattacttgtctggtgagaaggatgctgctccacaactgcaagaatagataatgacaacacacaaagaataactgattgagaagtctgcggcctagggatcttactcttgatttttctgggcaggcaaggatatgtctacatccaggacgggtcatgtttgttttcttgttcttctgaaatcatgagcaggtcaatgtgaaaatctcctgccaaaaaaagaagcccatgaagtaatattttgtgcatttttgtgggaaaaaagtcatgccaggacatgattcgtatattgtccttttgttcactctatctcgtatttgtgaactctaaattgtttgccaatttgattgatc

SEQ ID NO: 3372 - DNA, 2134 bp, Zea mays
  Clone ID: 700263082_FLI
ggtgcgcctcgggcgagatccgctccgcgtgccccgccgctgccgaggtgagctccgaacgcccgccctccgccgttgccgagatagagggtgtcgtccccactccccagcatctggttccacggagagttgttgatcttggatacctgatccgcaatttggggctgattgagtcacttgaccttttcaacatctgccccgttcctgctgccttgctcactataagaggctggcctggttccagagatgattctattgtgagtggagatggattctgtgagaagttggttccagaagttccagccgagagacaaatcgaagaggccagtggtggctgccagacatggaaaagatccaggaaagcccccgatggatgatgccccttctagtgcgacgaaacagagggtcgccgctgcaaaacagtacattgagaaccactacaagacccagatgaagtccctgcaagataggaaagagaggcgctggatgttggagagaaaattacaagatgccgaagttcctgtagaagagcaaaataacattcttaagcatttggagaaaaaagagactgaatatatgcgcttgcagagacacaagatgggagttgaagattttgaacttttgactattattgggagaggtgcattcggagaggtgcgtctttgtagagagaaggcctctaagaatgtttatgcaatgaaaaagctcaagaaatctgaaatgcttcgtaggggccaggtagaacatgtcaaagctgaaaggaaccttcttgctgaagttgatagtgcttacatagttaagctctattattctttccaagacgaagagttcttatatctcatcatggaataccttcctggtggagacatgatgactttacttatgcgcaaagacacactaacagaagatgaagctagattttatattgcagaaactgtgcttgccatcgagtctattcacaagcacaactatgttcatcgggatatcaaaccagataatcttttgttagatcgcagtggtcacctgaagctttctgacttcggtttgtgtaaacctttggacagcagtaatttccctaatttgaatgaaccagattatatgtctggaaaagttaccacacctttgcctgataccactcggttaagcaacccttctgcaccaaggcgtacacagcaggagcaattgtcacactggcaaaagaaccgtcggatgttggcatactcaacagtcggtacacctgattatattgctccagaagtgctactgaagaaaggatatggaacggagtgtgactggtggtcccttggtgctattatgtatgaaatgctagttggttaccctccattttattcagaggacccaatgtctacttgcagaaagattgtgaactggagaagtcacttgaaattccctgaagaggcaaagcttcctcctgaagctaaggctctcatcagcaagcttttgtgtaatgttgagcatcgacttggtacaaaaggagcccatgaaataaaagcgcatccatggttcggaggtgttcagtgggagaagttgtatcagatgaaagctgctttcataccagaagttaatggagagttggatactcagaattttgagaatttcgaggagattggaactcaaattcaaagttcatccaagtcaggcccttggagaaagatgcttccatccaaagatgcaaactttgttgggtatacgtacaagaactttgaaattgtgaatgatgatgaagtggcaggaattgcagagttgaagaaaaagagttccaaaccaaagcgaccaaccatcaagacaatgtttgagaggatggacggagaggagcctgttcaagggagtttcttaagtatgttgcccccggagggccaaccttcgtcccactccagcgttccacaggaaaaataccaacctcgccgtaaataggatatggaggtttggaaagtaaagcataggaaagtaaaacaagaaaaaaaaatcgtctgctgccttttgatctgttccctgtctaagttttgtaaatcctaaccaatgcgttctttagtcaaatgcttaaaaaaatctctccggcaaaatagtgtattgcatttgatgtgagcatcagtgttcggctgtatattgtgtc

SEQ ID NO: 3373 - DNA, 1706 bp, Zea mays
  Clone ID: 700263090_FLI
cgcctccttcagtccatcccctcaaccccggcggccaaaagccggcacaccgaagcggcggccatggcggagctaaagcggctgtcagagagccgggacctgacgcggatcgagcgcatcggcgcgcactcccacatccgggggctagggctggactcctccatggaggcgcgcgacgcctcggagggcatggtcgggcagctgcccgcgcgccgcgccgcggggctcatactccagctcatccgccagggcaagatcgccggccgcgccgttctcctcgcgggccagcccggcaccggcaagaccgcgctcgccatgggcatcgccaagtcgctcggcgcggagacgcccttcgcctccgtcgcagcctcggagctcttctcgctcgacctctccaagacggaggcgctcacgcaggccttccgccgcgccatcggcgtgcgcatcaaggaggagacggaaatcatcgagggcgaggtcgtggagatcttgatcgaccgccctttgtcggcctctgccgctggcggcagctcggctgcccctacaggtgctactgcggctggtaagtcggggcggctcacgctgaagaccacggacatggaaacggtgtacgagctcgggggaaagatgattgaggctcttgggaaggagaaggtgcagagcggggatgtgattgcacttgacaaggcctccgggaaggtcaccaagcttggacgctccattgggaggtcgcgggattatgatgccgttggcccgcacaccaagtttgtcaagtgtcctgatggcgagctccagaagcgcaaggagatcgtgcactgtgttaccttacatgagattgatgtcattaatagcaggacacagggttttcttgcactgttcactggtgacaccggtgaaattcgtgcagaggttcgggaacagatcgacacaaaagtcgcagagtggagagaggaaggaaaagctgatattgtccctggtgttctgttcatcgatgaagttcacatgctagacattgagtgcttctccttcctcaaccgagcattggaaaatgacatggctccgatcctagtaatcgcaacaaacagagggatcacatccattcgtgggacaaactaccgctcgccacacgggatcccgccagacttccttgaccggttactgatcatcacgacgcagccctacacggaggatgagatcaggaagatcctggacatccggtgcgatgaggaggatgtggagatgtccgcggacgccaaggtcctgctcaccaaaatcggcgtggagacctcgctgcggtacgccatcaaccttatcacatctgccgcattagcctgccagaggcgcaaggggaaggtggttgacatggaggacattagccgggtgtaccagttgttcctggacgtgaagcggtcgacgcagtacctgatggagtaccagagccagtacatgttcaacgaagtgcccggggaagcagatggagaggacgcgatgcaatcctagatgaacttttcttcaccaggtgtctgtgttagtatgtactgcgtgtctgcgtcgtctatttctggtgcatcttgcttgtttagttgctgttatatcctgacaaggcgtggtgtgtgcgatgggctgcctgtaagctgatttaggtaactatatatgcaattcagatgtatcttagtaaaattcaccccagttggagtgagattgtt

SEQ ID NO: 3374 - DNA, 3048 bp, Zea mays
  Clone ID: 700263095_FLI
ggtacccttccctcactctcccggttctttcccggcgctggattcagatccgcacgcttctccatttccgtaaagctccgtgcctcctcctcgtctcttcactccaaatccaccgaggccatcgcctgggccccggggaaacccctcgcgctcgtggccctgtgagcagccgcagccatggcgcagccgctcgtcgtgaagaaagacgacgatctcgacgaggaagagtactactcgccattcctgggcatagagaagggcgccgtgctgcaggaggcccgagtcttccatgaccctcagctcgacgcgcggcgatgctgccaggttatcaccaagctcctgtacctgctcaaccagggtgatacctttaccaaggttgaggctacagaggtcttctttgcaacgaccaagctgttccagtctaaagatgcgggccttaggaggatggtgtacctcatgatcaaggaactctcaccttcagccgatgaggtcatcatagtaacaagctctttgatgaaggacatgaatagcaaaactgatatgtaccgtgcaaatgctattagagttctttgtcgtattattgactcaacccttctcacccaaatcgagaggtatttgaagcaagccattgttgacaagaatcctgttgttgccagtgcggcccttgttagtggcatctacttgcttcaaacgagtccggaagttgtaaaaagatggagcaatgaagttcaagaggctgtgcagtcaagagctgctcttgtgcaatttcatgcccttgctcttcttcaccaaattagacaaaatgatcggttggctgtcagcaagcttgtcactagcttgaccaggggttcagttcgctctccgttggcccagtgcctacttattcgctacactagccaggtgattagagagtctggtgtgtaccaaggtggagatcgtcctttctttgatttccttgagtcctgtctccggaataaagcagaaatggtcatacttgaggctgcaagagcaattacagaactgaatggtgtcacaagccgagagcttacacctgcaattactgtgctgcagttgttcttaagttcatccaaacctgttctcagatttgcagctgttcgcacacttaacaaggttgcatcaactcatcctttggctgtcacaaattgtaacatagacatggagagcttaatctctgatcagaacaggagcgttgcaacccttgcaattacaacactgttgaagacaggcaatgagtcaagtgttgatcgtttaatgaaacagatgaccaactttatgtcagacatagctgatgagtttaagattgttgttgttgaagcaataagatccctgtgcttgaagttccctctgaaatatcgctcattgatgaacttcttgagtaatattctacgggaagagggaggattcgagtacaagaaagccatagttgattcaattattatactcattagagatattcctgatgcgaaggaaagcggtttatttcacttatgcgaattcatagaagactgtgaattcacctatttgtccactcagatacttcactttttgggaaatgaaggccccaaaacatcagatcccagtaaatacatacgctatatatacaatagggtgatacttgaaaatgctacagttcgagctagtgcagtcagcacattggcaaaatttggtgccttggttgactcactcaagcctcgcatatttgtgctcctgagacgctgcctgtttgatggagatgacgaggtgcgcgatagagcgaccctttacctcaaattgttaggtggggaagctacagtgggtgagacagagaaggatgtgaatgaatttctcttcggctcacttgatgttccattagtaaacttggagacgagtctgcggaattatgaaacaaaatcccaaccccttgcggagaaaaagtctacaggcaagaaatcagcaggtccagcatctgctgtcagtggctctgtttctacagttgatgcttcgtatgagaagcttctttcgtccattccggaattcgctgattttggaaagctttttaagtcatctgcacctgtagaattgactgaagctgagaccgaatactcagtgaatgttgtgaagcatatttttgatcgacatgttgtgctccaatacaactgtaccaatacaattcctgaacaattgcttgaacaggttattgttttggttgatgcttctgaggctgacgaatttttagaagttgcttcaaagcctttagaatcattaccatatgattctcctgggcagacctttgtggcttttgaaaatccagaaggtgtcattgccaccggcaagttctcaaatatcctgaaattctttgttaaggaggttgatccatccacgggtgaagctgaagatgatggtgtcgaggatgagtaccagcttgaagatcttgaaatcgtttctgctgattatatgttgaaggtgggagtatctaacttccgaaatgcctgggaaaacatggatccagagactgagcgagttgacgagtatgggcttggagtaagggagagtttggctgaggctgtaagtgctgttataagcatccttggcatgcagccttgtgagggaactgacgtggtcccaagcaattcaaggtcgcacacttgtctgctctctggtgtgtttattggcaacgtgaaagtcttggtgagactgtcatttggaattagtgcaccgaaggaggtggccatgaagctggcagttagatctgacgatccagagatcagtgacaggatccacgaaattgtcgctaatggctaaaaacaatggtagtatcttttttttactccttttcttttggctttcatgctacgggaagtttgaggggattcaattaattagagtatatgtaagtttggtttccagtcgaatctatcattcgttgcaccatcattcttccttgacacagtacaccagtttttggttgttttggatctgtacaattttccttatatactgaggacttaaaatagtatacgcaataatatgcaggtaaagttttgctgg

SEQ ID NO: 3375 - DNA, 1797 bp, Zea mays
  Clone ID: 700263141_FLI
aactcctccgcctcggcggtggccacgccggagaagaagccggcagcgcacgggaagtgggcggtctacagctggaggtcgaagaaggcgttgcagctccccgagtacccgaacgcggaggagctggacgcggtgctgaagaccatcgagacgttcccgccggtggtgttcgccggagaggcgcgccgcctcgaggagcgcatggccgaggccgccatgggccgcgccttcgtcctccagggtggcgactgcgccgagagtttcaaggagttccacgccaacaacatccgtgacaccttccgcgtccttctccagatgggcgtcgtgctcatgttcggtggccagatgccggtcgtcaaggtggggaggatggctggccagttcgccaagccaaggtctgagccgttcgaggagaaggacggagttaagctgccgagctacaggggcgacaacgtcaacggcgacgacttcaccgagaagagccgcgtgccggacccgcagaggatgatccgcgcctacgcacagtcggtggcgacactcaacctgctccgcgcgttcgccaccggagggtacgctgccatgcagcgcgtcactcagtggaacctcgatttcatggatcacaacgagcaaggtgataggtaccgtgaattggcccatagggtggatgatgctcttgggttcatgactgcatcggggcttacagtcgaccacccgataatgacgactactgacttctggacctcgcacgagtgccttctcttaccctacgagcaggctcttacccgtgaggattccaccagtggccttttctatgattgttcggcccacatgttgtgggttggtgagcgcactcgacaactcgatggagctcatgttgaattcctccgtggtgttgccaaccctctgggcataaaggtgagcgacaaaatgaaccccagtgagttggtgaagctgattgatattctgaacccttcaaacaaacctggaaggatcaccataattacaaggatgggggcagagaacatgagggtgaagttgcctcatctcatccgtgctgttcgcaatgctggactgattgtcacatggattactgatcctatgcatggaaacaccatcaaggccccttgtggcctgaagactcgtccatttgactccattctggctgaagtgcgtgccttcttcgatgtgcatgaccaagaaggaagccaccctgggggcgtccaccttgaaatgactgggcagaacgtgaccgagtgcatcggtggatcacggaccgtgaccttcgacgatctgagcgaccgctaccacacccactgcgacccaaggctgaatgcctcccagtccctggagctcgcctttatcatcgcagagaggctgaggaagaggaggatgcgatcggggctcaacagcagcctgccactgccgccactggctttctgagtagccggagccaaacacaaaggagggtaggaatagctgtggtgactcggaagagaaagagacagtcgacgccttgttttgttgatgcttagtgtggtgacctggtggtggtggtggtgggtgttcttggcacaagttacatgctggggatagctataggaggtacctgttgaggtgtgtaagacagtagctagcaaccgtatgccttggtttcctgtttgggtgcgtgacttgccgactttctagctgcttctggggttttgacctcggtaaggaaagaataaaaagataatcggagtgcaatgcttgctgaactggtgctcaataaattgatcccttgatgcctctattttcttc

SEQ ID NO: 3376 - DNA, 1396 bp, Zea mays
  Clone ID: 700263159_FLI
tcaagtgagagtgagacccgcgttcttcttcctcggctcttccacgcattcagaacagggaggatcggatcggagctacgatggagcaggtcgtgaacacggtgatggacctggtgatgccgccggcgagcatggtgatgctggcgttcgcgtggccgacgctgtcgttcctgcgcggcgtcgagtgggcgctcaagaccctcacgaaggaggacatgctcggcaaggtcgtcgtcatcaccggcgcatcctccgcaatcggcgagcaaatcgcgtacgagtacgcgcggcggaacgcgaacctggtgctggtggcgcggcgggagcagcggctgttcgcgatccgcgacaacgcgcggctgctgggcgccggccacgtcctcgtcatcgccgccgacgtcgtcaaggaggacgactgccggaggctcgtcgccgacaccgtcagctacttcgggcagctgaaccatctggtgaacaccgtgagcttgggccacgacttcagcttcgaggaggccggcgacaccacggccttccctcacctcatggacatcaacttctggggcaacgtgtacccgacgcacgctgcgctgccctacctccggcggagccacggccgcgtcgtcgtcaacgcgtccgtcgagagctggctgcccatgcccaggatgagcctctactctgcggcgaaggcggcggtggtggacttctacgagacgctccggtacgaggtgaaggaggaggtgggcgtgaccgtggcgacgcacggctgggtcggcggcgacgccggcggcagcaagttcacgctggaccagcaccaggaaggcgcggcggcggatcaggtgcagtggaagcagcagggagagcgcgagccggcggcggcgacgctgctgggagggcacgtggaggcgtacgcgcgggcgctggtggccggcgcctgccgcggcgacgcctacgtgaagcgccccagctggtacgacgtcttcctcgtcttccgcgtcttcgcgcccgacgtcctcgcctggaccttccgcctcctgctgtcgacgtccacgcccgcgcccgccggccccagcgcaatcgccgcgcgtcgcccgcctcccgccgcgctgcctgccccgccgctccgcccgctgctcgagtacccgccggcagcggtgtaccggggccccgcccacgcccagcaggtggtgcagaagctggaatgagacagcgcatgctgcgtgcggtcgagacagagctttcatcatctttacgttactgctgtgatgatcgatgcgacgagtgatctctgatgatgtccttgcatctgcatatatgcatgtcgacgacgccattgtgccgaagtatatatgaactggttttggcgggtgtgtttgaataaatttgatcatctagtatc

SEQ ID NO: 3377 - DNA, 1587 bp, Zea mays
  Clone ID: 700263164_FLI
ggctagggttttttcttgtcacaccttccctcggtcccttccatctcctagccgccgccgccgccgccgccgccgctgcccaaaaccctacctaccctcttctccccctcactctcctttcatctccattctaatggcggcccaacccgtccggcgaagctgctagtgcttgtatctactatcttcatcaggtacttcgcgatcctactgaagtattccccgccgccgctgccatggccaccctcaaccctttcgaactcctcggcgccgacgacaacgacgacccgacgcagctgattgcggcggcggcggctgctgctcagaaagccgaggcgaagaagtccgccgtggcgcctgctgggaaggctgcccagcctgcggcgaccaccaagttcccgaccaagcccgctcctccctcgcagacggttcgggatgcacgcggcggtggctcatcagctcgtggaggctttggccgtggtgaacgtggccgtggcagaggtggacggggatatggccagaaccgtggcttcagtggtgacaatggcagtgacttccagggaggttatggtggcggaggctatggggatggtgctgtaactggtggatctgaaggagaaagggagagagacactcgtcccccgtaccgtggcggaggcagacgtggtggttacaggaatgttgagtttgctgatgactctgagaggccaccacggagaaactatgagcgccacagcgggactggccatggctatgagatgaagcgtgatggcgcagggcgtgggaactggggcactgccactgatgaacttattgcccaggatgcagaggactccccgaagatggaggaggctgctcctgttgctgagaaacaaggtgagcagaatgatgccccagcagcagatgagaacaaagataacaaggatgctactgcaaatgaggaggaagaaaaggaagaggacaaggagatgactctggaggaatttgagaaaataagagaggagaagaggaaagcactacttgcattgaaggctgaggagaggaaagttgaagttgacaaggatttgcagtctctgcagccactttcaaacaagaaagaaaatgatgaagttttcattaagctgggttctgacaaggataagaagaaggaaaatgctgagcgtgatgagcgtgccaagaagtcggtgagcatcaacgagttcctgaaacctgctgaaggagaaaggtactacggcggccgtggccgtggaaggggccgtggggatcgtggtggttttagaggcggatacggagggggatacagtcgtggcccagctgctgctgctccatccattgaagatcaagctcagttcccaagcctcggtgggaagtgaagggcgcccagctgctgctgtcaccgagcgttgtgttgtctgctgttgtcatatttaaattttgtccgacgttaaatttctgtgccacggtttaaacggaacaaataatgatgttgcatgtggctatctttagttatgtggtacttgacgttgaataccggagttgttgtttatcagaattaacctccaatttttgtaggccagcttttaccatttt

SEQ ID NO: 3378 - DNA, 896 bp, Zea mays
  Clone ID: 700263178_FLI
accgtactcatattggttttagcagtaagagcgtgcttatgggtgcaaaatgtcatagtgaaagatgttttattgcattgcatttagttaataacatgtcattcaaagttttgtggtaaaatttcttctgacctggatatggcgcggaaaatttgaacggtcctatgggagaattataccagaaaagagaagggtatgcgttactagtagcttcccccaaactgctggcgctatgatcaaaatgtgctttcccaatttagccactgcatgttgcctcataatttctagtttttcgatatctgacaatgccctgaccgccgcggaatgtcacgccaccggacaccgacatctactccattccgagggttcttgccccgatgccgtagaagtacgcgaggtgcacgaagaaaaactttggccgttaccacgtgagcgagccaccagttgagcatttgcgcgattcactgtacaagacagagagggatgtcatgaaggtgattagtccagctatgtttggtagtgaagggcgatgtccagagagtaagaatgaggcgacacagtatggactcgatatgactgagcaataatatcttgagcattcgattccatggatagctgccaatgatgttgtacatttatattagacccctccagctaccttgtcgatgcatgaacaagaagacaggttagactttgttgaaaccctcttcactagtggaggtatcgaccatcactcgtcattgtaacccgatggtgatcgacgaccatgagcttccatgttattgcgttctgatacttgagacttttattatgactatgtataagatattttctcttattagtactggatgatgagatgtgtcttattatgactatggatgagacttttgtgatgt

SEQ ID NO: 3379 - DNA, 734 bp, Zea mays
  Clone ID: 700263249_FLI
atcgacgcagagtcgcagtcgcagcacacactgaattctctttagctagctaagagagggtagccacaccaagacaggatgcagacagcgaaggtgaaggcgaaggacatggtgagctcggcgaaggagaaggtgaaggaggggtcggcaaagatgcagggcaagacgggcgaggcgacggcggccacgcacggcgagaaggagatggccaaggaggcggcccgcgccaagaaggaccaggccaacgccgacaagcaccaggagaaggccgaccaccgagcggacgccgccactggccaccacggcacgcgcgtgcccctcaccggcccgcacggccaccacggcgctggcgcggccgtcgaccccgcgtacccgtcctccggcaacacgtacccggcgtcgggcaagtacatctaggtgactgcgtcggatgagcgaggccagggtcgtggtcgcacttgcgtttttgtgtacgtagcgaccgagaagatcgatcctggctgtacgcctgcagtaccggtaccgactggttagttgtagagggtatgcggtgcgcacgtgcacgtgcgcgcaagtcgtctggaataaaaatgctctagttgctgttaggttgcttaatttcagtgtagtcgttcgttcacgggcactgttgccctctatgtagtatgttttttttttgtttttaatcgttttagtgtttgaccaagtacgcgtaatagatttgtaagttcgac

SEQ ID NO: 3380 - DNA, 2264 bp, Zea mays
  Clone ID: 700263306_FLI
cggccacccattctccaccgttcgtccgtccattcccattctcatttccatttgcctcgctcgccttcctcctccccactccactccattccaacgcaacggcctcgccccgctttataggccgccgcccgcgccacatcgccaccgtctcgcaccgtcgcggccacccattctctctcgtccatcgcatcgctccggctcccagcgcaatcgatccatccgtccctagtccgttattccgcgagtacgttgatgatccctccttacggcagtaaggattccgcaaaagtatggctcccttttcccttgattgatgcggggatttgtcaggaactaggtgtgcttcagctatgcagttcagcagcgtgcttcccctagagggaaaagcgtgtatgagcccagtgaggagaggcagtggaggttatgggagtgagaggatgaggatcaactgctgcagcatcaggcgcaacaaggcactgaggaggatgtgtttcagtgcaaggggtgctgtgagcagcacgcagtgtgtgctcacatcagatgctggcccagacactcttgtcgtccgaacatcctttcggaggaattatgctgatcctaatgaagtcgctgccgtcattttgggtggtggtaccgggactcagcttttccctctcacaagcacaagggccacccctgctgttcctattggaggatgttacaggcttattgatatccccatgagcaactgtttcaacagtggcataaacaagatatttgttatgactcagttcaactcagcttctcttaaccgtcacattcatcgtacctatcttggtggggggatcaacttcactgatggatctgttgaggtgctggctgcaacacaaatgcctggggaggctgctggttggttccagggcacagcagacgccgttagaaaatttatctgggtacttgaggattattacaagcataaagctatagaacacattttgattttgtcaggagatcaactctatcgtatggattacatggagcttgtgcagaaacatgtcgatgacaatgcagacataactttatcatgcgctcctgttggagagagtcgagcatctgactatggattagttaagttcgatagttcaggccgtgtaattcagttctctgagaaaccaaagggtgctgccttggaagaaatgaaagtggataccagcttcctcaatttcgccattgattccccagctgaatatccctatatcgcttcaatgggagtttacgtttttaagagagatgttttgttagaccttctaaagtcacggtatgctgaactgcatgactttggttctgaaattctgcccaaggctttgcatgagcacaatgtacaggcatatgttttcactgactactgggaggacattggaacaatcagatctttctttgatgcaaacatggccctctgcgagcagcctccaaagttcgagttttacgatccgaaaacaccattcttcacttcccctcggtacttgccaccaacgaagtcggataagtgcaggattaaagacgcgatcatttcacacggctgcttcttgcgtgagtgtgccatcgagcactctattgttggtgttcgctcacgcctaaactctggatgcgagctcaagaataccatgatgatgggtgcggatttgtatgagaccgaagacgagatctcaaggctactggcagagggcaaggtgcccattggcgtaggggagaacacgaagataagcaactgcatcatcgacatgaatgccagggttggaaggaacgtctccataacaaacaaagagggcgtccaagaagccgaccggccggacgaaggatactacatccggtctgggatcgtggtagtcctgaagaacgcaaccatcaaggacggcaccgtcatatagagactaactttggccttacgcatggcgtgcaaggttacaggttagtcatcgtcttgagagttgagacttagtttgaggcgcgcgcccgaccttgacttgagccgtcggagggacaagaacatgaggaagaagggctggtggtgccggatgttgccatggacgacgagaaatggtttggtgcggtcgcatcggttccagtagctagctcttccgatgttattaatatatgtatctagtggagtagtgcgaacagtgcaataagctgggcgagcaaagccgcggcaactcttggcttggggattgttggtgcatcttgtaaataataaactcggacgcagcaaatgaaacatgcccctc

SEQ ID NO: 3381 - DNA, 2245 bp, Zea mays
  Clone ID: 700263310_FLI
ggcccctgtgctctccttgccaccgaacgagagccaaaagcctcccgccccacgacgcgcccgccccggcggcgacgccccggaggacgtttcccgcagcgaccggcgaccaagccttgatcgcctccgccccatggctacccgggcgcgggcgtagccgccgcctcggccgcagcaggctcggtccgcccctttcggcgatttctgttccagtcgcatcgcgcgacagctcgtcgtccgattcggatccccgccaccgcggcggaacgaggcgtctccggtccccgagggtattcagggaatttgagactgatacgtcgggatcctgtcgataatgcggggctacgagtacgagaccaatggttaccaacaggaagtggaagatgagtacggagatgagtactatgatcaagatgagtatgaggaggaaggttcgggtgctggggatgggtatgctgaggaggaagagcctacagagggacaaaaggagatccttgaattgagagaacgattaaaagagcagattaggcgaaaggcaaaggctgctgctgcctgcacagctggccgatcatcttcttcacaaatacctcaagccagggacaaatttggctctttctttgggccatccaagccggtgatttctcgtcgagtgatagaagaaagaaaatcattgaaagaactgcataacacggttgcaagggagccaaggccttctggagtacataaggatattccatcgtcctctaaagtgcaaagtagagtaaatggacatcagcataaacaaaagattgttaatcaggtaaagaagaaggctgaggcacttaaggataaccgggattattcatttctactctcggatgatgctgacctgtcatcctctccaaaggagaaacctgctgctagatcttccttgactcgaagggctgatcgtgagttgacgcaatcaacagtaaagaggaaggcatcaacaagtcaacctgcacgcttgtcaaatggatatggacctaagaacacaatgtcaactcaaaggcatgctgaaggtaaggtaaattccatgagaagggaggatttctcgaatacagaaagggttgtttcacgtgacaatgagaggatgtatgaaagggttgtttcacgtgacaatgagaggatgcatagtattgcaagaaatggatccaaccaggcaagtactagcaaaaccacaatccaaaagcatccaagcaggggtcccattgctaataagcaaccttccaaggattcgaatgatgcaactctgaggaagagcagtgtagcctcaaagcaccatcccttagagattgacagaccaaaatcctcgcaaagtcagaggatgcagtcagctggtcagagaccacagcattcttcccatggtcagacgccacatcaatccatgcagcataggacgcagcagtcattgcagagtcggaggccacagcaaatgacacagggtcagaagccacaacagtctttgcagagtcaaaggactcaacagtccttgcagaatcgaaggccacagcagtcctcacatattcagaaatcgcaatcctcacaagcacacagaccacagtcattaagtaacaggtctcaggctttacaaggacaaaggcctctttcttcacagggtcaatattcagagcaaagaagagtacatgcaagtgacagagtcaaacaagctgaaaggcagattcggcctccttccaagtccatgccatcacggccagtctcttccaatggaattcgtgatgatcatgcaaaaagaaagcaagtggcaaaaagaagatttgatgaagatgaagatgatgaagaccccttagcaatgatcagaaatatgtttgggtatgatcctagtagatatgcaggcagagatgaagatgtcagtgacatggaagccgattttgctactatagaaatggaagagaaaaggagcgcgaggattgctaggcaggaggatgaagaacaacttcgcttgattgaggaagaagagaggcgcgagcaggagagaaagaggcgaaagatggcacgaggccgatagtcgaatacactcctatttggatgttataatatactacctccgttctcgaatatttgtcgtccgccggttcatttttgaactaaaccgtgacaaataaaaaagaacgcagggagtaactggcaggcctgattgcgtgaatacaagccccatggcggatcagacaggcacttctcttgcagtcctgtttacccttaccac

SEQ ID NO: 3382 - DNA, 495 bp, Zea mays
  Clone ID: 700263323_FLI
cgtgccgcgaatccgtgcctattttggtgtgatcatgagtcatgaggctgtggcagctgtgttacttttcggtgcagtaggatgcacgtgcggaaggagattggtttggcgattggggctgcgaagtgttgatgcacctgcacagcacatggttgttgatactcaattttgggtggcctttgctgagatttttgttcagatttttgtccttaacatacgggaatggaacttgtagcttgctgacactgtattgatccggaatgagtttcaagtgcgtttgcgtgcttttcgagggctctttactggtggccgtgataagtctcagaggcttggtttgtatcagcccagatgtttttctgtttacgatgcagtgtttgtttagagtgatactgatgtaatggaaataaggaactgtgtgtaatactagaatatgcttttgaagttgacatatggtgtcatgtgatgtagaatattctacatcattcctgttattac

SEQ ID NO: 3383 - DNA, 1808 bp, Zea mays
  Clone ID: 700263349_FLI
cgcgctggcatcggagaaggcagcggcggtggtggtcgcggagaaagcgggcggcgaaggtggaggaggagatggcgagggtccgtatgatgcgatcgtggtcgggtcagggatcgggggcctggtggcggcgacgcagctcgcggccaagggcgcgcgggtgctggtcctcgagaagtacctcatccctgggggaagctccgggtactaccgccgcgacgggttcaccttcgacgtcggctcctccgtcatgttcggcttctctgacaagggtaacttgaatttgatcacacaagcattggaagcagttgggcgtaagatgagagttctacctgacccttctacagttcatttccacctacccggtgatctctctgtccttgtgcatagaaagtatgaagacttcatcaacgaactggtcagcaaattccctcacgagaaagaagggatccttaaattctacgatacatgctggacgatcttcaattcactaaattcgttggagctgaagtctctagaggaacccctttatctttttcggcaatttttccagaagcctcgggaatgcttaactctagcttattatttgccacagaatgctggggatatcgctcgcaagttcataaaagataaggagctactctccttcatagatgccgaggtgtgagagattttgttttattgtgagcacagtcaatgccttgcaaacacccatgataaatgcaagcatggcactttggagggattaattatccagttggtggcgttggtggtattgcaatatccctggcagatggccttgttgaaaagggcagtgaaatccgttacaaggcgaatgtaaccaacattattcttgaaaatggaaaggctgttggggtgaggttatcgaatgggaaggagttctttgctaaaacagtgatatcaaatgccaccagatgggacacttttggaaaactcgtgaaagaggaacttccagaagaggagaaaaactttcaaaagaattacgttaaggcaccatcgttcctttcaattcatatgggtgtcaaagcgtcagttctgcctgctggcactgactgccaccattttatacttgaggataattggagtaatttggaaaagccttatggaagcatattcttaagtatccctacagttcttgatccatcattagctcccgaaggacatcatatacttcatatatttactaccgcaggcatagaagactgggagggtctttctaggaaggaatatgaagagaaaaaagaggtggtggccaatgagattataagaaggcttgaaaagaagttgtttcctggtcttcaagattcaatagtcctcaaagaggtaggctcaccaaaaacacaccgaagatttcttgctcgaaatgacggtacatatggaccaatgccgcggggtaaaccgaagggattactggctatgcctttcaatactacctcaatagatggcctttactgtgtcggtgacagctgtttccccgggcaaggtgtcatagctgtagcattctcagggatcatgtgtgctcaccgagttgctgcagatattggactagagcagaagtctccagttctagatgctggtcttcttgggctactcagatggctgagaacacttgcataggacggtattagacaaagtgggaaaatggacctcatcttctttcagaaagctgatgtttaactagagttcggattccaaactctgtaattagggatgccagggcaatggcatgcatacgagacttaacttttacatgctagagcgataagattttgtctgttgcgtacctc

SEQ ID NO: 3384 - DNA, 1208 bp, Zea mays
  Clone ID: 700263391_FLI
cagagctcgatcgatcaccaaactaattaacaatggcgtccgcagcaagaagcactgggtctctcccggtggctaacgtccaggcgctcgcggaggcttgcaatgacgacgggggcgacgtccaggtgcccgagagatatctcagcaaggatcccagcagcgcggaggaggtcgtcgtcgtagccggcgacgacagcgcctgcagggcgattcctgtcatcgatctccgtaggttgctcgatccggagtcatcggaggaggagaccgccaagctggcgtctgcctgcctcgactggggcttcttccagctcatcaaccatggaattccggacgaggtgaccggaaacctgatgaaggacgtggctgcgttcttcaggcagccgctggacgccaagaaggaatgcgcgcagcaggccgacagcctcgaaggatacgggcaggccttcgtggtgtcagaggaccagaagctggactgggcggacatgctcttcctcatcgtgcagccgagggaggccagggacacgcgcttctggccgacgcgccccgcatccttcggggactccgtggactcctactccctggaagcttcgaggctagcgtaccgcctgctggagctcatggccaggggcgtcggggccgacccggcgtcgctaagacgcgtgttcgaggggcagacgcagggcatgcgggtgaactactacccgccgtgccggcgggcggcggaccgggtgctgggcctgtcgccgcacaccgacgcgtccggcctgacgctgctgctgcaggccagcaacggcgtgcagggcctgcaggtcaggaaggacggcaggtggttcgccgtggacgccatcgacggcgccctcgtcgtcaacgtcggcgactttcttgagatcctgagtaatggaaaattcaccagcgttgagcacagggccgtggtacacccaaccagagagagaatgtcggcggcgctgttcctgtacccttgccagaacatgagggttggtccattgccggagttcgtgaatggcggtgaagagcggtatggatcaacggattatgaggaatttatgaagcattactttgcaacgaagcttgacggaaggaagcacctagacagattgaagttggagtagtaggcagtagctatctctaccgtatctatctcgctggagagacattgagacaaataaataaattttctatgcgataat

SEQ ID NO: 3385 - DNA, 956 bp, Zea mays
  Clone ID: 700263495_FLI
gacatctcccccaccctcacagtctcacactcacactggcacacgcgacggcacgcgctagctcaaccatggatcgcacgcgacacaggagctccgttagctccgagcgcttccttggctccttcgcccgctccgcagccgccggagaacagtcggcctctacggccttcgagcttgacgaggacgacctcttctccgcaggatccggctcgcccgagccgccgcagccgttgcgccgcccactcatcctgtcctccgtccgccctgcaaaccctagccctgttccacgcctacgccgcccgccggagggcatcctggacgccctccccgagcgccgccgctcgccgcctcagtcctcttcatccacgtcctcgtcccccgcttccccggctgcggcccctccccgcatgatccctgccgttccccgcccggcgccggcaccggcgccgtatgtgccgcaatcattgccggtcaacgttcctgcggcgcggctgcggaagccgcccgtggtgatggtgatgggggaagcggaggatgaatacgaggagatgctaccgccacacgagatgttagcgcgcgcgcgggctcgggagtcgccgatgacgacgttctcaatgctggagggagccgggcgcacactgaaggggcgggatctccgccaggtacgcaatgctgtctggcggaagactggattcctcgactgacccgtgccatttgcactggccagtagccctcaggtagaagtgactgaaaaaattatatgggagtctggacatctggttgtcatgcacacctgtgtttgttaattttagtcacgcctgtaaaacatgtctgctctagtacttgtaaactcttcatttggtgggctataagaactaagttgaaatatgtcacacgagtgattctgtgtttgttaggagcaatttactgcaataaataataaggtgttcattttc

SEQ ID NO: 3386 - DNA, 1385 bp, Zea mays
  Clone ID: 700263524_FLI
gagaaaggcaggcggaggcggacaggccacccccgcacctcattccacaattatttgcgcccgtcccatgtcagtcggctttaaaaggacacgagcgcttaaacccccaccccatatccgcatccgctgcctccgcctctcgagtctcgtccacccgtcatcctcctagctcctctactcgccagtcgccatgggcaagattaagatcggaatcaacggcttcggaaggatcggcaggctcgtggccagggtcgccctccagagcgaggatgtcgagctcgtcgccgtcaacgaccccttcatcaccacggactacatgacctacatgttcaagtacgacaccgtccacggccactggaagcacagcgacatcacactcaaggactccaagacccttctcttcggtgacaagccggtcaccgtctttggcatcaggaaccctgaggaaatcccgtggggtgaggctggcgctgagtatgtcgtggagtccaccggcgtcttcactgacaaggacaaggctgctgcacatctcaagggtggtgccaagaaggttgttatctctgccccaagcaaagacgcacccatgtttgttgttggtgtcaatgaggacaagtacacctcggatgttaacattgtttccaatgctagctgcaccacaaactgccttgctccccttgctaaggtcattcatgacaacttcggcattgttgagggtttgatgacaactgttcatgccatcactgccacccagaaaactgttgacggaccctcagccaaggactggagaggtggcagggctgccagctttaacatcattcctagcagcaccggtgctgccaaggctgttggtaaagttcttcctgatctgaatggcaagctcactggtatgtccttccgtgttcctactgtggatgtctcggttgttgacctcaccgtcagaatcgagaagggggcctcctatgaggatatcaagaaagctattaaggctgcttccgagggtccactcaagggtatcatgggttatgcggaggaggatctggtttctaccgacttccttggtgacagcaggtcgagcatcttcgacgccaaggccgggatcgctctgaacgaccacttcgtcaagctcgtctcgtggtacgacaacgagtggggctacagcaaccgcgtcgtcgacctgatccgccacatgttcaagacccagtagaggggttttttccccctgcttctcatggatggttgctgcttgtgtatgccgagaataaatgtggatggcgcgtgcctctgggtcgccaggttcatgctgagtctggacatgttttgcacttttgcttcccttcctgctaccatctgtgacagaaccgctcgctaatatgggacctgagatt

SEQ ID NO: 3387 - DNA, 1835 bp, Zea mays
  Clone ID: 700263624_FLI
acagtctacagtctacacacagctgaccagagaggcagagagtgcaagcgatctagcaagttttaatcttggaagaagccagctaggcgcgtgaatggatcgcctcactgtgatggcgccgccgctgctcgtcctcctcctgctgctcctctcgcggtgctcggcggcggcgccacggcgcggcgggggctggtgggaggagggcgagggggagtggaggccgagcgaggaggaagagaagggcaaagacaaagggagggggctgttcctgctgcaccgggtggagaaggtggtagagtcggagggcgggcaggtgcgcgtggtgccggccagccgtggcccgccggcgtccttcgcagcctgccgcgaggggctcatgcacatcggcttcatcaccatggagcccaagacgctgttcgtgccgcagtacctcgactccagcatcactctcttcgtgcagcggggggaagcgaaggttgggtatattcacaaggacgagctcgtggagaggaagctcaagatgggcgacgtcctccacatcgacgccggctccaccttctacatggtcaaccccggcaaaggccagaggctgcagatcatatgcagcgtggacgcctccgatagccttggctttggacctccttatcaggccttcttcctcggcggcgcaggggacccggcgtcggtcattgccggttttgggccgaagacgcttacccgtgccttcaacgtgagatacatgccacctacgacgagttggcgcgtatcctgttgccacgaaccggcggccccatcgtgtactacaccgcggacgcggagccagagagcggtgccgccgaagaggagcgcgggcaggtcgacgggcacgacggtgtgctggacaggggagcgcgacgcgagggcgctggcgcgtgggtgccgggtggcaggggagacggaggcgacgagtgcggcggcagcgatggcgcgcgtgtggcgacgtcgtggtggacgaagctggttaacagggtcgtcggaggggcggctggcggcggcgtcgccgcggaggcgaacaggaaggccaagaagaagggcggcgcgtcggagccgtacaacctatacgacagcgagcccgggttccggaacgcgtacggctggaccgtctccgtcgacaagcaccagtacgagcccctcaagcaccccgacatcggcgtctacctcgtgaacctcaccgcggggtcgatgctggcgccgcacgtgaaccctcgggcgacggagtacggcgtggtgctgggcggggaaggcacggtccaggtggtgttcccgaacgggtccctggcgatgagcgaggtggtgcgccccggcgacgtgttctggatcccgcgctacttccccttctgccaggtggcggcgcgggccgggcccttcgagttcttcggcttcaccacctcggcgcgccgcaaccggccgcagttcctggtcggcgcctcctcggtgctccgtaccatgctagggccggagatcgccgccgcgttcggcgctcgcgaaaaggagttcagtaagctggtgcgtgcgcaacgggaggccctgattatgccgtcctctcctgggaaggaggaggaggagcatgggaagaaagggagggagaaagaggagtcactgccgatggttgtcgagcaggcggcggcggagtgagctgcttgatctttcagtcttggactcttggcttcctcagaagcgcgcgcgccaccggaaagtgtttctactcttgttactgcgccttgtcagtgacgtgttgttggttttttttttcgtggcgccgtctataaataaaagtgctttgtgcgtttacagct

SEQ ID NO: 3388 - DNA, 1248 bp, Zea mays
  Clone ID: 700263636_FLI
cggttcgtcctcgccctcgcgtgctcgcgggcgggcggagcgaggaggcggatcggggagcagagatcccggccggagggatggcgaagggtggcggggagaggggcacgctgctgccggtctcggcggacgacgggaagggcaacgacggagggggaggcggcgacgacgccgtgctgttcaagggttccgccatgacccgccgaggtggcgccgctgcgctctcctacatggcatgctccgtgctgctagtgatgtttaacaaagcagctctttcttcatacaaattcccttgcgcaaatgtcatcacgctccttcagatggtgtgctccacgtgccttctttatgttctgagacggttaaagatcatctccttcacaaatagtgatccatcagtgccttctgattcactattctttgtgccgtttaggttattgttgcgcaccacacctctttccttggcttatttactctacatgctagcttcgatggaatcggtccgtggagttaacgttcctatgtatacaactctacggcgcacaacagtcgtgtttacaatgacaatggagtatttcctggcaaagcagaggcacaccccacctataataggcagtgtggctttgattgtattcggagcatttgttgctggagctcgagacttgtcatttgatgctcgtgggtatgctattgtctttgtggccaacattacgacagctgtttatcttgctaccataaaccgtataggaaaatctagtggccttaatagctttggcctgatgtggtgcaatggtcttgtctgtggaccttcagtactgttcttgacttatattcagggtgacctaaagaggaccatggaatttccataccttcattctcttgggtttcaggttgtgcttctattttcgtgcatcttagcatttctactgaactacaccatcttctggaacacaatcctgaattctgcactcacacaatctatgtgtggcaacttaaaggatttcttcaccgttggaattggttgggtgctatttggtggtcttccttttgatcttcttaatgttatcggacagggactaggctttctgggatctggattgtatgcctactgcaagatcagagggaagtagacggaaattccattcaggggccagtgtgcttaacaaagtagcgttgtttatgctatttgctcctacatatgggagagaaattttgtaggtgtcctatatgtattgaacttcagtcctcatg

SEQ ID NO: 3389 - DNA, 988 bp, Zea mays
  Clone ID: 700263676_FLI
gaggatatctcttacgcttgcggctggtggagggggtaatgaagaacctacaagtgttgatggcctaaaatcacagccaaaagttccatcaaaagaggcaggagttgaacctttacttgatgctgcctgtcaaccatttccaggatcatcgaggttaacttttgaaggcaggcatcttagcttctgctctcccaagcatgaacaatgacagatgtaatggatctaatctaaacccgagaaggattgaaaatatattttctcatcctcgccaaccacggtctgttaggcctcgtttgtgtttgtcattagattctgattcagagtagttcggacatcacactgggatagctgaatttgctattaatctggcaaagttggcttccagaatcttgatttttattgtggagggctatcaagttattctggttgatacaaagagaaacaccagtgtggatgctttattgcattaacctggtaagattcaagtgttctatatgatccaagtgggatctccatagagttcatctaatgctgccgctgtagcgggatgacccaggtttgccgcagatgacccaggtgggactatgcggtggccggcagccccagatttggtgggggatgagataggaggcgtcaaggacgcccacgcgatgccttaaaaacactgcttatgtgaatattgtttcaaaatacgtctgcttgattgtttagcatgaattgagtcgatgttggtacaggatattttctaactgggagtggtttaacgtggctagtggagcaggctgtacattttccctgacatttactgggtataaggaatagggggccatcacttggcacaagacaaatacatgtgaatgttttgtgtgtaccatcattgtatttagggttcgggtgttaatttagatgtttatgaccctgatgtttgatggaaaataaattattccttgatgaagcggcggtcaatgaacagagcccttcggttttc

SEQ ID NO: 3390 - DNA, 954 bp, Zea mays
  Clone ID: 700263726_FLI
cccaaggccaagggtggagagaccaacaccaacaaagacatagggaacgagctaccggaactggacatgaaaatggttaccgttcttaagataaacctgcactgcgacgcctgcagcgaggagatcaaaaggcggatacttaagattacaggcgtggaggaagccatgccgcacctcaagtcttcacaggtggcggtgaagggaaaggtggagccggcaacactggtgggcttcatccacaagtgcacggggaggagagccgccatcatcagggcggagccactggatgatgctctcctgccgcaaccaccaaacccgccggcggcgccaccgtctaaagccgagagcaagaaagatgagccacctgctgagaatccgccggccaaggtggaggacgaggagaacagaggagggggagggaaggacaatgcggatgacgacaaccccaagacggagaagccggctagcgacggccacggcgccgccgaggagcatggagcccatgcaacaaccgaagctccagaccgtgacaacgacgacgacgccggcgatgggctcgtgctggagaaccataccaaggcggcggtggaccgcctgttcgccgttccgacgccggccggcggagtcgtgacggtcgttgcgcctgagatggccctcggcagccgcagctactgctacccggcgtatccttgcgcgcagtattactacccctaccagccgcacctgtacccgccgcagccgtacccggcggcgtctgcttatagccctgttgccatgtatggctatccagccggctatccacccgaagctttcagtgaggagaacccaaatgcatgcaccatcgtgtgacatagtatatttgtagcagtataaaagaagccagtacttatgtatatatatataataatcgagcaatggatatatctatataaactgtataaaatttaatggttc

SEQ ID NO: 3391 - DNA, 1172 bp, Zea mays
  Clone ID: 700263728_FLI
gtctgagctcgccgctttagcgagcgcaagcagagcctgccaaaaggctagagaaaaaaaaatccgccttctcctcccagtcgcaggccaggctcagcctcccctctcccctcctcggcatcttcgccgccggcgatctatctctctcacaatggcggcgcccatgtcagccatcgactcagcgtggcagctcctgatcgccaacttcaccgagttccagctcgccaccgtcgtcaccttcctgctccacgagaccgtcttcttcctctccggcctcccctccctcctcttcgagcgcttcggactcttcgccaagtacaagatccagaagaagagcaacacctctgcttaccaaaacagatgtgtcttgcgcctcattctctaccatgtatgtgtgaacctgcctgtcatgattttctcgtatcctgccttcaaattcatgggtctcaggagctctcttcctttgccacattggtcggttgttgtatctcaagttcttttctactttgtccttgaggattttatattctattgggggcacagggcattgcatacgaaatggctatacaaacacgttcacagcgtccaccatgagtacgccacaccctttggtttaacatcggaatatgcccacccagctgaaattttgttcctgggattcgccacagttgttggtcctgctcttactggccctcatctcttcaccctgtggctgtggatggtgttgagggttttggagacagttgaagctcacagcggctatcacttcccatggagcccatcaaatttcctgccgctgtatggcggctcggacttccatgactaccatcaccgtgtgctgtacacaaagtcagggaactatgcctcaacatttgtttacatggactggttgttcggcacggacaaggattatcgcaaggcaaagaccattgaggagaaagaagggaaaaatctgtagattgtggaagctgctcagcaagactggcgatagagtttcactcatggaaggagatatggatgcaccctagaaacagtcagtttatctcctgaccatcgatactataggttgagatattgatttcctgtgtttgctatgatcaagaatgaggccctggtggccctggtctgtcatgaactgaatttgatgatttgtcatctcctcctggtggttt

SEQ ID NO: 3392 - DNA, 1624 bp, Zea mays
  Clone ID: 700263740_FLI
gcctctcctcaccctcgttcaccacacagtccgccactcctttagtagcttgtgatttgtacgtcgacgagatcactggtcgggtggcggacgacgacacatggggaagggtagtgtgggtgcatcatggtgggcgttcctcctgctcgccggcgtgctgctggtcgtagcagccacggccggggcggaggacggagtggtcgaacgggaccgcaaggaggacctgcggtggggcaagcaggcgtgcgagtggcagtacggaaaggacaccccgcggaagagggaatgcgagagcgagtgccgcgagcggcaccagcaagctgacgcgggcgaggacggcgacagcggcgtggacgcctacgtctcccgctccgggaggggcgagtgccggcgccagtgcctgcgccgccacgagggccagccgtgggagacccaggagtgcatgaggcggtgccgccgccgcggactggccgtcgacatggagcaagagtacggtcgcggcagcgagagcgcgggcaagtgccgggagaggtgcgagcgccaccaccgcggggactggtgggagaggcagcgctgcctgatggactgcaagagccgggagcgggaggaggagggcggcagcggcggccggcgcggcgaggaggaggaggacagcggcgaccgctgcccttgcgagaagcagtgcgagggccaccacgaccgggaaagcaggcagcagtgcgtccaggcttgcgagcgccggcgacagcagcgcggcggcagccgtgactccaacgtcgacgaggacgacagcgaccggcggtgccagatgaaatgccggcgccacagcgatcggcaggcgaggcagtggtgcgtgcagcgctgcgagcgtaagcaacaggaggaggacgccgccgccgacgacgacaacagcggccggtgccagaagagatgccagcaccacagcgatcggcaggcgaggcagtggtgcgtgcagcgctgcgagcgtaagcaacaggaggacgccgccgccgacgacgacgagaacagcgaccggtgccagaaaagatgccagcagcacagcgactggatgaaaaggctgcggtgcatgcaacggtgcgggcgacaggaggagggcggcgcacgcgacgacgctgacgacgacgccagccacggcgaccggtgcgagaagaagtgccagcagcaccaccgcgactacgacaagcagcagcagtgcgtgcgcgactgccgccgcggccgtggctgggaaacggtggccggcgccatccttgaggtggtgtgacgatcgacgacgtgcatggcgtggcgcagagctaataataaaagggtagtgtacgcttaccgcgtacgtacgtgtcaccgggcgtggcactctccagtctccagggacccatccaccaagtgctactgctccttcgtagggagacgtgggaataaagagtggtagctgcatgcgcgtacggcggccatggctctccgatgagagagctagctgtgtacgtgtgttcgtgatgttgttccatgcatgacatgtatacgtcttgcctaagtacgcttgtactagttgagagactgtgtaagtgaaatgtgctataataataaataagtaaagggcgccttctcc

SEQ ID NO: 3393 - DNA, 1597 bp, Zea mays
  Clone ID: 700263765_FLI
ctagccttgctttgtcctcctccgtctcgctctcgctctccgtctccattcccacccaccaccaaacaccaggcccaaaggaccccccgccttcccaactaagagcaccagcgcagcggggagggggaatcagggcagcaagatccgagcagcaggagtggcaagcagcatttgtagccacagctcgctcactcaattgcagctagccgcggttgcggttggactggatcggcggcagggcagggcagggcagggcgcgcggcggtggtggtagttgcagaagtgacggtcaagttttcctcgctccttgcttcggccgagactccgcctgacgctactaccaacatctccacctgaatccatctctatctacctcgcacgaacgaacagagacaggggaggggagggggggaattgaagtgtaacccatcagacccgtccatccatcggtggtggtggtggtggctgctgttactcgctatcaccatctgctgctgcctgctttagtcttttgcttcacttctcttctttctatccttcctccccctgtctgtttgtctgtcttattgccctccctgttcttgttgctgcttgcattgagaaaagagagagagagagacagagagagatagaaagtggttgctagttgtatggtcgtccggtgggcgcgatgaccatggagcacggcgaggattgctgcgtcaaggtggcggtccacgcgcgccccctcatcggcgacgagaagctgcagggctgtaaggactgcgtcgccgtcgtgccgggcaagccgcaggttcagatcggcagccactccttcaccttcgaccatgtctacggcagcacaggcacgccgtcggcggccatgttcgacgagtgcgtggcgccgctggtcgacggcctcttccagggctacaacgctacggtgctggcatacggccagaccggatcagggaagacgtacaccatgggcactgcctgcaaggaggggtcgcatatcgggatcatcccacgagccatggctgcgctgtttgacaaaattgagaacctgaaaacccaagtggagttccagttacgagtatcgttcatcgagattctgaaagaagaggtgagggatctacttgaccccactgctggtaccgtgggcaaagcagagaatggcaatggccacgcaaaactgtctgtgccagggaaaccccctgtgcagatccgagaggcgtcgaatggagtcataacgctagctggatccactgaggtgcatgtcaccactcagaaggaaatggccgcatgcctcgaacaaggttccctcagtcgcgcaactggaagtaccaacatgaacaaccagtcaagtcgttcccatgccatcttcacaatcacattggagcagatgcgcaaaatagaccccatcatgactgcagatggaatgcctattgaagagatgaatgaagactatctctgtgccaaactacacttagtagatcttgctggatcagaacgggctaagagaactggttcagatggcctgcgcttcaaggaaggtgttcacatcaaccgaggacttctcgctctcggcaatgtcataagtgctcttggagatgag

SEQ ID NO: 3394 - DNA, 696 bp, Zea mays
  Clone ID: 700263789_FLI
atatttctttccctttgcttctcaatctgtccccgtttacgggaggcgcgtcgagtgctggacctttagcaatgaatgcgcaaagagatggccagcaagctctccatctataccggcaactgaatatgcaggctaatgctgacgtgtccagtagttcatcatcaccaccgcagctatcaaggagcaagttatacggtctcgcggccgtcgtggagcactacgggaagtgtggaggagggcactacgcagtctacaggagagtcgcgtcgaatcctgaccctgatgatccaggcaaacctgttgcaggccttggcaagcggtggttttacatctcagacggctacgtgtcagaagttccagaggaggatgtactgcgcgcggaggccacgctccttttctacgagagattgtagccgcttgttgagtagctaacgtgtgcatcataacaaaatctaggacagttttgttgtgaggagtctgatgttcttagcggtaccgtgagcttccaagtagacgaggaaactagctgtggcacaaaaaacaaagcctctcggcatctcgacgtggactgcaggcgtgtcttaggcagtgtggcctactttttttttgggtccttgcaaacgttaaaataattcttcatgcaatacgtcagtgaggtcttcctcttgagaataaatcagatcaccattgttttgc

SEQ ID NO: 3395 - DNA, 456 bp, Zea mays
  Clone ID: 700263916_FLI
gcgttccgcccgtcgcggttcgcgccgcccgagggggaggccgcggggctcgacttcaagggcgggtgcttgagttcctgccgttcgggtcgggccgccggtcctgccccgggatggcgctcggcctgtacgcgctggagctcgccgtcgcccagctcgcgcacgccttcaactggtcgctgcccgacggcatcaagccctcggagatggacatgagcgacatcttcggccttactgcgccgcgcgccacgcggctctacgccgtgcctacgccccggctcaactgccccttgtactgacgccgtgcacgtggcgcgcggggactgccactacgcatgcatgcgtttggactttggtgttcatccctggggtggggccgccgtgggggaagttaggagtttggtggctttctagctctgtcttcttgttttctgtttattataaattttctgaacc

SEQ ID NO: 3396 - DNA, 1543 bp, Zea mays
  Clone ID: 700263930_FLI
gcttctgaaaaggcaattgctccaaccactgcaaaatcagaaacaaaacctgcatcatcgctgccacctgttcgacccccagctgctggtgcccctgctccaagggttgaaagcaaaacagaactggagaagaaggataatccacctccatctgcaaaagtcccggaagggacagcagataatgagtttgaaaagcgtattagaccagaagtgatacctgcaaatgagattggagtttcatttgatgatattggtgccttggatgatatcaaagaatcccttcatgagcttgtcatgctgcctctgagacgacctgacctcttcaaaggtggtcttcttaagccctgcagaggtatattactctttggtcctccaggaaccggcaagactatgcttgccaaggctatagccaatgaagctcaagcaagttttataaatgtctctatgtcaactatcacatcaaagtggtttggtgaagatgagaagaatgttcgagcactgttcacgttagctgctaaagtatcaccaaccatcattttcgtcgatgaagttgatagcatgcttgggcagcgtaacagagctggagagcacgaggcaatgaggaagatcaagaatgaatttatgacacactgggatggcctcttgtcaaggtcggaccagagaattcttgttcttgctgcgaccaacaggccttttgatcttgatgaggctattatccgtaggttcgagcgaagaatcatggtaggtctgccatcaatggaaagccgggaactcataatgcggcgacttctgtcaaaggagaaagttgatgaaaggctgaacttcaaggagctagcaaccatgacagaaggatatagtggaagtgatctcaagaacctgtgcacgacggcagcatatcgccctgtgagggagctaatccagaaggaaagaaagaaggagctggagaagctgaagcgtgaaaaaggagaaactccatcggatcttccgaagaaggaagagaccatcaccctaaggccgctgagcatggcagatctgaaggaagcaaagaaccaggtggctgcaagtttcgcttccgaaggtgtctgcatgagcgagctgaggcaatggaacgagttgtatggtgaaggaggctccagaaagaaggaacaattaacatacttcctctgagcaatatgaaaatctatggaccatcacacgcaaaaaatgtatggacattttggaaagtatagtgcacaaaatagtcatgaggaaataggccgaacatgtataagaacatgggaaacggggggagtgttaaaaggacaggctcccagagtgtgtcggaggctcccacaccagtgggcacaagaaatcaggtcataaaagccactttctggtgtaggacaaggaagaagagttttatctccacctaaatcacagtttgcctgtgttgtaagtattagtattacactaaaaatgggtgtatgtataaactggtaggttgtggctactggctagcagctaaaggttcaggtagcagtttttaatcatttttcatgttacc

SEQ ID NO: 3397 - DNA, 2367 bp, Zea mays
  Clone ID: 700263953_FLI
caattggtatgttcagaggatggtgatcagctcgcgatgcgtcttatttctgcactcatggagtactatattggcccagagggcagaggaactgttgaagaaatcagtactaaattgagggagggttgccctagttacttcaatgagtcagactacaaatattacttggcagtggaatgccttgagagagcatctatgactaataatgctgatgagagagatattcttgctagagatgctttcaacctcttgactaaaattccagactctgctgatttgagtgccatatgcaagagatttgagaacctaagattttatgaggctgtagtccgattgcctctgcagaaagctcaagcacttgactccaatgctgatattatcaatggtcaaatagacccaaggcatcatgatacaataatgttgcagcgtgaacaatgctataggattgttatggatgcgctgtgcactctcaagggtgttgggcatagtcgaatgcaaagtgcagacaagtcatctgctctagcaactgctgctgatccagcttctcgaagcaagtatatcaaacaaatcatacaacttagtgtccaatggccggacacagttttccatgagcatctatacaggacacttattgagcttggtctagaaaatgagcttttagagtatggtggatctgatttggtttcttttctgcagagtgctggccgtaagcatcaagaagaggttcgggcagtttcttcagttacacctggagctgctaagatgcatgatttaggtgcacctatctcgactagtcaaacaaagtatctcgagctcctagctaggtactatgtccgcaagggggaacatattgctgctgccaggatgttgttaatattggcagagagacagtgctctaattctgaagaagctccagctcttgacaagcggtatgaatatctcagagatgcagtgcttcaggccaaaagcgcaggcatcgctgctgatttgtccaaaaatcctgttgatagcagcacagtggatttgcttgaaggaaaacttgtcgtgctacgcttccaaattcaaattaaagaagaattggagctcatggttgcacggctcgaaaatattccaagcagttctgaattacctaatgttccgttccctcgtgacaacattcttgctaatgcagagactgctaaggctgctaaggataaggcaaaagaactatcattaaatctcaagagtatcactcaactgtataacgattatgctgttccatttgatctctgggaggtttgcttggaaatgctgagctttgctaattactctggagacgctgatagcaaaattgttcgagaagtttgggctagactccttgatcaggcacttactaaagggggtgttgcagaagcttgttctgttgtgaaaagagtaggctcgaaacttgatcctgcagatggagcttgtttacctttagatatcatatgccttcaccttgagaaggctgcagtggatagattaagttcaggagaagaattagttggtgatgatgatgttgcaagagctcttcttggtgcctgtaaaggtcttcctggacctgtactttctgtgtatgatcacctgttatcgaacggtgcaatcataccctcactaaatctgaagttgcgcctgctgcgatcagttctagcaatcctccgtgagtgggggatatctgtcattgcacacaggctaggcaccacaagtgctggggcttcattctttcttgatggaacattctcattgaaccaaacagggactgcgaatcaaggtgctcgagataaaataattagtttggcgaacaggtacatgactgaggtgaggcgattaaaccttccacagaaccaaacggagaatgtctaccgtggtttccgtgaacttgaggagaaattactatcttcttattaggcagattgcagtcattcctcaagatagtgaagaatgatcttgcatctgttgtaccacaaaaccaaggaatagagtcgagggcttctggattcacctcagcatgatctgtattgttccttacacttatctgcaagaaccttctggattcacctcagcatgatctgtattgttccttacacttatctgcaagaacccggggctgctgcaggactctagctgaggtggttagatggctctagtaccactcatgtgatcatgtcctggctgagttggttagatggctctaatagcacttctgatgtcctgggtttgacttctaggtaaagatctagatctggtctatagggagcggattctcttgctgcatgggaggcagttttcgtgacttggtcgtactccgattgagcttcttaatataataacgggggacagtcttttctc

SEQ ID NO: 3398 - DNA, 1893 bp, Zea mays
  Clone ID: 700263992_FLI
cacagcagttggcgcgcaccaaaaccctaccctccctctgctctcagccgccaacgccatgggctccaccgccgctgcctccgtgctcccggtgtccgccggctccggcgagaacctcgtcctcatcctcgactacggctcgcagtacacgcacctcatcacccgccgcgtgcgccagctcggcgtcctctccctctgcgtgtccggcacggcgccgctcgcctccctggagggcctccgcccacgcgccgtcatcctctccggcgggccccactcagtccacgcccccggggcgcccgccttccccgagggattcctgggcttcgcggctgccgcgggcgcgcacgtgctcggcgtctgctatgggatgcagctcctcgtgcagtcccttggaggcgccgttgtgtccggggagcgccaggagtacgggaaaatggacgttgaggtgacggcggcctcctccgcgctctacgggcaggcggagaccgggaagcgccagacggtgtggatgagccatggcgacgaggtggttaggctgccggaagggttcgaggtggttgctcgcagcgtgcagggagccgtcgcggccattgagaaccgggagaatcgcttttatgggctccaataccaccccgaggttacacatccagcccaaggaatggaaacactgcgccgctttctctttgatgtttgtgggatcaaagctgattggaagatgcaagatgtgctcgatgaagaaatcaagaccatccaaagcacggttggccctgacgagcatgttatctgtgcattgtcaggtggtgttgattcaacggtcgccgccactctcgttcacaaggcgataggagataggcttcactgtgtttttgttgataatggtctattaaggtacaaggagggagagcgagtaatgacaacctttgaaagtgatttgcacctgccagtgacatgtgttgatgcctcagagcaatttctcagcaagttaaagggtgtcgaagacccagagaagaaaagaaagatcattggcagggaattcatagctgtctttgatgactttgctcacaagctggaacagaagataggaaaaaggcccgaatatttagttcaagggactttgtaccctgatgtaattgaatcatgcccacctcctgggagtggaaggacacattcccacaccatcaaaagccatcacaacgtaggtggccttccaaaagatatgaaattaaaacttattgaaccactcaagctcctattcaaggacgaggtgcggaagttggggggtattttgaatgtcccagattcatttttgaagcgacacccatttcctgggcctggtcttgcagtacgtgtcctaggtgatgttacacaaggcaatgctttggaggttcttcgtcaggtggacgagatatttgttcagtctattaaagacgcaggcctgtatgataaaatttggcaagcttttgctgtgttcttgccagtacagacagttggagttcagggtgaccagcgaacccactccaatgccgttgttttaagggcaatcaccagtgaggatggcatgactgcagattggtactattttgagcatgcattcctggtagatgtggtaaacaagatttgcaacaatgtgcgtggcatcaaccgcgtttgccaggacatcacatctaagccgcctgcaacggtggagtgggagtaggaggatgggagggaccctatggtctggtctgtctgtctgtcttgggttaaaacccgctatgtcatgtcactgctctcaacacgttgcatggatgtcacaaatagcaagcagttaagagtgaccattcgtcagtcaatacattaggtttatcatgaattgtttgttacttaatacaaggactgcattgcatggattgt

SEQ ID NO: 3399 - DNA, 546 bp, Zea mays
  Clone ID: 700264018_FLI
gtgtatttgtgtgcgagtgtggcggagagaaagatctcaggtttttggatggagaagaagcgaggccagtgcgacgctcgctatgtgctcgacgtacgctagctgatcacgtgaggcggagttcaagagccgagttgatctcaagatgatgaaatgatgaactactccgacaaacgatgttgacgaatcgacctaatgagagatggacctatcaagtgccgagatgaatatggtcaccaagtggtcgtcaattaacaacactaacgtagtgttatcccaggttatatttttgttctgttgtggatggtgctaagtgccggtgggctcggccttcttatataagtatatcccatctttagcttctttattgaggactgtcacttaagctagcatgtattttaaaacttataaatgttttatacattcaaattgtaatatttttgaatcaaattctcttgtaatcactccaatgatatattgtaatatagtataacttgtaaatgttgtaacttgtaatcattttgtaataaagaatttatttccgct

SEQ ID NO: 3400 - DNA, 841 bp, Zea mays
  Clone ID: 700264033_FLI
cgagtgaacaaagagacgggggcacagtagtagaccgcggaatccgatctaaccctaaacccgaatcccaaacggaggagggcactcggcgaggcaggtggcgattctgcgattctcctgtcaccttccgtcgtctccatccccttccatttccggcgagggtcaaagcaggcctcttgctcttgggggtggtttgagagagggagagaacatggccgcggcggcggtgttggtggtgctcacggtgtcagcgctggcgggggcagcggccggcggtgatatcgtccaccacgatgacgaggcacccaagatccctggatgctccaacgattttatcctggtaaaagtgcaaagctgggtcaatggcaaagagggtggcgagtttgttggcgtcggtgctcggtttggtccaaaaatcgtctccaaggagaagcacgcaaaccgaactaaactcacgctggcagaccctatggactgctgctctcctccgaaacataaggtgggtattatccaactagtgatgaaagtgggtaaccgaattgttaggataaatttaatattttaaaatagatatgtatgaaattcgatattgaccttttcctatgttatcaatcacattactacaagaataaaattttgcataaaattgttttatgcattatttactccctacaacaacaaaaaagtgtaaaagtatatgtatccgtatccgaattttatatctatcgtttgagaagatatataataaatttgagatttaccttttatgaatgtttacaagctcaatgctaaaaacaagaatacaaatttgtatagcatattatatattctatttattcac

SEQ ID NO: 3401 - DNA, 1162 bp, Zea mays
  Clone ID: 700264043_FLI
gagttgcgggggtaaaagaaaaaaaatctagatccttctctcgttcaagcccacagaatccaccaagccacggcgtcaccgccagcgctactgccatctcggggaaggaaccgaaccgacccctgaaaagaattcggtgcgtcggaaggaagagcaaccctgcggtggtggagcgaggacccgggttgagggatgtggtgggagtgggagggcgacggtggtgaggcgccgcgggaggagactcctgtggacttcgatttcatcgccctcctcgccaagcccaaggtaacgcgcgagcgcgacggagacgctagccccgccgccgttgtcccctcgatcctgccacggtgccactcgagctgcctgtattttagagaccatgtcacggaaaatcgagttccactttttctcattctcgcgcctagggttgtttggtatcgtgttctatgctaattgcgcatctgtgtttgcaggattactacaagatactggaagtagattactatgcgtctgaggagacgatcaggtccagctatatccgccttgcactgaaatggcaccctgacaagaagcaggggcagggcgaagagaattcaacctccaaatttcaggaaattaacgaggcataccaagttctgagtaatccagcaaaaaggcaagagtatgacaaaaaaggcattctatacgttcaagatcagaatgtagtggattacctgaaccggcacaaggggctaatacttacgtgcaatggtcttggtataaggtactcagtatggtgaacacgctcaagggcccacagtttgcactcatctgcagtcttggagaatctgtaatgtatgccatcaaaatttattttcatcccttgtgtgccatagaatggcatatatggatttttgtgtgtatgacaggtggggccagtggggatgaaaataatttctgatgacatacagggaagcctttgatctgaaaatggtatagtgcagcagtgccatgtttgaaagccaaatattgaccacttgagttcatcctacaaggctacaacagagttgatttttatttgtcgatcagctgttgttgaatgaaagaggcagatatgttcctgctgctccttgtatgtaacatactgttcctaaccatgcaatgtaagcgtttgtttctgtct

SEQ ID NO: 3402 - DNA, 2360 bp, Zea mays
  Clone ID: 700264066_FLI
cttggccgtcgagcgccccagctccttcctctccctctcgattctctgttgaccggtgctctgctcgaatttccgcccgccaagctcccagccgagctcttgcgctgggtttctctccctggtgtgctcgcccgtaccgcactcctgctcgaacagcgcccaacctgcttgccaaggctcttcccctcggcgtcgatctccctgcgcgtccccggcctcagcccctctgttcttcgttcctgctcagccgctccctcccctccttccctgctcaaccagctcggttccatggcagcgcgcagctcccctttgctcgcccagccgtcgagtttccccacgcgcaatctcctgcagccatggcgcccggccggaatttcccgtctagttcgcgtcctgctcggtgttcctttgctcgtcgcgctggagctcccatcgccgtgcgcagcttcttctctggtggccacgcgcccttccagctcgccacggcgctcagtcctgtccatctcgccgtgttcggatttagagcagcacactccctgcgtgtcgcgccttcctagttccctgaacacgcgagttcttttactagcgctgttcccggtgtcgcgcgccgtgcagtagcacgccctttgccaaactcgtggtcacggtctcgccttgctgccacagccacgcctactgccgcgctcggtcttcgtctctgtcgcacgcgcgaattttcttcgcttggtcttaattcccgtcgcatcttcgacctcgccaaatgcgttcatcgtttggtcctgtgtcgttaggatcgttgaccgtgtttgctaccgctagggatgaaaacggtttcggaatttttcggaattccggataccgatttcgaaatttttcgatcggattcatcggtaacggtatttttcgaaaacggaatcggttttcggaattttctatcggaatcggtatcggaatcggcgtggagttttaccgaccgtttccatcggttaccggtttttgtcggaaattaccggatttatgtctcggaaatttccggaattgtgtctcggaattttttcggaattttccagcatgtgatttttcgcatcgcctgtacatctctggaaaaggattacttatttttgtattttttggacgctttaagattttttgggggttagatggtgttggaaggcagttgagattaacgattttgtctctcgaacgaatccaccattttctatgcacatgttatgtattagtaatatataatgatagagagccgaccgtctgtcttttccacacactagattttagggtttttctgttaggctgtcaaaaacccctttatgtgagaaaaaaaatatttcatgagtaagcatgtcatgtcaactaaatcgagtggatattgtgaattgtgaactttgagtatgtgaacttgtgatctttatgaacttgttataatgtgaacttgttatattatgaacttgtgatctttgtaaactttttatattataaatttgtgatccttgtgaacttgttatatcatgaattgtgaacttgtggtatttgtgatgttttgtcaattttgctttattgtgaagtttgatatgtttaccgatcgtattttagatttcgaccgttaccggcgtattttccgcacggaactttcgtttccgatgtttccgaaataccgatatcgtttccgtttccggagttaccgttttcgattttgtttccgataaaaaatatgaaaacggtaatggttttggtgtttaccgaccgtttccgaccgttttcatccctagctaccgcgtgcgcttgttccttaggagcatcgcgcaatagatgggtctcacgcgcgtggtttgaagctatgcgcgttcgtcgtgccgcgtcgtgtgctgatattctctcccagcagactttgccgtcgaccatattcaagtaattgttcggcctcgcatcccacctattcaataaaccatccaaatccatagactgtcgacgcactgctgccttacgcggctgtctctgtcacttgcgtcagcccgccagatctacagctccatatacgtcactctcgtatcgtcgtcgagcccgtcgaacctcgttcttccatgctcgatcttgtcgaaccctgaatcccagactttagacaaaaataagcgaggtccctgtgcatcgcttatcaagtactcggtcgaagacttcaatcgaagatcatcgttgaccccgcaacttcagctcgagttaattatggtaagttgatttattattcctgtcgactaaataaatggtaggattaaatagaagaattcattgcgatgattctcttgtttattactcgatgtagagattaagttgaattttagggttat

SEQ ID NO: 3403 - DNA, 536 bp, Zea mays
  Clone ID: 700264101_FLI
agtaacgaacggcaggtgtattggatagagtaccactaccagagtacaaaaggagcgaaaacatacagcccaaaacacaacgggaggctactagtttaacaagtttatttattatcgctcatcgaccatgcacggacgccacagtagggggcggcacgtaggggcgggcgcgcgccacggcatcacatgatcacatcttcccctggcgatgcacgcaggacgagccggcgcaaccctccacgcacttctcgacgcactggtccacccgctccgccgcacgctgctgcatcagccggtccttctcctcgaagtacaccgacgccgccttctccgccgcgcgttccttcgccgcgcgctcgtcctcgccgcccagccggacgtcgacgtgctgaccttggcccagcgtcagcttctccttgatcgcgcccgtcacgttccccagcgcccccagcagaccttgtccctgttccctatcagtgtcgtgagtgctggccgtctccctagccttgtcagcggcggtctgtgctgtggctcgg

SEQ ID NO: 3404 - DNA, 748 bp, Zea mays
  Clone ID: 700264117_FLI
gtggctgcatgtgccttgaataagtgcggactacctcttgaagcactagaatgcttgtctactaactcgagcatagatggcaaggatagcataatcgcacatggtgatggagaccacaagattttttatggaatactgagccctgtctctgcttctaagaattggctgtcttcatctgtcattagtggcattgagtccaaccttaaactaactatggcttcaaaatatctatctagccttctgagaaagcactcactctgttcacaattgaacgcaccattatctgaagaaaaggtccttaatgagtacaacaatcatcaaattgaaaaactgacgtgtgatattacaacagtaatctcaatatttgataaaaggttctccctcaaatttgctgatatagctgagaagatcctaatcttttgtagccatgatggtttattgtttctagcgtatgttttgttatggggtactaggtcaccagatgttgcaactgataattatattcttgaatgtcaccctctctgcccaattgattatctgttattgttttcattcaaagagagctgcaagttttttagtcgatatgttgtcctctcctccatgtgttctgttctgaatatggaggacaccaattctactgcatgggcacttaaagagagacataagtacattgtaataagtttgtcaaattacctgaatgtcagcaggttacttcttaaacatgacaaaagtggaaattatattctgg

SEQ ID NO: 3405 - DNA, 1444 bp, Zea mays
  Clone ID: 700264138_FLI
cttcactgccgcgccgccctcctcccttctccctgctccttcccatggtgcgcagggcgtcctcccctcgatttcctccgtgcctccttccagtcagcgacgaacgaggttctaggcggccacgtcgttgtccggcacctcgtctgtgtttttctctgtgccacggtcgagctcgccgcgtccctttgtttgagtccgtcaacctccatctcgccccgagctccttccatggctgtcgtcgcctccaagcctggggtattgccgagctcgcccagcccttccccatcacacgccggcggtcctccattcccagccacgccgctctctgctcactggtgctcgcccctgccctctgtctagcgccctccctgctccacctcttcccatggccgcctgcagctctcgtcctccctcaagccctagtcgagcttttctatggcgccctggatgccagcccctttactcgatgcccctactaggttcctggcatgttcgccgagccatcgcccaagctcagcttatccatggcgcagggaacaacaacccctttctgttgatggcatgctgcagccccctccatcacgctatctcctgttctccatttttgctgcagcaagtggacgcccccagccctccattatttgcccatcttccccatggtgccagcagcatgccaacggttcaacgataggtgcagcagtctgcgcgtcgtcaatctcctcacatcaggtcgtgtccctctctgtccttgcatgttctagtttcatttcactttgttgtccatgtcgtgacgcttgtgttatctctggtttatttttgtgtatggtgaggaagagaattctaggaaaaatcgatgaagaaaacatgtttcagttcggtgcgctctaggtgtttgacgaaatgggagcaccagggaacaatcgtcgttcttgcataaaccaagtcgatttgactgtggtacgctacatgatcacgtgatacggaattcaagaactgagttgatctcaagatgatgaaatgatgagctactccgacaaatgatgtctgtgaatcaacctaatgagaggtggaccgatcaagtgccaagatgaatatggtcgtcaaatgatcgtcatctaaccaacactaacctagtgttatcccagacaagccccggtgcatttgccacctcattctgttttaaaaagttttatcaccttgaatgatgcattaggtgataggagttgtgatcaaacagttgatgcatttccttccttgattagacaaccctaatacccgttttatgaaaatttagtgatgcttagcccttcttattaatttaggatttgtttttttaaaagatgatatgtaacacgggataagggagtttgtgaaataaaatgacttgtgatgatgaagccgttgtggccgcgatgatttcatcattcaggtagggtacctctct

SEQ ID NO: 3406 - DNA, 1459 bp, Zea mays
  Clone ID: 700264172_FLI
taggaaggcaccaagagaaaagagcggtggcctgcttcttttgtcgtttggggcgtcgtcattccaatctcacgcgatcacatccggccttcgttggtgcgcagacgacgacgacgacgacgtgcccagtgcgcggccggccggggattcatatcgaatcggatcggaggggaagcaggagcccacagggggcggctagcgctgtctcaattcaaggagctgaggacgacctgtccgtcaggagctgatcgagaaacggagggacggttccacagtttcagtccagctagctagctagctagaagatcccattcgctgacagatgggttcctacatccaaggagatggtgaggtccctgtgtacgagtcgggcgccgaggtgcttgagaaggtgcaagagaaatgggcggcggcggcggcggcatcgcggcctcctccctacccggccatgtactcgagcgtgttcggcggcatcatcctggacccggccatgatggttctccccatcgacgaccacatggtccaccggggccacggcgtgttcgacacagccatgatcctggacggcgccctgtacgagctggacgcgcacctggaccgcttcctccggtcggccgcggcggcgcgcgtgggcacggccccgttcccgcgcgaggcgctgcggcgcatcctgatccagatgaccgccgcctcgggctgccgcatgggctccatccgctactggctcagctccgggcccggcgacttcctgctgtcctccaggggctgcccgtcgccggcgttctacggcgtggtgatcgcgtcggagtacgagcagtgcggggtggacggcaccggggtgcgcgcggtcacggccacggtgcccatgaagccgccgcagttcgcgaccgtgaagaacgtgaactaccttcccaacgtgctgtccatcatggacgccgaggaccgcggcgccttcgcgtccgtgtgggtggacgaccaagggtacgtggccgagggccccatggtgaacgtggcgttcgtgacgcccgagcgggagctcgtgctcccggccttcgacaagatcctcagcgggtgcacggccaagaggatgctcgcgctggcgcctcgcctcgtggacgccggcctgctcgcgggcgtcagcaccagggacatcacggccgaggacgccaagcgcagcgccgagatggcgttcgtcggaagcggcctccccgtgctgcccgtcgtcgagtgggacggcaaacccatcggagacgggaaggttgggaagctgatgccggcgctgtctgatctgctgtgggaggacatgaagtccggtcccgacaggatccccgttccatacaagcagtagcctgaagcgaaggcgaagccaagacatgtctgtcagtctgtgtgtgcgtgtgtgtgtgtttgcagtcgaatggtgattgccttgcctgaataaaaataaacctctctctgt

SEQ ID NO: 3407 - DNA, 804 bp, Zea mays
  Clone ID: 700264177_FLI
attgttattacatcttcatatttacacagtacagccatgagaattagcacagacaagagacaacgcagcagaggatctcgagctgaagcggagcccagatccagaaactgcgcgagacgaacaccaaagcaaactgcatcgattcaagaaagggaactctttttttcgtgcctatttttccccctgtgccaagatgtgacactgactgagcagccgtcggtggatgaacggatctggtccttcagcgcggctgctggatggggcgggggctcaccctggcggcggcggccaccctccgcggcgccttctccgcgtacctcggggtctccggcggcccaccgtgcgccctccaccacctgtcgatgccccacgccgccacctcaagccctcggcccgccctcctgcccgcggcgtcctcccgctcgctctcgtagcgcggggccggaggcgagaagaagtcgtcggggaggaagctgtcgacgtcgtcgtccaggtcgtcctcggcgtcgagtaggccgagcgcgccgtactcgcgcagccagcggtcgcggaaggccggggaggcggacaccaggcgccaccactcgggggagaagtcctccacctcctgctccggcgtcgcctccacggtccgcaggccgcggtaccgcgccccggaaggcacgaagggctccgcccaggggttcagcctcccgccgctgccgctcacaaccgccatcggcttcttcttgtcctccctcctgcttcgcacgctctcacgctctcagctgctgctgctgtactcactgtcgcgctgtggtctgg

SEQ ID NO: 3408 - DNA, 1321 bp, Zea mays
  Clone ID: 700264190_FLI
cggttgagcgagaagccgagaagcaggtgtgccgcggaagccttcttctccagttctaataacgcttggccctctccttaaccttaagcagcagccccccgtggcccgggccaggaccaaccaacagacccgccgcgcgcccgcctacacccgtgacgcctcgccgagaaccacgcgcgatccgcccggtcgacgaggggcatctcgctatctcgtcctcctgggcgcttgggagaacggcaaccgccagccggccgagccaaggccaagccatggtggagtccagtggccaccggagcaccgtccccgcggccgtcggcttcttcagggtcccgggcctcttcgtgaggctgagcggcaagggcggagcgagcaatgccgtggacccggaggactcggtctggagcccgacctccccgctggacctgaagcacgtcatcaggtgcagcccgccgagggcctgcctcggcctcgccgacgccctcaccgccgacgggaccggttccctgcactcagggggcaggagctcgttcgtcgactccatcaagccgttcctcgagcgggcgctgcccaaggcggcgtgcgggaaggaggctgctgctgctgcctcctcgtcggccggcgtcgtcgccgcaaccctgggcaaacaggcgagcgagtacgccgactgcgaggagtacacttgcgtcatctcgcgcggggccgacccgaggaccacgcacatcctcgccggcgagacggtggaggtgcgcaggggcgacgtaggtggtggctgcaggaaggtggttttcatcatcgagccgttggcattgagcgaccggcagccgcgcgcgtcttcgtcttcgtcgccggcggcacccgctagagtcgtcgcgtccggccgttgctgctgctgcatgaagaggctgctggaggaccgggacatcttcatctacctgggcgagaaggccttctgcagcgacgagtgcaggaacgggttcatcgaggaggcggcggaggaggagctcatgattctggatcctggtcgaaatctttgatcaagatttgttagctgccgtggcaaaagtagagaatgtaatatttgcccgcaatattttgcttctgccttcaacttggggactacttggctgggagagtgagtgggggaaggacaaaggaaattgcctctcgttcaagtttttgcggtaaggagaggtcgtcccggtttggccaaccagtgcaacggccgagccagccaatttctgtagtttgttgagcttcatttttttttgctactgtcagattagctcttcgccatcaatatattactactgttttgttt

SEQ ID NO: 3409 - DNA, 941 bp, Zea mays
  Clone ID: 700264220_FLI
cacctcctcttctcgtcgagcggataacagaaccgatgtgcaagctccggccggagcgtcaggataagaaccgcgcgccggcaggcagctgctcctgcgactgcgagcgcccgtccaatggcgtccctctccccttccctccacctcccttgcaattcaagaactggcttccttggaaagacacgtgggattcgtccttgtgttttccctgctggaagagttggatttgtcagaacagtagtggaatgcaaggaatctagaattggaaagcagcccatcgaagttccatcaaatgttactctcacattagaagagcagtttgtcaaagctaagggtccgctgggggagttatctctgagctttccaggtgacttgaagatcgtgaaagaagaatccggtaacctgagagtttataagactgcagagaccaagagggcgaaccagatgcacggacttttcagaacgttgacagacaacatcatcgtcggtgtgtcaaaaggattcgacaagaagcttcagttagtaggtgtcgggtaccgtgcggcggtggagggcaacgatctcgtgatgaacctgggattctcccaccctgttcggatggccattcccgaaggcctggcggtcaaggtggaagagaacacaaggatcatcgtgagcggctacgacaagagcgcgatcggtcagttcgctgctaccataaagaagtggaggccacctgagccatacaaggggaagggtatcagatacatggatgaagttgtcagaaggaaggaaggaaaagctgggaagaagaaatagaagtgtttgttttttgtttgtcctttccatgcttcatttcattttcccgctgtaacggtcctcgtctgctatgaccgaacccgagaaaaaaagtattgttctgtggctgtgctgatcatgccatatttatgtgcaccttgagc

SEQ ID NO: 3410 - DNA, 1522 bp, Zea mays
  Clone ID: 700264242_FLI
taccattagcagtagccacagccagaacaccagcagacagcagcatcagcagggaggaacacgatgagcggcgccggtccggatctgcagctgccaccggggttccggttccacccgacggacgaggagctggtgatgcactacctctgccgccgctgcgccggcctgcccatcgccgtccccatcatcgccgagatcgacctctacaagttcgacccatggcagctcccaaggatggcgctgtacggcgagaaggagtggtacttcttctccccgcgggaccgcaagtacccgaacgggtccaggcccaaccgcgccgccggggctgggtactggaaggccaccggcgctgacaagcccgtgggcacgcccaagccgctggccatcaagaaggcgctcgtcttctacgccggcaaggcgcccaagggcgagaagaccaactggatcatgcacgagtaccgcctcgccgacgtcgaccgctcggcgcgcaagaagaacagcctcaggttggatgactgggtcctgtgccgcatctacaacaagaagggcggcgggctggagaaggcggcggcgccggcggccggcggcgaccacaagcctgtgttcgccacggcggcggtgagctccccgccggagcagaagccgttcgtggcggcggcgggcgggctgcccccggcgttcccggagctggcggcgtactacgaccggccgtcggactcgatgccgcggctgcacgcggactactccagctgctcggagcaggtgctgtccccggagcagctggcgtgcgaccgggaggtgcagagccagcccaagatcagcgagtgggagcggaccttcgcctccgaccccgtgaaccccgcgggctccatgctcgaccccgtcgtcggccacgccggcggcgacccgctgctgcaggacatcctcatgtactggggcaagccgttctagacgacaccgcccatcatgtcctgaggggaggtgggggtggcgaagcatcctcggctgcggttggttggttgattgatctgtcttgggcagcgcaatgcaatgcaaccgcacggtgtgggctttgactcaggcgagccgccattgttgacttgcaaggaggatataatatgaaactatagctggattacatggagaggcggcaatgagaccgtctggccccgccggaagggagacggagacggagacggatggcgcagtgcatcgggtgtggtggatcgtgcgcggcatgtgtgtgtgtggctgtacatatacatactgtacatgattggttcagtgcagggtttctgttccttcattgattagttattatactaataagtactagtaattttgtaagggcttgtagttgcagtctccgtactggtggtaggtagtgcaggccatattcgtcatcgccaagcttcgagtgtacttactcctacaatatatattttacagtatatattgtagctgtgttggctcttccggaaaaaaaatggaaggggaaaatagggattatgttattttgatt

SEQ ID NO: 3411 - DNA, 2374 bp, Zea mays
  Clone ID: 700264271_FLI
gcgctgctcaactgtgacctaattggcttccacacttttgattacgccaggcacttcctctcgtgctgcagtaggatgctgggaattgaataccagtcaaagcgtgggtacattgaattggattactttggccgcactgtcgggatcaaaatcatgccagtgggagttcatatgggtcaattggagtcgggtctgcgcttgcctgataaggaatggaggctttctgagcttcaacggcagtttcaggggaaaactgtcttgcttggtgtggatgatatggatatctttaaggggatcaatttgaagcttctcgcctttgagaacatgttgaggacacatcccaagtggcaggggagagcagtgttagtgcagattgctaacccagcccgtggaaggggtaaagatctggaagccatccaggctgagattgaggagagctgccagcggatcaatggagactttggccagtcagggtatagccctgttgttttcatcggccgtgatgtgtcaagtgttgagaagatcgcctattatacgatagcggaatgtgtggtggtcactgctgtgagggatgggatgaacttgacaccgtatgaatacgttgtctgtaggcagggtgcaccaggatctcagtcggtatcagaggtgagtgggccaaagaagagcatgctggttgtgtcagagtttattggctgctcaccgtcactgagcggtgctattagggttaacccatggaatatagaggcaaccgcagaggcgatgaatgaggccatttcaatgccagaacaggaaaaacagttgaggcatgagaaacattaccgttatgtcaggagccatgacgtcgcttattggtcaaagagcttcatcatagacttggaaagggtttgtaaggatcacttcaagaggacttgttggggcatagggttgggttttggtttcagggtggtggccttggaccctcatttcacaaagcttaacatggattcaatcattaatgcttatgagctttcagagagcagggctatattgctcgattatgatggaactctggttccccaaacttccctcaacaaggaacctagtccacaggttttgagcatcatcaataccctttgctcagatagtagaaacatcgtttttcttgtcagtggtcgagacaaagataccttgggaaagtggttctcctcatgtccaagattggggattgcagctgaacatggttacttcttgaggtggtctagagaagaagagtggcaaacatgcactcaggcattggacttcggatggatgcaaatggcgaagccagtgatgaatttatatacagaagcaactgatggatcctacattgaggccaaggaaagtgccttggtgtggcaccatcaggatgctgacctaggctttggatcctcacaggcaaaggagatgcttgatcacctggaaagtgtactagcaaatgaaccagtctctgtcaagagtggccagttcattgttgaagtcaaaccacagggaataagcaagggaatagttgccgagaggatacttgcatcagtgaaggagagaggaaagcaggctgatttcttattgtgcatcggcgatgataggtctgatgaggacatgtttgaaaatattgctgatatcattgggaggaatttggttgctccaagaacagcactgtttgcgtgcactgtgggacaaaaaccaagcaaagccaaattctacctggatgatacattcgaagtggtcactatgctgagcgcactggcagatgccacaggtcctgaactggagactgattcggctgatgaatctgtcgcatatatctcatcacttgatattggtgacgaacaatcagaatccagtgataaaccagttgaagggtcttagccagttttctcttgcgttttcagaacatgatgattgtttcaatagtcaattctattctacacaattttctgatgggaactcgacgactaacaactggttctacgaatgctccagagggaagcttctcaatctgctgtgctccaagttctccagttgggcaagatagtacagtctgttgctccaaggcgtagatccatatgttcatagctgacttacttggcacgttctttcactttctcattcctggttgaattaaaatgaaaacctcacagaagacaaagggagcgctgtttggctcattggctgaagtaatctggggggaggtataggagtggcgtatgtgaaaggagcctgtgcgcaggttgtgatatgattccttattaacacgacgttacaaagtggtgtcacttcttgaactaccagtagtaacaatcctaagagtgaggttcgaactgattaattaattgcttcaaagccggatcttggcttc

SEQ ID NO: 3412 - DNA, 1116 bp, Zea mays
  Clone ID: 700264276_FLI
cgctaatcgctacccttcgcctttgctgtgctgctgcgtgactgcgtctcgtgtcaggctgtcagctagctttgggggcggggcagtggggccctacggccggccatggccgccgcggcgaacacacctcagcgtcaccggccgtggcagctggtggtcccagcgagagcgagcgcgagcgcgagcgcgagccgccgcactagccggccagccgcagcagcaggagtgggggctggcggtgcgccgaacgcatggacgtggatgccaccgccacctgcagctcggcggacagtgagggccaaggccggtgcggccgaggcgcggccgtcgtcgccgccggacgccgtgacctacagcgcgagcatctccacggacacgcccctccacgaaccccccggggtctccttcgacgagtacatccaggaccgcgcgcgcgtgttccgcgccatgttccccgacgagagcaggagccagcgggtcggcgacggggaatggcaggtccacatgctgccgctgcagttcctcctcctcaccgtgcgccccgtcgtcgtcatgcagctgcggcaccgcgccggcgggctcgacctccgagtcacggagtgggagctgagggggctggacgtcagctacgcgccatccagcttcgacctcggcgtgagcgggtcgctgtacgccgaccggagcaggagccgcgggtgccggatgaggggccacctggagatcgccatcacctgcgtcctgccgccgcccctgcgcctcgtgccagagaccgtcctgcgcggcgtcgccgaatcggtacctagctctcgccaggcatccaaaatacgtagtcctcgtccggttccttgaaaactggagcccagtaacgcagtgcaggtcctgtcgacgctggcggagaagatgaagcgggacgtggacgtcggcctcgtcgccgacttcaggaggtttcgccgggagaaggcagcagcgtccagggccacgccgacgctgggcgcgacggcatcggacagagacgaagcctctgagtctgaatcctagcgtggtgtgtgtggacagtggactgcagcttcccttggcttgtacacagagagtagtgaacatgattcatttacatct

SEQ ID NO: 3413 - DNA, 1246 bp, Zea mays
  Clone ID: 700264277_FLI
acagaatccaaactccgcttaacatccctttcattgcatggcctcctagactatactgccaaggatatagaggagtcagtatttgagctttctttgtttgctgagtcattcagtgaaatgcttcaacacagaatgggttgtgttatcctgtcttttcttgagaaattgcacaggcgatatgttgtgaagaggaatcagcgtaagcgccaaagagaggaagatctaaagaaagaagagaaatcttcagagaagcggtctaagactactcatgagactactaaaactgaaagtgttgataatccaggaggcagctttaaaatgacaaaagagggtgaagaaaagatgagcacagatcaatctgcaaatgtccatgctgaactgtcaaaagagggtcagataaaacttggcaccgatcatccaattgctaaccatggagaaccagcaaaagggggtgatgaaaatatggaggaagatcctgaatacgaggaagatcctgaagaagtagaagtatatgaagatgacgaggacatggatgatgctcacgctgaagaacagattgcagaacagaatgagaacacaaacgacagagagattaagccaaaagaagtagcgacaacagatggtggaaataacaaaagtacaagacagcctgaagtagaaaatgttactaatatccatgaaagagctgcttcaatggaagaaaagcagtccgtgccagagataggagatttggtgggaggtggagaaaaggtagttagtaaagagattaagccagcaaaagatgaggtgatcgacaaggacctattgcaggccttcaggtactttgacataaatggagcaggatatctcaaggttgatgatttaaaatgtattcttcacaacatggggaagtttttatcaagcagggacgtgaaggacttggttcaaattgctcttgttgagagcaattctgcaagggacaatcgcataatctatcctaagcttgtgaagattgttgacctgtaatctggcactgcttggcccgcgtcagtccccttgaagttaaccatgctatgatcgttgagaagtcagttatgagaaactattttgtttacttattaatgggttcactgccatttttgtggctacctgtttctacgattatgctacaagcagctgcttttcgtttcgatgaatgttttttgtggaattataagtcatgaacttaatcgatgttgcctcatttcgtaaaagaggtgtttgtgtc

SEQ ID NO: 3414 - DNA, 576 bp, Zea mays
  Clone ID: 700264278_FLI
gaggagggaggccagcttgccgctagggttagggtttcgggcgggagggacagaggcggggctgcagccatggcgctcaagttcctgaacaagaagggatggcacacggggtccctccgcaacatcgagcgggtatggaaggcggagcaggcggaggaggcggagcgccgcaagacggaggagctcaagaagcaggtcgcggccgagagggagaaggccgagttccgggccatgcaggagcgcgccggcctcaggccggcgcaggagaggctcgacttcctctacgagtcggggttggccgtcggcaagagctccgaagggttccaggcgctgcagcaatctgcaccgggggcagctgccgcgtccacttctgcacaggcgagtgcggctgattcttccaaggcagctacaccgggagctttatttgaggataaaccccaatctgcaaatgatacatggagaaaactccactctgatcctctactcctaataaggcagcgggagcaggatgcgatttcaaggattaaaaacaatccaatcaagatggccgagataaagaaatctgttgaagctgag

SEQ ID NO: 3415 - DNA, 2001 bp, Zea mays
  Clone ID: 700264357_FLI
acctaacacacccgagcatatcacagtgacagacacgatggtgagcgccagaattgttgtcctcctcgccaccctcctatgcgctgccgccgcagtcgcgtcgtcctgggaggacgacaaccaccaccaccacgggggccacaagtccgggcaatgcgtgcggcggtgcgaggaccggccctggcaccagcgcccccggtgcctggagcagtgcagggaggaggagcgggagaagcggcaagagcggagcaggcacgaggccgacgaccgcagcggcgagggctcgtcggaggatgagcgagagcaggagaaggagaaacagaaggaccggcggccgtacgtgttcgaccggcgcagctttcgtcgcgtggtccggagcgagcaggggtccctgagggtgctccggcccttcgacgaggtgtccaggctcctccgcggcatccgggactaccgcgtggcggtcctggaggcgaacccgcgctcgttcgtggtgcccagccacaccgacgcgcactgcatctgctacgtggcggaaggcgagggagtggtgacgacgatcgagaacggcgagaggcggtcatacaccatcaagcaaggccacgtcttcgtggcgccggccggggcggtcacctacctggccaacaccgacggccggaagaaactggtcatcgccaagatcctccataccatctccgtgcctggcgagttccagttcttcttcggccccggcgggaggaacccggaatcgttcctgtcgagcttcagcaagagcatccagagagctgcatacaagacctcgagcgaccgtctggagaggctgttcgggaggcatgggcaggacaaggggatcatcgtgcgcgccacggaggagcagacccgcgagctgcggcgccacgcctcggagggcggccacggcccgcactggcccctgccgccgttcggcgagtcgcgcggcccctacagcctcctggaccagcggcccagcatcgccaaccagcacgggcagctctacgaggccgacgcgcgcagcttccacgacctcgccgagcacgacgtcagcgtctccttcgccaacatcaccgcggggtccatgagcgcgccattgttcaacacccgttcgttcaagatcgcctacgtgccgaacggcaagggctacgccgagatcgtgtgcccgcaccgccagtcgcagggcggcgagagcgagcgcgagcgcgacaagggcaggaggagcgaagaagaagaagaagaatcgtctgaggagcaggaggaggccgggcaggggtaccacaccatccgggcgcggctgtcaccgggcacggcgttcgtggtgcccgcgggccacccgttcgtcgcggtggcgtcccgggacagcaacctccagatcgtgtgcttcgaggtccacgccgacaggaacgagaaggtgttcctggccggcgccgacaacgtgctgcagaagctcgaccgggtcgccaaggcgctgtcattcgcctccaaggcggaggaggtggacgaggtgctcggctcgcggcgcgagaaggggttccttcctggccccaaggagagcggcggccacgaggagcgggagcaagaggaggaggaggaacgcgaagaacgccacggcggccgtggggagagggaacgccacggacgtgaggagcgggagaaagaggaggaggaacgcgaaggacgccacggccgcgggcgccgcgaggaggtggcggagacgctcatgaggatggttaccgccaggatgtgaggccgccgcgctcgccaaaacgagcaagaagcaacaagagggtggcgcgcgaccgacgtgcgtacgtagcatgagcctgagtggagacgttggacgtgtatgtatatacctctctgcgtgttaactatgtacgtaagcggcaggcagtgcaataagtgtggctctgtagtatgtacgtgcggatacgatgctgtatgctactgaggcaagtcccataaataaataatgacacgtgcgtgttctat

SEQ ID NO: 3416 - DNA, 3157 bp, Zea mays
  Clone ID: 700264360_FLI
cctggctcctctccttcctgcttggtttttgctttcagctcttgaaccgaatccactgccgcggcgcttagcattggggactagggggccgacatggctgccttaggggcgaagatggagcgtctgtcgtcgatcgacgcgcagctgcggatgctggtgccggggaaggtttcggaggacgataagctcatcgagtacgacgctctcctcctcgatcggttcctcgacatccttcaggacctccatggcgacgacctcaaggaaatggttcaagaatgctatgaggtagctgctgagtatgaaacaaaacatgacttgcaaaagcttgatgaactcgggaagatgataacaagcttggatcctggggactctatcgtgattgctaagtctttctcgcacatgcttaacttggccaacttggctgaggaagtccagatagcctacaggaggagaatcaagctcaagaagggagactttgctgatgagaactcggcaatcacagaatctgacattgaggaaacacttaagaggcttgttgttgacctgaagaagtcacctgctgaggtatttgatgccctcaagagccagactgttgatctggttttgactgcacatccaacacagtctgtgaggaggtcactgctccagaaacactcgaggatacgcaactgtttggttcaactctactcaaaagatatcactccggatgataagcaggaacttgatgaggctctgcaaagagagatccaagctgcctttagaactgatgagatccgaagaacacagcccactccccaagatgaaatgcgtgctggtatgagctacttccacgaaacaatttggaagggtgttccaaagttcttgcgccgggttgatactgcattgaagaacattgggattaacgagcgtgttccttacaatgcacctcttattcaattctcttcttggatggggggagatcgtgatggaaatccaagagtgacaccagaggttaccagggatgtctgcttgcttgccagaatgatggcatcaaacttgtactgctctcagattgaggatctcatgtttgagttgtctatgtggcgatgcagtgatgaactgcgcatgcgagctgatgtgctgcatctctccactaagaaggatgccaaacattacatagagttttggaagaaggttcctccaaatgagccatatcgggtgatactgagtgatgtcagggataaactgtacaacactcgtgaacggtcacgagagcttttatccagtgggcattctgatattcctgaggaagctacattgacaaatgttgagcagctgttggagcccttggaactatgttacagatcactctgtgcttgtggtgactctgtaattgctgatggaacccttctggatttcttgcgtcaagtgtccacctttggactctcccttgtgaggcttgacattaggcaagagtcagataggcatactgatgtccttgatgccatcactacatacctggggataggatcttaccgtgaatggactgaagaacgccgccaagaatggttactgtctgaacttaatggcaagcgccctctgtttggctcagaccttcccaagactgaggaaatttctgatgttctagacacattccatgttattgctgagcttccctctgacaattttggtgcgtatatcatttccatggcgacagctccgtcggacgtccttgctgttgaactcctccaacgtgagtgtcatgtgaaaacaccacttagagtagtcccgctgtttgagaagttggccgatcttgaggctgccccggctgcattggccagactgttctcaatagattggtacagacagaggatcaatggcaagcaggaggtcatgattgggtattcagactcgggcaaagatgctggtcgcctctcagcagcttggcagctatacaaagctcaggaggagctcatcaaggttgctaaggactttggtgtgaagttaacgatgttccatggacgtggtgggactgttggaaggggtggtggtcccactcaccttgccatcttgtcccagccaccagacacgatccacggatcactcagggtcactgtgcaaggtgaagtcattgaacagtcatttggtgaggagcacttgtgctttaggacactgcaacgtttcacggctgctaccctggagcatggcatgcacccaccaaatgcaccaaagccagaatggcgagcccttcttgatgagatggcagttgtggcaactgaggaatatcggtccattgtcttcaaagagccacgctttgtcgagtatttccgccttgcaacccctgaaacagagtatggtaggatgaacataggaagcaggccatccaagagaaagccgagcggaggtatcgactcactccgagcaatcccatggatctttgcttggacacaaacgcggttccacctcccggtctggctaggatttggagccgcattcaagaatgtcctccagaaggacatcaggaacctccacatgctccaggaaatgtacaatgagtggccatttttcagggtgactattgatctggtggagatggtgttcgccaagggtaatcctggcattgccgcactgtatgacaaactcctcgtttcagaggaactgcatccattgggtgagaagctgagggccaactatgaggaaacccagaagcttctacttcaggttgctgggcacagggatcttctggaaggtgacctctacctgaagcagcggctccgcctgcgtgatgcgtacatcaccaccctgaacgtctgccaggcctacaccctgaagcggatccgtgacccggactaccatgtcgcgctgcgcccccacctctccaaggagatcatggactcgaccaaggctgcggcggagctggtgaagctgaaccctggcagcgaatacgcaccggggctggaggacaccctcatcctgaccatgaagggcatagcagccggcctccagaacaccggttaaaccacgaagaggggatcttttttctcctcctgatcattggctctaggtccttcgtattttcgcggattgtaacttcggccacctctctacaccgtgaggaaataatggtggtttctgcaaaagtggtggtaaataaaagggcgacaactatcttgttttt

SEQ ID NO: 3417 - DNA, 2364 bp, Zea mays
  Clone ID: 700264410_FLI
gatcgtcccattatcccgggttcccatcgaaccgcatctgagtatctgaccacgtcacacgacaccaccaccagccctccccttcatcaattggagcacggcgcccgttcattcccctctgctccgctgcttgcctccggctccccaattccacgagatctccaattccaccgcgtcgtctctgcatccggaccccataccccgatcgatccctaaggcccatggttttctccgccgccgcgtcgcctctagtagccaccgctgctgactctgcttcctccctgcgtcgcccacctccgctgctgctgtcgcgttagttgctgccgttgttgaagacgcgtagctctttagggttcgcgatttctcgctgatcggttcgagaattggtaagctatggatctctcgcggcccacatcgtcggacctctcgctcgggctccactctcacggtcacgcccacgcccacgctcgcaggcacgcggtagccgcgccgctgcgcttgttcgacgacgcggaggagccgaagccggagcgcgtcgtggccggagaggccgacgcggagagggatgacgaggacgggggcgaccagcacttctccctcctcgggcactccctcttcgtcaagcgcccgcgccgcgccggcaacggcggcgggggcggagagacgtcatcctgctcgtccacgtccgcggcgcttcgccctgccaagcgacaggcgacgggggagggcagcggcgcagatctggagacccgccgcgccgcggtccgcgcctggggcaatcagtcgctggcggaggccgacccggacgtgcactcgctgatggagcaggagttggaccgccaggtgcgaggcatcgagctcatagcgtcggaaaacttcgtctgccgcgcggtgctcgatgcactcggcagccacctcactaacaagtactccgagggggccccgggtgctcgctactacggcgggaatcagcacatcgacgccatcgaacggctctgccatgagcgcgctctcaccgccttcggtctcgaccctgcctgctggggcgtcaacgtgcagccctactcgtgcacgtctgccaacttggctgtctacactgggctccttcaacccaaggaccgcatcatggggctggagccaccgtcgggcggccatgttagccatggttactacacgcccagtggcaagaaggtgtcaggtgcctctattttcttcgagagcatgtcgtacaaggtgaacccacagactgggtatattgattacgacaagcttgaagaaagagcaatggatttccaccctaaaattctcatctgtggtgggagctcttaccccagagagtgggactttgcacggatgagattgattgctgataagtgtggtgcggtgcttctttgcgacatggcacatatcagtgggcttgtcgcagcaaaggaatgccgtagccctttcgactactgtgatgttgttacgtcaactactcacaagaatcttaggggccctagaggtggtataatattcttcaggaaagggaaaaatttaaggaaacgagctggatctttttctcaaggagatgagaatgaatatgacttcgaggataggataaattttggtgttttcccttcaatgcaaggagggccccataataatcatattgctggcttggctataactctgaagcaggtagcaacttctgaatataaagcatacattcaacaagtcaagaaaaatgctcaggctttggcatcagctttgatcagaagaaaatgcagattggttacaggtggcacagataatcacttggtactttgggacctcagaactcttggcttgactggcaagatcttcgagaaggtttgtgaggcatgccacatatctgtcaacaagacaccaatttatggagataatggctcgatatcgccaggtggtgtgcggattggaacacctgcaatgactactagaggttgcttagaagaggacttcgaggtgattgcagacttcctcataagggctactcaaattgctaacaatgttctgaaagaacatggcaaagtgcaaaaggagtttctaagaggcctacagaacaataatgatgttatagaactccgaaatcaggttgaggcatttgcgtcacagtttgcgatgccaggttttgatgtatgaatgtgcatatatacgtagtcagcaactttcagattcacagcaacattgccatcccttccgttactccgatactagcaactattgctttcaactgcacaatgattagggagttttttttaatttgatggtagacggtctagatggttgattcaaacaattatgtacagcaagttgtgatgaattatgtatgcagtgaaccttggt

SEQ ID NO: 3418 - DNA, 287 bp, Zea mays
  Clone ID: 700264441_FLI
aattgatatatgtgtactttttaaaggtattttatggttatttaaatgtagctgcgtctgctcgttgaggtgtggatctttcctcaacacggtgaggtcatccgtttgactgctagcctaggcgtgctgtcccggatggatggtggttcaaatccaccaagattctttagtagtcggaacttattgctcaccaaagaacttaccattgctttaggatgttttatttttgtatataggcttagccggttagggcctgtttggatcagtttataagaaactgttttttg

SEQ ID NO: 3419 - DNA, 1906 bp, Zea mays
  Clone ID: 700264458_FLI
caccggtctttctcacacaacacagggatataagctcagtccacgagatctcccgtagaccagtggcgagggaaggaacgaaacagagcccgatcctagcgacaggccagggaagatcgccatgatgatgatgggcgaaggcgtgagcgtgccgccgtggtcccaccacgtccccgtgagcggcgtcgacgccggcgtcggcggcgacgagatgacgccgtacctgctggcggcgctgcggcagtacctgccgtgcaacgacgccggcgccgccgaggcggacgacgaggaggcggcggccatggccgcgggcgtggacggctacggctgcgacgagttccgcatgtacgagttcaaggtccggcggtgcgcccgcgcgcgcagccacgactggaccgagtgccccttcgcgcacccgggggagaaggcgcggcggcgcgacccgcgcaggtaccactactcgggcgccgcctgcccggacttccgcaagggcgggtgcaggcgcggcgacgcctgcgacttcgcgcacggcgtcttcgagtgctggctccacccggcgcgctaccgcacccagccctgcaaggacggcacggcctgccgccgccgcgtctgcttcttcgcgcacaccccggaccagctgcgggtgctcccgcccacgccgcagcagtctagcgccagccccaggggcgccggcgcgctgcccgagtcctacgacggctccccgctgcgtcgccaggcgttcgagagctacctcaccaagagcatcgtgtcctcgtcgccgacaagcacactcctctcgccgcccaagacgcccccgtcggagtcgccgccgctgtcgccggacgggaccgccgccgccttccgccgcgggtcctggccgggcgccgggtcccccgtcaacgacgtcctggcctcgctccgccagctccgcctcggcacggccagctcgtccccgtccggcgggtggggcggctacccggcgtccgcggctgcctacgggtcgcccacagcgggcggcctctacagcctgccctccaccccgagggccacgccgacagccctcgccaccgccaccgcctccgcctccggctacatgcccaacctggagccgcttgacgtcagcttcggcggcgacgaggagcccgtggagagggtggagtccgggcgggccctccgcgccaaggtgttcgagcggctcagcagggagggcgctgtttcctgctacccagctgccggaaccggtggccccgacgtcgggtgggtctccgacctcatcaactgaggcggcttcggcggcgggtcggtgctgcatagcagtggagaaaaggtggtggtaactggtaagccgtaacagagaaggatggcataaaaaaatgttcccctttggttccagataattccgctaattaccctgtacatagatatctatcgccctgtgaatattctcggctggttgggtggagggttgatgctagggggtggatttgttttggggttcttgaggtagcggaaaatttccaaggaaaagaaaatatgtaagcaagtgtagatgtcgtaggcggcggcggcggtggtttgtgccctcttgtgtgctgcgaagcatggcgagggcggacggtgacgacgaagactggccggatttccagctttggtgttcctgtgattccgcagcaagttcagtttgatgttgtttcaagttcatccgtcgtctgtgcactatgcatccggctagttggcgattgcaacctgcttgtggattactacccccattttgttgttgatgttgatgtaatctgtttattaagacccagcattcccctacagcttattttgttgtacttactatatatctttagtaggtgccgaaatctcagttcacccgctattggaggtgaatttgccgtgt

SEQ ID NO: 3420 - DNA, 2448 bp, Zea mays
  Clone ID: 700264466_FLI
ggctagccggcgcacggaagcgggcagcggagcggaggtgagcctctcctgcgtcggattgtccccgcccccgcccccgctaggcgccatgaagctgacggtgaagaccctcaagggaacgcacttcgagatccgggtgcagcccaacgacacgattatggctgtgaagaagaatattgaagagatacaagggaaagacagctatccatggggccaacaactgctgattttcaatggaaaggtcttgaaagatgaaagtacattggaagagaataaagtcaatgaggatgggtttctagttgtcatgcttagtaagggtaaaacatctggttcaactggaacttcatcttcccagcactcaaacactcctgcaacaaggcaggcacctcctctagaggccccacaacaagctcctcaacccccggtggcaccaattacaacttctcagcctgaaggacttcctgcacaggcacctaacacacatgacaatgcggcatcaaatcttctgtctggaaggaatgttgacacaataattaaccagctaatggagatgggtgggggcagttgggacaaagataaagtccaaagggctctccgtgccgcttacaacaaccccgaacgtgctgttgaatacctctactctggtattccagtaacagctgaaattgctgttccaattggtggtcaaggggcaaacacaactgatcgagctcctactggggaagctggtctctctgggattccaaacaccgctccactagatcttttcccgcagcagggggcttccaatgctggaagtggtgctggtggtggaccacttgattttcttagaaacaatccacaggttctcattttcatttttgccatttaagattttttggggtaattctattattacccctgcatacaaaaatatagtattagagaatacggtgcccatagtagtatgctgtagaagcgtcatctagcacacttgttttctcattaattttatgttaacatattgtgcaaggttggaccttatcccattgtggtgtgagcatgagctttgtaaaagtttaatgaaccttttgtttggaatgaaagcccaaatatatgtccatctaaccttctcctaattacaccaaataaaaaaccaaaataactccaacacaactttttacttcattcttccatgtatacccctacttaaatgcacaccgatgattgatgtgcaccatggtcattgtacccctcaggccctcaccttaattttagccccagctccgaatcaacttatatttgggattggcggggtgagattacatcgatttaacctcactgttctaattatgaattaatagcttatcaattattttgcagtttcaagcagttcgggaaatggtccatacaaatccacaaattttgcaggttttgtattctttgttttggcttacattctatggcttcttatgtagcacctgcctgaactttttgctggtaccatgttatagcctatgctcgttgagttgagcaagcagaatcctcaaattctaaggttgattgaggagaatcatgatgagtttcttcagttactaaatgagccctttgaaggcggagagggggatttcttagaccaacctgaggaggatgaaatgcctcacgccattagtgttacaccagaggagcaggaggccattggacggcttgagtccatggggttcgacagagcacgcgttatcgaagcattcttagcctgcgataggaacgaggagctagcagcaaactatctccttgagcatgctggtgaggaagattaagcgggagtagttttcatacggtgagaactctgctatcctctggttggttaccctccttaacatatatggcaagtggctcactgtggggtgatttcctttttttttcttcttttgaaccttgtctctcgtcgacatctgaccgacattgatcaagattttttttagtaccgagtgacgaagagttgatatggagctgacgatcatttgaattgatttcgttgtgcaagacttgtattacataaacatttaaatacatgtagctgaacatttcagtagaaatgctacggttgtggtctcccatcgttgactttcattagcgtggtggtaaacatcggttctgctcctgtcctgtattcatcggacgcaagtataacacaagcttggcttgggaggaggaagcacaaggagctattgccacctagcaaaaggataaaagggaggatgacgaattggcgatgtgtttgtgacacgctgccctcaagtgtggatgatgagtgcagatatgttggtgactgtgccaaggctgtcaagtgtgtaaacgaacgctgccttcgtagttctgacaactgcgactgttctgtagctaaacctatttgctatctttatgataaagttatctaaatgggacggtccttgaccgattaattgc

SEQ ID NO: 3421 - DNA, 977 bp, Zea mays
  Clone ID: 700264467_FLI
gagggagacttccatgcagcgctcaacttcgcggctgttatggaggcaccggtgatcttcttctgccgcaacaatggctgggccatcagcactccgactactgaacaattcagaagtgatggagttgtcatccgtggccaggcttatgggatccgtggcatccgagtagatggcaatgatgctcttgctgtgtacagcgcaatccatgctgcccgagaaatggctgtaactgaaggaagaccaattttagttgaggcactgacttaccgagtcggccatcactcgacatccgatgattcgaccaagtacaggccagttgatgagattgagcattggcgaacagcgagggatccgatttccagatacagaaaatgggttcagggtaatgactggtggtctgatgctgaagaatctgagctcaggagcagagtgagaaaagagcttctccaagccatccaggttgcagaaagaatgccaaaaccaccagttactgagcttttcactgatgtttacgacaagatcccttccaacctgcatgaacaagagcaattgctgcgggatacaatcatgaggcaccctgcagactacccaactgatgtacctgttggggtcgtgcttcggtatgccgaaggtctcacacgaagaagcagcttcggccaaagtcgtttctaagagatggccgaaggtcccttttcatggagcttcggcgttttaaaccgacatagaggcagaatgacctttttatacatgtatgtccgagtcaatgttgtaaacttccgcaaggggcataattgtaatttgtcacaggctgcgacctgtgtctataaatagatgaacagtacctctgtactgttcacgcgaacttgcttttggccttcgcatcacattcgtactttttgccttccgcaagatcgaaggtacatttgtacttcaaagtcatttatattcattaatacaagtagagataactccatgat

SEQ ID NO: 3422 - DNA, 1838 bp, Zea mays
  Clone ID: 700264481_FLI
caggcgcatcggcctcgccgctgcacaacgccggagacgagacgacggcggctgcgggatgacggtcttccacttcctcaactgcgccttcctcaccttcggccctcacgtcgtctactactccgccacgcccctgtaccccctccccctttcactgcttcccctctctctctgtctccgtgagatccgtatgctaaacacgcgggatctgtgtttgctacttgatctggtcgctctgttgcgtgatctgcaccggagagtccgaacgccttgacccggcttgtgggatggggttgtagtcagtgcaactgcagtgggtttcgctcactcaagttggcaggcaaacttacgttgcacagttcgttgggattcggagcttagtttgagtagattaaggttttccatccgaatctagctagcagagctgcaatttggggtggtgttttacgagctgtacctgccaagtaagctcacttcaatcgtacgttttttttttgttgtgggttcggagggtattgctggatccgtattgtcagtcaagactagagagtaaccacatgataattatgaaattgttaagtgcattctggagtggaagagattacattgaaagtacattcatgtaaataacaggccgaaaattgaattacattagatggtcgctagtatagtattctttctgtagctttcaggctgtggtgacgtgcctttagtttttagttacacaaagggctgaatatctcatttctcatctaaggcaattatcgcatccagttcaactaaaccctacttttctttgactgtcgtctacccataacccatggaacatgtagactagttcatgggttcttggcattgtatacctagctgaccaagttttatctgaacatacaataaaaaaagtgttctgcatttaaaggttccttggactgaacatttttatccaatcaactgtttcaggtcagagtatgatacaatcggcacttctataaaagcagctgctgtttatcttggaactgcgcttgtaaagcttgtttgcttggcaacattgctcaaagtacctgagaatgatagctttgacccctatcaggagttaatgaaagtttttattggattcatagatgtagctggactgtattttgctttgacccagctgacccacagaaacatctctcagaatcataagttccaggctgttggtcttggttgggcttttgctgattcagttttgcaccgactggcacctctctggattggggcaagagggcttgaatttacatgggagtacatatttcaaggacttgaagcgaatgctaatcttgtgatgaccctctcccttgctgcattggggtccttgatgtggcttaggaagaacaagcctaggactttggttccaataatttatgcatgtgctctgctcttggcaacaatgccatctatcaccagctacttgaggaggtcattggagtggcagacaccaaaggtggttggcttcgagctcttctcctcccttgttatggctttcatcagctggcagctgttctcggcttgtcagagaccgatgtaacaagacatccataccactgccaattttacgtgcaatttgaagctcctgcagatgctcctgagtacgtcagaagaattaggaagatcctttgaactttgagctacaactcttcttcttggcgttcggttacagaacattttacttagaacatctgttgtaacttgtgagctgtagagcagaaacacatgcctgaaatgagttattctataacagatgctcatgtaggcgtttgatctgaaacatttgtttattattattgcggtgtgcattt

SEQ ID NO: 3423 - DNA, 1702 bp, Zea mays
  Clone ID: 700264501_FLI
ctccctctctctcctccggcccccttttttatcgcccgatctcacacattttggaaggagagagagagaggcagagggagagattggagggaggcccctgcccaaggcaagagaaaccgcggcgcgcggagagggaggaagggcagacgcagacgcagacgggcgaacaagatgagggagatcatcagcatccacatcggccaggccgggatccaggtcggcaacgcctgctgggagctctactgcctcgagcacggcatcgagcacgatggcaccatgcccagtgattcctcggttggcgtcgcacatgatgccttcaacacgttcttcagcgagactggttccggcaagcatgtgcccagggccatcttcgtcgaccttgagcccactgtcatcgacgaggttcgcactggctcgtaccgccagctcttccacccagagcagctcatctcggggaaggaggatgcagctaacaactttgcccgtggccactacacggttgggaaggagattgtcgatctatgcctggaccgtgtgcgcaagcttgcagacaactgcactgggctgcagggattcttggtgttcaatgctgttggtggtggtactggctctggacttggttcactgctgttggagcgcctttcagttgattatggcaagaagtctaagcttggtttcaccatttatccttccccacaggtgtcaacagctgttgtagagccatacaacagtgtcctctcgacccactccttgctcgagcacactgatgttgcagtcctcctggacaacgaggctatctatgacatatgcaggaggtcccttgacatcgaaaggccaacctataccaacttgaacaggctgatctcacagatcatatcatcacttaccacctccctgaggtttgatggggctatcaatgtggatgttactgagttccagaccaaccttgttccatacccacgtattcatttcatgctttcctcatatgcccctgtaatatctgctgagaaggcctaccatgagcagctctctgtgcctgaaatcaccaatgctgtatttgagccctcaagcatgatggccaagtgtgacccaaggcacggaaagtacatggcttgctgcttgatgtaccgcggtgatgttgttcctaaggatgtcaacgctgcagttgcaaccatcaagaccaagagaactgtccagtttgtggactggtgccccactggattcaagtgtggcatcaactatcagccaccctctgttgtccctggaggtgacctggcaaaggtccagcgtgccgtgtgcatgatcagcaacaacaccgccgttgccgaggtgttctcacgcatcgaccacaagtttgaccttatgtacgccaagcgcgcattcgttcactggtatgtcggtgagggtatggaagagggtgagttctcagaagcccgtgaggacttggctgctcttgagaaggactatgaggaagtcggtgcagagggtgccgatgacgagggtgacgagggagacgactattgagtagctggctaataagtagttctctggtggttaatggttgggttattttgagtatatactctatggttccactccattggatactgctgctgtgtgtgtttccattttgtactatgtagtaaattgttcgtagccccctattggccatgattgttcatatcatccttctttggtttgc

SEQ ID NO: 3424 - DNA, 1791 bp, Zea mays
  Clone ID: 700264585_FLI
atttgattctcctccagacaggtttgcaagactggaaagggacacaccatctccagatgggagagtatcccctgaaaggtttgcaagactggaaagggataccccgcctccagacgagggtatatctcgtccaggtgaaagttcacatgtccattctgagacgatggagatggagccagaatatcgcgccaatgatgatacaccacctccagacgggaggatgtctcctccagttgaaagttcacatgtccattctaagaagatggaggcacaatatcgtgccaaagatgttggtgagttagctcgttttgaaagcccacaggtaagacatcggtcccgatcttctgaaaaacatgaccccagccgcaaaagaacctcttcaggggagttgtctccacatgcacgtcagaattctcctgtagaaaggaaaagacggagagagtctcgacatggtgatgggtcacctcgacagaaatctgcatctccccgaagaagatctacaccccctcgaagaagatctatatcccctcgaagatcctcacacaagaggagggaatcaccaagaaggggagactcacctaggaggaggcactcacctaggaggagggagtcaccaaggaagagagactcaccaaggaggagagactcaccaaggaggagggattcaccaaagaggaggagggactccccaaggaggagggataggtcaaaatcaaggtcaccttcaagaaaacatgatacttctagacataaaaaagaacatgacagatctcggtccaggtctccccactcaagggatcatcacagacgatctccaagaaggcattcaccaagacgcagatcacccccagccagtcatcgccatcattcaccaagaagacattggtcaccacctgccaacaggaagactggattgggtaagcctggaaagaatctcttcattgcaggatttagctatgccaccactgagcgagatttggagaagaaattttgcaagtttggacgtgtaacaagtgcacgtgttgttcgtgataaacgaactggagattcccgtggctttggattcttatccttggataaggatgaggatgctgatgcagcaatccgtgcttgtgacgagactgagtggaatggaaggatcattcttgtggagaagtcaaaggcacctgcatggtgaatcttccgctttgggggcgcacacgccattgttcgagagggatttaattgcttcacctttcacagattttaccattcagaaaaaaagaaactaccggtatgacatactcggtacatgtcaaagttcacccgaacctggcttttgatgctgtactaggagtaagagtattaaataatgcacttccttgctgatagttgttgaaagaataagatgtaacgttgcaccttagcttgtttcagggccctgctgctgataagagggacttacgacttagtggtacttttagtgtctgcaacctctacacgtgaaatgtgatacgtgcctgttcgtgagctgtcagttctcttcttcaccttcgtctcgcgcccactgaatactgatggcatgaacggattccgggagactcaagctttatggtgttgttgcgactcaagggttatgttagcagttcaataatctgcatattagcttttcaatgttgtgcatcctctgaatgagggtttggaaaatgtcctatatagtttgtgttttggattccagatgttgtttaattatggtcacgacacgacacctatgccccatctgttgactgttggtgatgtttttttcctgat

SEQ ID NO: 3425 - DNA, 1184 bp, Zea mays
  Clone ID: 700264636_FLI
ggtagttgctgctgtgctgttcccccccgtctgtccctgagaggcccgcggcgtctccgcttcgcctcaccacccaccacctcctcctcgccggtacccctcgccggagccagcgagcttccggcgaagaaatccggcgggcacaccacacgggggcggagcaggggggaaggggtccggcgccggaatgggggcaagcggccgggtgctcaacgccgtcgtcgctggtgtcgcgtcgctctagggttaggtaggtgtccgtagctttctccttcgctccccctccctcccctttgccgcccggcgtcgcattggggtcccgtgccgaccgccaggccgcgtgatccacccgtgctcgagctcggagaggctcccggttgcgtggcatggggccatctcttccgcctgctgccgctgactgggaattcggcaccatttcttcgctctgaggagtagtaggtggcagcagtcgccgatctggatgccatctcaagtcatggatccgaggcgccacctctcccagttcagcaatccaaccgtggctgcgtcctccttctctgaggagcagtttcgccttcccacagagaggcaggtcggattttggaagcaggagtcgctgcatcacattggaagcaagtcagttgcatcttctccaattgaaaagccccaacccattgggacaaaaactgtgggtcgggtagaaccacaaccatacaagctgagagaccagaagactgcatttagccttgagcacaagacttttggtcaagagagacatgttaacctaccaccatctctgtggagagctgatcaagaccctaacctccaatctgatccatctttatttcccgatggaaggaggactagtccaaatgaggcctacaacgagaatgggcttttctcaagctccctatcagaaatttttgacagaaaattgggactgagatccatggatgtgcgtctacgccagccagttcaaaaggttgatctaactcatgtagatgatgagccctttgagttaacagaggaaatcgaggcgcaaataataggaaacatacttcctgatgatgatgacctactatcagatgttcttgatgttgggtacacagcccatgctaacatgggtgatgatgtcgatgatgatatattctacactggaggcgggatggaactggaaaccgatg

SEQ ID NO: 3426 - DNA, 1724 bp, Zea mays
  Clone ID: 700264640_FLI
gcaaggtagctaatcctctgtcgctcgatctttgtccttgaggtgctcgatgagataggcagtggttcaaagctgtgctctgttgcctccccgtgcctgaagtgattcggtcttctgtttgcgattaattttcaatctcacctccaaccatgggtaaagagaagtcccacatcaacattgtggttattggccatgtcgactctggcaagtcgaccaccacaggacaccttatctacaagcttggaggcattgacaagcgtgtgatcgagaggttcgagaaggaggctgctgaaatgaacaagcggtccttcaagtacgcgtgggtgctcgacaagctcaaggctgagcgtgagagaggtatcaccattgatatcgctctgtggaagtttgagaccaccaagtactactgcacggtcattgatgcccctggacaccgtgacttcatcaagaacatgatcactggtacctcccaggctgactgtgctgtccttatcattgactccaccactggtggttttgaggctggtatctccaaggatggccagacccgtgaacatgctctccttgcgttcacccttggagtgaagcagatgatttgctgctgcaacaagatggatgcaaccactcccaaatactccaaggcacgttatgaagagattgtgaaggaagtctcatcctacctcaagaaagttgggtacaaccctgataagattgcctttgttcccatttctggttttgagggcgacaacatgattgagaggtccaccaaccttgactggtacaaaggcccaaccctgcttgaggctcttgaccagatcaccgagcccaagaggccttcagacaagcccctgcgtctgcccctccaggatgtgtacaagattggtggtattggaactgtaccggttggtcgtgtggagactggtgtcatcaagcctggtatggtagtcacctttggtccaactggcctgactaccgaggtgaagtctgttgagatgcaccacgaggcacttcaggaggctcttccgggtgacaatgttggcttcaacgtgaagaatgttgctgtcaaggatctcaagcgtgggtttgtggcctccaactccaaggatgaccctgccaaggaggctgccagcttcacctcccaggtcatcatcatgaaccaccctgggcagattggcaacggctatgcccctgtgctggactgccacacctcccacatcgctgtcaagtttgctgagctcattaccaagatcgacaggcgctctggcaaggagcttgagaaggagccaaagttcctgaagaacggtgatgctggtatggtgaagatgatacccaccaagcccatggtggtggagacattctcagcgtatcctccccttggtaggtttgctgtccgtgacatgaggcagacggttgctgttggagttatcaagagtgtggagaagaaggacccaaccggcgccaaggtgaccaaggctgctgccaagaagaaatgatgcgatcctgcgcctgctttagcaatacctagttttcatcattacaagttttgtttgtggtcgttgctgttattgtgtgaactgttgagctctgttagcctgtgcacttttatctatttatttggtaccttcttgctatttcaccttctgcaatacaagaatgctgtaagagctatatgttaaccttttggcattgttaatttgattttaggaagtcgtatagttatcttc

SEQ ID NO: 3427 - DNA, 2307 bp, Zea mays
  Clone ID: 700264645_FLI
atcagtgtagtgaaactttatcgtttgctcgcttgcttgcttccctagtactgtcggcccttttctcccttcccaatccatccaccccctccctccccagcaagaaagcattgcatcccctctccccggagcggagagccggcgggccggcctcccatcgcatggccaccgcactgacgtgacgccgccgagggattgaggacccaagacctccagctggaggaatcgggagaggaaggagcggtcgcgcgcccttcgccacgtcttgcgtcgtcggggggcccggcccttcgccgacgacgacgagcacccaccacgtacgcccgccacctctccctccccttcatgccgcaccccaaaccctaatgttgctgaggaacagagatgtcgacgacaggcgaaatcctgaggtcggagctatcttccaggacgccgccgttcggcctgaggctatggattgtcattggcatctgcatctgggtggcgatcctcttcatcataggcttcatgtgcttctggtccatataccggaggaagcccaccaagtcgtccttcgacagtaccaatgacatcccggtgtcccagatcccggacgtctccaaggagattgcggtggacgaggtgcgtgagcacgctgccgtgcagaccttccatgtgcacgagagctgccgcgcgctggccgtgcaggagaagccctgcgagaaggattccgggagaatgctggggcacctggtcaggagcaagtctagcgacgctgataatctcagccagtgcagctcggcggcgtaccagtgcgagagggctgcaagctcgtactctggcgacgagggcagctcgggcaacgccaggaggcagtatcccactgtctccgcgtctccgctggttggtctccccgagttttcgcatctcggatggggccattggtttactctcagggatttggagcatgcgaccaatcgcttctccaaggagaatgtcattggggaaggtggatatgggattgtttaccgaggtcgcctcgttaatgggaccgatgtcgcaattaaaaagctccttaataacatgggtcaggcagaaaaggagttcagggttgaggttgaggcaattgggcacgtcaggcataagaatcttgtacgccttctaggatactgtgtcgagggtatccacaggatgcttgtgtacgagtatgtgaataatgggaacttagaacagtggcttcatggtgcaatgcgtcagcacggtgttcttacttgggaggcccggatgaaagtcgttcttggaattgccaaggcgcttgcttatttacatgaagccatagaaccaaaagttgtacaccgtgatatcaaatcgagcaatatcttaattgatgaagaattcaatggcaagctttctgattttggactggccaagctcttgggtgctgggaagagccatatcacaacgcgagttatgggcacattcgggtatgtggctcccgagtatgccaatacaggtctgttaaatgagaagagcgatgtctacagttttggggtgctactactggaagcagtgactgggagggatccagttgactatggtcggcctgctaatgaggttcatctggtggagtggctgaaaatgatggttggcactagaagagccgaggaggtggtggatcctgacatggagttgaagccagcgattcgtgctctgaagcgcgctcttctagtggcactgcgatgtgtagacccagatgctgagaaaaggcccactatgggtcaggttgttcggatgctcgaggcagaagacgtgccttcacgggaggaccgccggagccggagaggccacagcagccacgcagacaacgagtccaaggcaagttcaagcgagtttgagataagcagtgaccgaagagagtcggggccgtcatcgaggttccaggcctaactcccagtgagagcacggcagattaccatctccaagaacccggtttcagttcagtacgccgggttatcccttaccttgcctgctcgatcatggactcaggccgttcgaaatatttgggaatccttgcggggtggggctttattggatggttggtactgatagagataggggaaggcttgcatcttgtgctggagtaggtattttactcccatttccttggtggtgggcggagtcggatcgattccgtgggaggggaggttgagacttgtggatgtggatcctattcgtgttctgtttgcccagcagcatgtacagaaactttattattattccctggttcttggtttaggactcatcggcgagtagaaaagatgactggct

SEQ ID NO: 3428 - DNA, 1254 bp, Zea mays
  Clone ID: 700264656_FLI
gccagcaagccagcgcacgtcggtaggcacgccaccatgccggggctcaccatcggcgacaccgtccccaacctggagctggactccacccacggcaagatccgcatccacgactacgtcggcgacggctacgccatcatcttctcccacccaggtacgtccgccgtaccgtacgtcgtccgctcggccatatgcatgcttgcacagttgctcgcgtgcacctgctgatgggagataagatgatatggcagccgacttcacgcccgtgtgcacaacggagatggcggcgatggcggggtacgccaaggagttcgagaagcgtggcgtgaagctgctgggcatctcgtgcgacgacgtggagtcgcacaggcagtggaccaaggacgtggaggcgtacggcgggaagcagcagcagcagcaggcgacgacgacgaaggtgacgttcccgatcctggcggacccggcgcgggacgccatccggcagctgaacatggtggaccccgacgagaaggacgcggcggggcggagcatgccgtcccgcgcgctccacgtcgtcgggcccgacaaggccgtcaagctgagcttcctgtacccggccaccacggggcggaacatggacgaggtgctgcgcgctgtcgactcgctgctcaccgccgccaagcatggcgggaaggtggccacgcccgccaactggaagcccggggagtgcgccgtcatcgcgcccggcgtctccgacgaggaggccaggaagatgttcccgcaggggttcgagaccgccgacctgccctccaagaagggctacctccgtttcaccaaggtttagctagccgacgtacggcacggacatctagctcgtctgtcagtccgcgtcgaccggggtgcgcggatcttttgtgcctgctggtggtttctctgactagtactagtatatatataggctctatgtatgtgcgtactatgccgtgccgtgttgtctcgtgtagtggtggcaaccggttcgtggcactaccgcgctagtattgtccacccatatcaatgtcctcttctgaacttagcggcgcacatgtttgtgcgtgtgtgtagcatctgctagtgcaattgcatgatgcatggccgtgcgaaaaggccctcggcgctacgacagcagccagcacggcacgtttcaaagtatgcctgatactgtacgatgtcttatagcatcttcgaaagactatttaaatagctcgccaagccaaattttggctacttaacacc

SEQ ID NO: 3429 - DNA, 1334 bp, Zea mays
  Clone ID: 700264671_FLI
cttctgctctctctctctctcgcctctggtgcgcagagctagctctcttgaagcctcgccgctgctctgctccccagctctgccgctgcgtgcctgcgtcagctgttccattgcagccagcgagccttgagctgctagctctctcttcaccacacttctcacgcatggagttcgaggatcgctgccacaaggtccaggagcccaagttcgactgtctgctcttcgacctcgacgacaccctgtatccgctgagctccgggatcgcgggccatgtcaagaagaacattgaagattacatggtcgagaagctgggtattgacgagagcaagatcgagaacctgggaaatctgctgtacaagaactacggcaccacgatggctggcctcagggcgatcggctacagcttcgattacgatgagtaccacgccttcgtccacgggaggctgccgtacgacaacatcaagcccgaccctgttctcaagcacattctcaagaacctgcgcatccgcaaactcatattcaccaacggcgacaaggtccacgccgtgagagccctggagaggctgggcctggaggactgcttcgaggggatcatctgcttcgagaccctgaacccgccgtgcccgccgcagggagaccgggagcccgagatcttcgacatcgccggccacttcgcccgctccggcgccgccgccgagcttcccaagacccccgtcctgtgcaagcccaacgtcgacgccatggaggaggcgctcaggatcgccaacgtcaacccgcacaaggcgattttcttcgacgacagcgtacgcaacatccaggccgggaagcagatcggccttcacacagtgctggtgggcaagtcgcagcgggtgaaaggcgcggaccacgcgctggagagcatccacaacgtcagggaggcgctgccggggctgtgggaggaggccgagaaggcggaggacgtgctctacgccgagcgcgtcgccatggagacctcggtcaccgcgtaaacccctctctcgaatcctccggtgcaccgtcagcccaaccttctcgacatccaggaccgggacgatcgcataccactctctctcccgagccaggtctggtggtctcacgctggaactgaatccagccatggccgggccgagaatttccgacagcaggaaggggtgcagcatgtaaaggggggagcagatgagatcatgtaaaggggggagcagatgagatcatgtttgggatgctcccaaatatgtatagttatgtatcagccagttgtttgtaaattaccaataaatattagaagtaataagaaaaaaaatggagtttacttgtac

SEQ ID NO: 3430 - DNA, 1537 bp, Zea mays
  Clone ID: 700264701_FLI
cgattggaccatcttttttctcgaataagatatgcaagaagccatacgtgtgagtacatttcatttctctagaaaaacataattgcctatttcctgcacatataaaaaacctagcgcagggaaagagggaatgaatcacacgaaagaataggaagagaaaagaaaaacacctacttacatctctataatacatctacagcataagcactccaaaaccacatggattggaaccatcatctgtacacaaacttatcagactgcacgatcctaagaagttctcgtaggttaccaaacacgtgccttccacagctctcagctccaacatagttcagaagctgctccgtatccttgtgcaataaataaatggcataggaggcactagtggagtcatcgtcttggcattccaggaaaagagggtattctgttagttctgattcggtgttcctggtacttgctaaagcagccgatgatgctgtatcagctgaaggcaagcgatcactcacataagatcgggaccctccaaagcgcaagggatatcggaggggaacatcaagatagcaagctatgagcaagaatgtgctgcatatcccagaacagctgcggacctctgtagcaccttgttcctgtaacttttttgcttcattttatgcttcataatgtcccaaccaaaaaatgtccagccacgtgcttctggagatttgataatggtgggtaaatgtgttccatctccacctgaaaatgttctgttttcctctggaagtgtcacatgctccccattagtatcggcacaggggttttctgcatgtcttggaagatcatggaagactctcacagggtacaaaccagcaacctggctaaccatgcactgctgcctcgtccgaagcagcctctgcagatccttgagtctgaatttgtctccggataacgcctccttcgcttcctgcactcgatggtgcgcggcggtgagggacctcgacagcggcagcacccggtcgatctgctcctgcagccgctccttcccccgctccacggcctcgagcgcccgcctcctgccgacgacggccgcctccaaacgcgcttgctggaggtctaccatccgcgtcaactcgtccagctcctccgcctgccgcagcgcctccctccttacctggagcgcggcctcgattcggcgggccaggatcgcccgttcctcgcccgcagccgcgagctccgcggccttgccgcgcagctcccgccacgcgaccgccgcctcctcctcgtcctccaccaccgcggcgcccggaccgggcgcgcgaggattccccacccgaaccgccggagtcatcgcggccctaccgtcgcagcggatggtgacgtgtggcagaggcgaagagagcaggcggcggcggcgcccatggccgggccggtgaggcggtgacggctgcgtccgtcgaaaccgaagctcgcccaacgcctactcaaaaggcggaaacagcagtcggaaaagcaaaaagcggcggcgtcacgatgcgttgcgttgttgcggagggcgcaagcg

SEQ ID NO: 3431 - DNA, 1190 bp, Zea mays
  Clone ID: 700264725_FLI
cgtactcgccggctctcttgcgtgtctccgcttttcgcgccttccctacctatattgcgcaccaacgtactcgaccggatgcgtgcaggcggttctaacagcacggaggcactcatcagtcatcactactacttcactagctagctagcagtactcctactcgctaagtagtggagatcgacatgagccaggggcagccgaggaggcggcagggcgaggagggcatgcacgcgcaggacaagcccgtcaagttcggcgacgtgctcgacgtctcaggcgagctggccgaccagcccgtggctcccagggacgccgcgcggctgcaggccgcggagcagtccgtgctcggcgggacgcagaagggcgggcccgccgccgtcctgcagtccgccgcgacggtcaacgcgcgagcgggccacgtaggcagggcccagacggcgtgccccgtcgccgacgccggcgccaccgtcaccgagaccgagctcgcgggccgccgcgtcgtcaccgagtccgtcggcgggcaggtggtggggaagatggtgaccccggcgccggtggcgatgacggacccgccgggcgcgctggagaaggacgccgtcacgatcggccgcgcgctggaggctgtgggcgcgatggtcggggacaggccggtcgagcagagcgacgcggcggccgtccaggtcgcggagctgtgcgccacggggtccgactccaccgtccccggaggcctggccgcggcggcgcagtcggcggccgaccagaacgcccgcgccgcgcgcgacgaggacaaggtcaagctccggaacgtcctctcgaacgcgagggagaagctgccggcggacaagggggcgacgcgggaggacgccgagagggtggtgtccgccgagatacggaacaagctggacatggcgaccacgccgggcggcgtggcggacgcggtgactacagcggcccggctcaaccaggagcgcccgaggccataggtcgtcgtggcctttatatcccatgtggaacagtggaagcgtgcgatcagaagcctgcgcgcggatgagcgtgcttaatagcacagtagcgcgtgccggtttttttttttgacttactaagaaaactacgtacgcttgtaaaaatgcgcgaacgacaccgtgtccgcagtgtatatagcaataaaatcgttgcgcgtgaagttccgt

SEQ ID NO: 3432 - DNA, 1095 bp, Zea mays
  Clone ID: 700264738_FLI
ccagacttggtaattttggacgacaaggttttgtattatctgatttttcgggatggatgccaaaaggttcctgcatctggtcgaggagaagaaaagaaggatcctcgagaagaaagaagccccactaaagtgggagcagaagctagaaacagcagctaaggccaaggttgatgcagaagcaaaggtgaagaagctaaattcaagaaagcacaggaggagaggagatttgtcctcagactctgatagtgactatggcagcgatgttgatcgaaaacacttgaagaggaagaaccgcagaaggaacaagaagcatgagcattctgactctgatgatgccaggagatgcaatcgtagatctagaaggagcaccgactcaagtgatgacagcgacagtgaatatgagaccaggtctgaagaagaacgtccaaggaagaagcgctcgcacagaagaaggcatcaccggcactcttcaaggtcagactctgaaaactacagcagtgatgaggaagaacggagatctgccaaggaccatactcagagccgcaggcggcaccatcggtcgtctgatgatgactcaggcaaggacaaggtcaagtcaagacatgggaagggtctgagatctcgtgacgaggatgcaagggcagatttcaacagccataagcgtctcaggagccaatccttggaggagtcatcagatgatagagatgctgatgaatctgagaagatgaggaatggcaaaaggtctcacaagaatggcggccaccgtcaccatcgacaccaccatgaatgacatagtaactctgcagaacctaatgacaggaggcaagtactgaaagatggccagagggcccttgaaggtgacagtgcatactgaagatatcccagcaaggtcgagttaattgtccttattaaggacaggaagatcatttttttcgttcctgatgttctcacataattcttgtcttgctgacaacatttctttgatttgtgaatgtactaaacatgttggctttgaaaatttggtgatacgtgatcgcctatgcatttgcttacatgtcaggctgaagtcgataaaagggctagagcggagaaaat

SEQ ID NO: 3433 - DNA, 1298 bp, Zea mays
  Clone ID: 700264753_FLI
gcctcttctcctccctcctgccgggtccttaataaagagcagcagcgcaagaggttggtagagcgagcgagaagaaggcaatggcggcggagagcttcctgttcacctcggagtccgtgaacgaggggcacccagacaagctgtgcgaccaggtgtcggacgcggtgctggacgcctgcctggcgcaggaccccgacagcaaggtggcctgcgagacctgcaccaagacgaacatggtgatggtgttcggcgagatcaccaccaaggcgagcgtggactacgagaagatcgtgcgcgacacctgccgcgagatcgggttcacctccgacgacgtggggctcgacgccgaccgctgcaaggtgctggtgaacatcgagcagcagtcccccgacatcgcgcagggcgtgcacgggcacttcacgaagcggcccgaggagatcggcgccggcgaccagggccacatgttcgggtacgccaccgacgagacccccgagctgatgccgctgagccacgtgctggccaccaagctcggcgcgcgcctgacggaggtccgcaaggacggcacctgcgcctggctcaggcccgacggcaagacccaggtgacggtggagtacgtgaacgagggcggcgccatggtgcccgtccgcgtgcacaccgtgctcatctccacccagcacgacgagaccgtcaccaacgacgagatcgccgccgacctcaaggagcacgtcatcaagcccgtcatcccggagaggtacctggacgagaagaccatcttccacctcaacccgtcggggcgcttcgtcatcggcgggccccacggggacgccggcctcaccggccgcaagatcatcatcgacacctacggcggctggggagcccacggcgggggcgccttctccggcaaggaccccaccaaggtggaccgcagcggggcctacgtcgccaggcaggccgccaagagcatcgtggccagcggcctcgcccgccgctgcctcgtgcaggtgtcctacgccatcggcgtgccggagcccctgtccgtgttcgtcgactcctacggcaccgggaccatccccgacaaggagatcctaaagatcgtcaaggagaacttcgacttcaggccagggatggtcaccatcaacctcgacctcaagaagggcggcaacaggttcatcaagaccgccgcatacggccactttggccgtgacgacgccgacttcacctgggaggtggtcaagcccctaaagaaggcatccgcttaagaatgtattgggaagttcactggacatgaggttcatctt

SEQ ID NO: 3434 - DNA, 1727 bp, Zea mays
  Clone ID: 700264764_FLI
gtcaattctcggaatttctcagaagattggagacgggcgttctcttttcatttggagttttggactagtcgaactgacgaactggcagagcgttcaggatagacatggctgccacctttgccttcatccctctcctgctactggtctgcgtccagagcgcggctcctgttctcggcttcacaaggagcgagttccctgaagatttcgtcttcggatccgctacctcggcttatcaggtgacggatgatcccatccgggactcccgtgcatggattcatagggctttcttgcggctcatcataggcaactaattctttattttgaaatgaattgctgctccagtatgagggtgctgttggtgaggatggtaggagcccaagcatctgggacaccttcactcacgcagggagaatgccggacaaaagcaatggtgatgtagccgccgacgggtacaacaagtacaaggtgtccaagtccatgttatgatttaccagctggatctccctcagatcctggaagacgagtatggtggatggttaagtccaatggttgtgtaagatccagtaactttagatgttagggatattttcccaaaatgaacatatcttgatcatccatgctaccacaaaacgcagggaggatttcacggcatatgcagatgtgtgcttcagggagttcggtgacagggtttcacactggaccactctggatgaagtcaatgtggctgcaattgggtcctatgataatggacaaattgcaccgggaagatgttctgatccatttggaacaaaaaaatgtacagtggggaactcaagtgtggagccatatatagcagctcataacatgctactggcacatgcatcagctaccagactgtacagagaaaaataccaagctgtgcaaaaaggagttgttggtataaatatatatacaatgtggtcatacccactaacaaactccactgccgatttagaagcaactcaaagatttctggacttctattccggctggatactagaaccattggtgtttggagattatccaagcgtaatgaagaagaatgttggttctcgccttccgtcattcagtaaagttcaatctgaagccattcgtggcactctagatttcattggaataaaccactattattctttctatgtgaacgaccgccctttagaaaaaggcatccgtgacttctcactggacattgctgctgactatagagcatgccccaacatctattcccgctgatcccagaggattgcaacttttggtagagtacctgagtgaagcctatgggaaccttcccatctatatccaagagacaggttatgcaaccacaaacggcagcctccatgatactgacagggttgattacatgaagacccacataagcagcacattggctgctctaaggaatggggctaatgtgaaaggctacttcgcgtggtgcttcctggacgtcttcgagtacctgtcagggttcatgtcgcaatacggcctgtaccgtgttgatttcgaggacgaggcgctaccaaggcaagcaaggctatctgctcgctggtattctaaatttctagagaacaaggggatccatgtagaggacgagcttgatgatgcgggatcacacgttgagcaataagttttctacagcgacacattgatttgtacatcctctagcgagactattgaatactactgtgcgttgcaataagaacacttatatt

SEQ ID NO: 3435 - DNA, 1068 bp, Zea mays
  Clone ID: 700264770_FLI
caaaaccacgcgcgccacgtggccgtggctggcccctcgccgcagcccggcacgccgcccgcccgcccgcgctagccggccatcaacctcatctgaaagaaggagtccacctgacgccgtccgcctcctcgtcaccccgtttcgcttcgcattccttcccctctctccctttattcctatcggcgctcggccaccttcccgcaccaacccaccagcccccgcattcccgggtgcctcgcttcgctttgcgcgcgattcgatccaggctttggttggaggcatggcctcgtcgcccgcgagcagctacgactgctccttcaaggtcctgcttatcggggattcggccgtcggcaagagcagcctcctcgtcagcttcgtctccgccgctcacatcgacgacgacatcgcgccaaccataggggtggattttaaaatcaaatttctcagtgtgggtgggaagaaactaaaactgacaatatgggacactgccggtcaagagaggttcaggacaattaccagctcttactacaggggtgctcatgggattattttagtttatgacgttacaaagagggagagtttcacaaatttggctgatgtgtggaccaaggaaatagagttacactcaacaaataaggaatgcatcaaaatgcttgttggaaataaagtggacaaggatgaggacagaatggtgacaaaagaagaaggtcttgcatttgcacaagaacgtggatgtctctttgtcgagagtagtgctaaaacaagagaaaacgtggaaaaatgttttgaagagcttgcattaaagattctccaggttcccagtctcctggaggaaggttcttcggtcgttaagaggaacactctgactctgaaacaaaagcaggagaatgcaaaccgaagtggaggatgctgtcagtaggtcggccagttcttgttgcaagccactcgaggtatcatatatttaggtccttgtaagttgtattgggatgtagatgagttgtatctaaatgcacagcggcagagccaatgcaagtgatgggagaactaaccacttgaggttttggtgtg

SEQ ID NO: 3436 - DNA, 1763 bp, Zea mays
  Clone ID: 700264791_FLI
ccgttttgtcgccatagcactcccgccgaccccctcgccgccgccgggaatggagaccagcaccaagaagcttagcagccttcgtatcacctccctggacgacgatgacgacgagaccgagatcccgcaccagccccctcaagcaggcctctccaccgctgaagcggattatgaggacgacgacgatgaggaggaagaagccgaagtgactcttggtgtccttagcaaaccgaagcacccaggcctcctcctccgccacttgttccccagcaaggccggtggcatcccggcgtggctagacccggtgaacttgccgtcgggaaagtccagctactgtggtttctgtggcgagcctctgcagttcgtcctccagatttatgcaccaattgaagataatgtagcagccttccaccgaacgctgttcatgttcatgtgcccatccatggcatgcttgcttcgagatcaacatgaacaatggaagcacaagtacgggaatccatgtagaagattttccggtgccaattgccacggaataatgccttctactcagctcaacctccaaagcatgatggctctgacaaaccactctgtccaggagctcctgtatgccactggtgtggtacctggaaaggtgataaaatatgtagtagctgcaagaaagcaaggtactgttctgagaaacatcaggcactgcattggcgaactggtcataaaaatgattgcctccagataataagttctgctgcttcaaattcagttctgccagctgtaggaatagttcctgctagcatttcttggccagaatttgagataaaaatagactacgaaggtacttttgattctgatagtggtgatgaaaacaactcgaagtcattggtgatgcaaagacatgggaaacttgatgctatgatgcagtcgtggatggaccatttcgaggctgatgctgacaacaaatgctgggcgtcttttcaagaacgggtctcaagagcaccaaatcaagtgttgaggtattgtcgagaaccaaatgctaaacctctatgggccttatctttcgggtgcccgtcagatgctgatatcccatcatgtagctactgtagaggtccattatgctatgaatttcaggtaatgccacaattgctttatttctttggtgttggaaatcaaccagactcgcttgattgggcaacaattgttgtctacacatgtcaagggtcatgtgaccaaactgttagctacaaagaggaatttgcttgggttcagttgtaccctacaacaaccacgaggcggtaataatgtttacctattcctcggagtaactactgtccaattctgcagggaattgacaggaatcataggcaagtgcatacctcctttgggtactggaattttgagataggatgtggcttcaatgtttccaggtctattggtcgtgcagggagttttaagcatcttccgaccgtggcccaatgcttggtgctcgttacagtgcctttgatccatttaggcactatccttgggcccacgaatacgtgatggcaaatagttgcatacttccatttttgtggtgggccaccattttcggtttaattgtcatcatcacatcattaaaaagctttgttgttttttgttatctaaaaggatcattggtctcagaaggtgctcgcattcatgtaaacatttccttcatcggctaaagttttgatgttggttttgattttaaatggaacattattatgttaatattccagtggtgttttcacccc

SEQ ID NO: 3437 - DNA, 2565 bp, Zea mays
  Clone ID: 700264904_FLI
gcaacgccaagcatccagcaacagcagccgctacctccctttgtctagctgtctccctcacccggtccagtcctgcattgcattgcctcatgaggacccaaagaaacctccttcccctcctcctgctgctgtccgccgcgctgctcgccgtcgccgacgcgcaggagcgcaagaactacgtggttcatctcgagccgagggacgacgacggcggcggcgggtcggtggaggagtggcaccggtctttcttgccggaggccacgctggactcggcggcggatgacgggcccaggatcatccactcgtacagccacgtgctgacggggttcgccgccagcctcaccgacgcggaggcggagacgctgaggcgcaaggaggggtgcctgcggctgtacccggaggagttcctgccgctggctaccacccactcgccgggcttcctcggcctccacatgggcaagcacggcttctggggccggtccgggttcggccgcggcgtcgtgattgggctcctcgacaccggcatcctgcccacccacccgtccttcggcgacgcggggatgccaccgccgcccaagaagtggaagggcgcctgccagttcaggtccgtcgccggcggcgggtgcagcaacaaggtcatcggcgcgcgcgcgttcgggagcgcggccatcaacgacacggcgccgcccgtcgacgacgcgggccacggcacgcacacggccagcaccgcggcgggcaacttcgtgcacaacgccggcgtgcggggcaacgcgcacggcagggcgtccgggatggcgccgcacgcgcacctggccatctacaaggtgtgcacgcggagccggtgctccatcttggacatcgtcgccggcctggacgccgccgtcagggacggcgtggacgtgctctccttctccatcggcgccaccgacggcgcgcagttcaactacgacctcatcgccatcgccacgttcaaggccatggagcgcggcatcttcgtcagcgccgcggccggcaacgacggccccgccgcggggtccatcaccaacggcgcgccgtggatgctcacggtcgcggcgggcaccacggaccgcgcgatacgcacaaccgtgaggctcggcaacgggcaggagttccacggcgagtcgctgttccagccccggaacaacaccgcggggcgcccgctgccgctcgtcttcccggaggcccgcgactgcagcgcgctggtggaggccgaggtgaggggcaaggtggtgctgtgcgagagccgctccatcagcgagcacgtcgagcaggggcagacggtggccgcgtacggcggcgccggcatggtcctgatgaacaaggcggcggaggggtacaccaccttcgccgacgcgcacgtgctggccgcgtcgcacgtgagccacgccgcggggtcgaggatcgcggcgtacgccaggtcggcgcccaggcccacggcgtccatcgcgttccggggcacggtgatggggtcgtccccggcgccgtccgtggccttcttctcgtcgcgcgggcccaacagggcgagcccgggcatcctgaagccggacatcacggggcccggcatgaacatcctggcggcgtgggcgcccagcgagatgcacccggagttcgcggacgacgtgagcctgcccttcttcgtggagtccgggacgtccatgtcgacgccgcacctgagcgggatcgcggccgtcatcaagagcctgcacccgagctggtcccccgcggcggtgaagtcggcgatcatgacgtcgtcggacgcggcggaccacgcgggcgtgcccatcaaggacgagcagtaccggcgggcgagcttctacagcatgggcgccgggtacgtgaacccgtcccgcgccgtggacccggggctggtgtacgacctcggcgccggcgactacgtcgcctacctctgcggcctgggcatcggggacggcggcgtgaaggagataacggggcgccgcgtcgcctgcggcggcaagcggatgaagcccatcaccgaggcggagctcaactacccgtcgctggtggtgaagctgctgtcccgcccggtcaccgtccgccgcaccgtgaccaatgtcgggaaggccagctccgtgtacagggccgtggtggacatgcccagcagggccgtgtccgtggtggtgcggcccccgacgctgcggttcgacagggtgaacgagaagcgcagcttcaccgtgacggtgcggtggagcgggccgccggccgtcggcggcgtcgagggcaacctgaagtgggtgtcgagggatcacgttgtccgcagcccgatcgtgataccgccggcgaaggccgccgcgtaggcgtagctcccagcccaattgatgagtgccccggcattggtcggcaaacggcatgtatccctccaacaaggtcagtagcggtaggtggtaatcttgagtgtgaccggtgtacgtatggcgaaggaagtaggcaggcgactgttgtataggcaggcagaggcagggtaacccatcatctgtgacgcagcaagctcagctgcaatggcaatggcaatggcgcgttggttcc

SEQ ID NO: 3438 - DNA, 1069 bp, Zea mays
  Clone ID: 700264938_FLI
acgacatgatgagcattttctcaaatgacggtgtaggacgctctatagattcaagcagcagtgaaacaaggaggagtcacagaaggatcctgtgggatgcattttccaggcgtggctcaagaggttatccagaatctgatgctgatgaaatgggattttttagtacatggctagaccttggtgatgatatttttgaagagttgggggaatcaagatattttcatcgcaggcgacatggttcaatcagagtaagccagtattcaagatcccggattagggagcatcgccgtgctgtttttgatagtggtaatgaacaaaacactgctgcatgtcctttggggattcatcaaattggccgatgcacctgtaattctttctttattgctgaagaatctagcgcccgagcaagtatatcaagaattgtcatgttaactgaggcgctatttgaggtgttggatgaaattcaccgtcaacctgcatcactttcactttccatggtctctgttcaggctcctgaatctgtagttgattcgttgccatgtaagagctacaaaaagcttgagacaccccaatgcagtgatgatatggaacagtgccatatctgcctaaccgaatatgaggacggagaccagataagaacccttccgtgcaagcacgagttccacctgcaatgcgttgacaagtggctgaaagaaatacacagggtgtgccctctgtgccgtggagacgtctgcgaagtcgcctcgtgaagaccttggcgctgccatccttccgatgtggcgccggtggatagggcaccaccgccaggcgccagctgttccgtggttgaagctggttcggtcaggcaatggtgatcttgtcaacttggacagttgacaccgcaagagcacgtcaactttgactgtctccctgccgaagagaatggccaaaccaaccctgcgaccgatgagtcgctgttcctgtcatcaacttttaagataccgagactttgtatacagtagcttttgtagcctcccgcctcgtgtatgacagcctgtacatatttgtaaattctggaatcaaatgtcac

SEQ ID NO: 3439 - DNA, 1693 bp, Zea mays
  Clone ID: 700264985_FLI
ctggaacggacgcttctgctcactcgctttccggtgctaagcctgagcttgcatcggcagagctgactgtgactggtgaagtgaaggaaaggggaggagaaggggagggaagctttgggcgggagaggaagcctagcagcaacagtaggcagtagcagggttgaccggaggggcagtggattctggagagtaacccaacaaccccctcctcccctccccttctgtcttattgccacatctccacgtctccaccaaacaaggcaacaagggagaagtagatctgcatctgcgagagaaggcagcgggggtggtgatgatggagagccagccgctgcaggccccgacggccacggctccggcccccggatctgcggagccagccggagctccgccggccgtcacccccggcaaggagttcacgcgcacctgcaagggcctcgtcgtcgtgctcatcggaggatacgtgctgctccagctcctcccttcgtcactcaactacctcgccatcatcccctccaagacaatcccctatgtatggaccgtctttaccgctggttacatcgagcaagtcctcccaggggccattggcagttctcttggtcttctcttttgtggaaaggacattgaaccagcatggggccgcaaggaattcttgaagttcattattttgatcaactccatctgtggcattcttgcattttgctttgctattggactctactacgtcactggaaaggagagcttccttgtcacaccactttctggtttccacggttgccttgctggctttcttgtggccctgaagcaactcttaccaaaccttgagcttcctatgtgctttttctggaaaataaaggcaaagtggatgccattctttgttgtatgtttctcaagtatcatggccttcatcgtgcctgattccattaacttcctgccaactttggtgtccgggatgtacgttagctggctttacctgagatacttccaaaggaacccactgactggacttaagggtgatcccagtgatgacttctccttccccagtttattcccagctgccatgagaccagttacggaccctgtggccaacctgtttgataggctgttgtgtgcaaggtccaggactttggaagtcgccctcccgatatcagatcctaccaaggcttcaagaagaagggagcgcggcgagagggttcttgaggaaaggttggctgccgacaatgctggtgacacagaggcctcgcctcgtggccatggcaccgcggaagactgagaactttcttgtgaccatcagctcctcttttaggagccatggctttgctccctccagcgtttatagctctgcacttttgtcttctggagatggagttattcagttcacagcgaacgaataatacgatgttcttagtttcttttttttttcccgcttctttgtctgcgaggatttattggttaaattgtgtactagtcaattgttatggtacagcgaaaaagagagaagaggatgatggcattcgcagcgaggtgttgagattccgttgtagccatgcatttgcagccgattgtttggtactggtcaaagttctgtagtagtcataatactctgctcaaaatatagaaagaagaatggcttcgtcaatatcagatgttgagatatatatatttttcttttagtgacgtgatttgagccgac

SEQ ID NO: 3440 - DNA, 1563 bp, Zea mays
  Clone ID: 700265015_FLI
caggagcagttgctgaaagagtctgctccatctgcttctgaggaacaagctatgatgaataacttttccaagaattctgagacttcacattttcttgatagcaatgctgtggaagtgagaactggaacttcagagcctactgttcaaagttccaatgacgaaggtgactcggatattagtccagaaacagacctagctgtttgcaatgttcctctagtttcatctgagggacaactgaaatctgagagtagggctgatgatcaacaggctgctgaaccaacagtttcagttcgatcagtatccagggaaaagcctagtgttgagatcgccaggtcaaagtccgcagctgggaagaggaagaagaaaaaggaaatgcttgctaaggctgatgctgctgggtcttcagatctttataatgcatacaagggaccagaagagaagtctgaaatggttggtactgcagatggtgctgatagttcttcaatagttgacacaacacatgtgctgcttgatgaagcagaaagggatgttagtacgtttgcagatgattgtaagaaaaaagttgagcttgatgattgggaagatgctgcagacatgtctactccaaagctggcaccagattctggaaatcaggctggcaccacccaagtgctagattcagatacaagtgaagcaaacagcaggaagaaatattcacgggattttctgttgaccttgcaacaccactgtactggtcttcctgttggatttcagatgaatgaagctgtcaatgcaataatgaataatttggttggaaagtcttatgttgttgaccgggaaccttaccctagtcctggaaggggtttggaccgcccaacttctcgtggtgaccgccgtggtgctgccatgactgacgacaggtggactaagacgggtgttcctctcagtcctggtcgtgatgttcacatggacctgccaaatggaacatcagttgtcaactaccgtagctcaggaggtaatcatggtgttttaaggaatccacgtggccaaccatcaaatcaatatggtggtggtcttcttgcaggacctgtgcattctgttgggcctcaagtacctcgcagcggctctgattctgatagatggcagcaaaagggtctcatgccttcccctgtcacacccatgcaaacaatgcacaaagcagagaggaagtatgttgttgggaaagtttctgatgaggaggaggcgaaacagaggcagttgaaaggcattcttaacaagctgactccacaaaactttgaaaaactgtttgaacaagttaaggaagtcaacattgacagtgtagcaactcttactggggtcatttcacagatatttgacaaagctttgatggaaccaactttttgtgaaatgtatgctaatttttgcttccatctggctggtgccttgcctgacttcagtgaagacaatgaaaagatcacattcaaaagattgcttttgaataaatgccaagaggagtttgagagaggtgaaagggaagaagctgaagctgataaaacagaagaggaaggtgagatcaaacagacc

SEQ ID NO: 3441 - DNA, 2554 bp, Zea mays
  Clone ID: 700265067_FLI
cttaatgttcttattatgcctgcgacgaatcttccacgactggtgtcctgattgctatctgattcctttcttccaacagcgtatgccgagaggcggttggttgcagaaaacacaagcctgccaaacatgcataaggaagaacttgagactataataaggaatcagctccggaagccccagttgccaccttcttcatacgacacagcgtgggtttctatggtgccagtgcggggctctcatcagactccccgcttcccacagtgtgttgagtggatattgcagaatcagcaggatgatggatcttggggtgtcagccaatctgactcatcggtcagcaaggatgttctcctatccacgttggcatgtgttcttgcgttgaagagatggaatgttggcagagagaacatttggagaggactgcatttcatcgggaggaatttctctgttgctatggaccagcagttcacttctcctataggtttcaacatcacctttcctggtttgcttaacctcggcattgatatgggtttagaatttcctgtaagacaaactgatgtctgtggcattcttcaccgccgggagatggaattgaaaaggctggctgtggatagttcttttggaagaaaagcatatatggcttttatcccagaaggattcggaaatatgctggactgggatcaagttatgaagtttcagaggaagaatggatcattgttcagcactccttccacaactgctgttgcattaatccacaaatacaacgaccaagcccttcaatacctaaatttgcttgtcagtgaatttggcagtgcagtaccagcaatgtatccttcaatggtacattgtcagctttcaatggtggacgcgcttgaaaaaatgggaatttctcagcgctttgtcagtgaaatagaaagcatcctggacatggcatacaattgctggttacagaaagatgaggaaatcatgatggacatagcaacatgtgcaatggcatttcgccttttgaggatgaatggttacaatgtttcctcagatgagctgtctcacgttgctggagcttccactttccatgattcactacaaggatatttaaatgatacaaaatccctactggaattgtacaagacctcaaaagtcaccttatcagaaaacgatctgatcttagatcgcataggttcctggtctggcaacttattgaaggataagatgtgctgtagtagggtgcaaaaagactcgatttttggagagatggagtatgctgttaattttcccttgtattccacactggagcgtctagaacacaagagaaacatcgaacattttgatgcttggggttctctgatgctaacaacaaaatcctcatcttttcgtatcaatcaagaattcctagctttggcagtcgaagatttcagtttctctcaacgtgtttaccgggatgaacttcggcatcttgatagttgggtgaaggagaacaagctggaccagctacaatttgctcggcagaaactgacatattgctatctgtctgctgctgctaccgtattttcttctgaattgtctgacgctcgcatttcatgggccaaaaatggtgtcctcacaactgtggttgatgacttcttcgatgttggtggatcaaaagaagaattagaaaacctgatagcactagttgagaaatggcatgcgcaccatgcagttgagttctattcggaacaggtgaaaatagtattttctgctatttatacaacagtgaaccatcttggagcaatggcttctgcagcacaaggccgtgatcttacaaaccacctagtagaaatatggctggatttgttaagatctatgatggtcgaggcagaatggcagagatgccaatatgtaccaacagttgaagaatacatgacaaatgctgttgtctcatttgcactgggcccaattgtgctcccagcattgtattttgtagggcaagagctattagagcatgctgtcaaagatgaagagtacgataaattatttaggctagtgagcacttgcgggaggctcctcaatgactaccaaagtttagagagggaaggcaaccaggggaagctgaatagtgtttctctacttgtgctccacagtggtggttctatgtccatagaagccgctaaaaaggcaatgcagaagtccatagacgtgtctaggagagacttgctaagattggttctcaggaaagaaagtgctgttcctaggccatgcaaggagctcttctggaagatgtgtaagatacttcacctgttttactctcagaatgatggatttagctccccaaaggaaatggtcagtgcagtgaatgctgttatcaacgagccactcaaagtccaaaatagtactacgtttttgtctagttcatcaaggtagcgaggatatcatgtaatttatcctgttcatatggatcagaagcaacagcagcaagcttaagatatttgtaagtttgtgactgggctggtgtggatctgtgaagctacaactttgctgtatgtggatcaaggtattaggaagatctggttcacatattgat

SEQ ID NO: 3442 - DNA, 1345 bp, Zea mays
  Clone ID: 700265102_FLI
gcaacgatacctacgacgacctacccccctttccctgctctctccttccaactcttgtttctgcaacgccagggcgcaaccatgggtcagcagcagcaagggccggcggccaggcggatggccacgctcgcctcccacctgcgccatccctccgtctctcaccctcagatggaagatgttcccctcttgaggggatccaattgccgtgcaaaaggtgcggcgccaggcttcaaagtcgcgatcttgggtgcagcaggtgggattgggcagccacttgcgctattgatgaagatgaaccctcttgtttcggtgctccatctatacgatgtcgtcaacgcacctggtgtcacagccgacatcagccacatgaacactggtgctgtggtacgtggcttcttgggccagccacagttggaaaatgccctggctggaatggatcttgtaataattcctgctggtgtccctcggaaacctgggatgacaagggatgatttgttcaacataaatgctggaatagtccgtaccctgtgtgaaggaattgcaaaatgctgccctaatgcaattgtgaatgtgatcagtaatcctgtcaactctaccgtcccaattgctgctgaagttttcaagaaagctggaacttatgaccctaagcggcttttaggtgtgaccacacttgacgtagtgagagcaaatacgtttgtgggagaggttcttggacttgaccccagagaggtaaatgttccagtcattggtgggcatgcaggaattacgatactaccactcctttcacaggtgaatccttcctgctcattcacctcggaagaggttaaatacctcacttctcgcatacagaatggtgggacagaagtagtcgaggctaaagctggagcaggatcagcaactctttcaatggcctatgcagctgccaaatttgcagatgcttgcctgagaggattgcgtggtgatgctgggataatagagtgctcttatgtggcttctcaggtcacagagttgcctttctttgcatccaaagtgcggctagggcgatgtggcattgaggagatcctaccacttggaccattaaatgagttcgagagatctggtctggagaaggcaaagaaagagctggcggagagtatccagaagggcgtctctttcatcaagtgaggccggcgacggccagcccaacatagaaatagatgtggcgtgtttctgcttcttgagaactcatcttgttatctctctgtaagactgagtgcatgacacgaataatccacgtacacggctgtactaaaaagatgatgaatctgtggtggctaaaaaaagggaaatagaaaagtctggtaat

SEQ ID NO: 3443 - DNA, 952 bp, Zea mays
  Clone ID: 700265193_FLI
gtcccctccgccgcctgccgcactctcccgcgacgccaccaccacacgttcacggtagcgagagcttatcgtcgtcggcggcgaagatggtgtcgctgaagctgcagaagcggctcgccgcgagcgtcctcaagtgtgggaaaggcaaagtctggcttgaccccaatgaagtcagcgagatctccatggctaactcccgccagaacatccggaagttggttaaggatgggtttatcatcaggaagcctcagaaggttcactctaggtcccgtgcaagaagggcacatgaggccaagcagaagggaaggcactctggatatggcaagcgcaggggtaccagggaggctaggctccccaccaagattctgtggatgaggaggatgcgtgttctgaggcgcctgctccgcaagtaccgtgaggccaagaagatcgacaagcacatgtatcatgacatgtacatgaaggtcaagggtaatatgtttaagaacaagagggtgcttatggagagtatccacaagtccaaggctgagaaggccagagagaagacactttctgatcagtttgaggccaagcgtgcaaagagcaaggcaagccgtgagaggaagattgctaggagggaggagaggctggcccagggcccaagagaaccaacagcacctgtcgcagccccagctccatctactggggtgccaaagaaagcaaagaagtgaagtatggaaacaaagctgtagctttttggtactatataagcatgactttggagcacctgaagtattttgctgttatatagtttcgtgtctcaaatattctgagtcttgtatctctaccgttctgttggataatgcatgccgtaagagttgtttatggagcttttgttgttacaggacccctaaaaatgtttgtttgacagatgtttggaattgtggtcatgtttatgaaaattagtgttgtg

SEQ ID NO: 3444 - DNA, 1837 bp, Zea mays
  Clone ID: 700265205_FLI
cctgttcttccctcttcacctattgcaccaggcagtccacttaggcatggtgaccgcaacatgcgctttccaccaggcatgagaaacttcggtaattcctttggttcatggaattcaggcatgagtggaaagatggatgctaatttgatgccctctctcctggaggaattcaagagcaacaaaagtaaatcatatgagctctccgaaatagctggccatgttgttgagtttagtgctgatcaatatggaagccggttcatacaacagaagctagaaacagccagtactgaagaaaaggacatggttttttcagaaattatgcctcaagctctcacattaatgactgatgtatttggaaattatgttgtccaaaagttttttgagcatggaagcactgcccagataaaggaattggctggtcagcttattggacgtgtccttgctcttagtcttcagatgtatgggtgccgggttatacagaaggctatagaagttgttgatttggatctgcagactaaaatggttgcggagctggagggtcatgtcatgcgctgtgtacgtgatcaaaatgggaaccatgttatacagaaatgcatagagtgcattcctcagcatgctatcgagttcattgtctcgacattctatggccaagttgtaatgttatccactcatccatatggttgccgagttattcagagggttctagagcattgtgatgatcctaagacacagcaaataatgatggatgagattctccagtctgtttgcttgctagctcaggaccagtatggcaactatgtggttcagcatgttctggaacatggcaagccccatgagagatcagccattattgagaagctaattggccaagttgtgcaaatgagccagcaaaagtttgcctctaatgtcattgagaagtgcttagcctttggaaatcctgtagaacgtcaggttctgatcggtgagatgcttggatccactagcgaaagcgaacctcttgaggtaatgatgaaagaccagttcgcaaactatgtggtgcagaaggtgctagaaacttgtgacgatcagcagagggagatgatcttaacaaggataaagacacacttgaacacactcaagaagtacacatacgggaagcacatagtagcgcgtgtagagaagcttgttgctgctggagagaagcgccttgggcttcaaccagcatgcaccgccgcctgaagggcaaactctctaagttgtacagctaacagttgctaggtttgcctcatgtttttttctctactaaaaaccttatatgaaggccccttttggcctcgccaggaaaaaaaataaatactgtatgtttgcggggaagagtgtacattaattctgtagcagaaagaccccctacccatgtggcggaatcaagggaggagtgatgcgtgtgagtccgatcgatctgaaggctgctgtaaagaggaagatggaaggggaaggagtgagaagcatgtcagttactctgctgctgtacaaattaaacttagctcttagagtgaggagaaagtaagctgttagctgtctgcctaaaggaaagaaaggaaaaaaaaaagaagctggaggccattggcaccctgtttcatgtgttggtatagctgctgtggctctcctgttgtctgtctggcctttgttgtaacataaagctgaggcgcactagcctgccttcgttttcacagttaagctgaagttattagtatcagctttcctgaactgcttggtatgtaatgtgactctgtttcttccttgtactaatgcttgtctcatgtaatccaggcccctaatgtctgaatgttttaatctc

SEQ ID NO: 3445 - DNA, 1556 bp, Zea mays
  Clone ID: 700265216_FLI
acctgagtacgtatattgctccagtctccgaaatttgatcgatattttgtctgcttttcaggtgcaccgagctggctcctgatagggttcggccagcactcgagaaaacactcaaggacttgcagctggattacctggatctctaccttatccactggcccttcaggctgaaagacggggcgcacatgcccccggaagccggggaggtgctggagttcgatatggaaggggtgtggagggagatggaaggcctcgtgaaagacgggctcgtcaaggatataggtgtctgcaattacacggtcgccaagctcaaccgcctgatgcggtcagcgaatgttccaccggcagtgtgccagatggaaatgcaccctgggtggaagaacgacaggatctttgaggcatgcaagaagcatgggatccatgttactgcttactctccgctgggtccgtcagagaagaacctagcgcacgacccgctcgtcgaaaaggtagccaacaaactggacaagaccccggggcaggtgctcctcaggtgggcgctccagagggggacaagcgtcattcctaaatcgaccaaggacggaaggatcaaagagaacatccaggtgttcgggtgggagatccctgaggaggacttcagggccctgtgcggcatcaaagatgaggtgagtgaggggagggatgacatggctcttggggtttaaggctttagcgatagcttagcatatgactcggttatcagtatgtcctatgtaggttatgaagcttaagatgaaaatgagaactagtatgggaagttttcttatctgatacgtaagacttgttagcatgatagcatcaattgagcttgttaagttgttacgccacttatgcctaaatgaaaacaggctacagcctagtgccctaatagctaggtagctaaaaattgctagtgaaagtagttagctaacaaatatctagctaactattagctaatttttaaaaatagctaaactactagttagaccgtgttgaatgtttcagcaaattttagcactattagctctcaatgttagctctagtgtattcacacggcctaataattatagtttccagatttgaggcacagagtcgtttgatccgtctagtgcagcactcgtttttgtgtgtgtgtgtgtgtaaaagtgcaccgttttgcctgatctgcagaagcgcgtgctgaccggagaggagctgttcgtgaacaagacccacgggccgtacaagagcgcgaccgaggtgtgggaccacgaggactgagcggagctgccgtgccgccggatccctccactccacctgatgaaaccagaataaaggataccgacgcacctgtcagtcacctccctcccgtgccttgcgagagcggcagcctctcgcacagggaagatgctctgtgtctgagagcatgcagcctcgcacgagaaagatgcagaaggagtgtgtgtggcgcgcaatacactcctgtactgtacgatagactgaataataataaagaagaaaacgcagcagtttgccgttgcgttttcctttgtgcttgc

SEQ ID NO: 3446 - DNA, 1627 bp, Zea mays
  Clone ID: 700265223_FLI
cagccatctcctcaccctcgttcaccacacagtccgccactcctttagtagcttgtgatttgtacgtcgacgagatcactggtcgggtggcggacgacgacacatggggaagggtagtgtgggtgcatcatggtgggcgttcctcctgctcgccggcgtgctgctggtcgtagcagccacggccggggcggaggacggagtggtcgaacgggaccgcaaggaggacctgcggtggtgcaagcaggcgtgcgagtggcagtacggaaaggacaccccgcggaagagggaatgcgagagcgagtgccgcgagcggcaccagcaagctgacgcgggcgaggacggcgacagcggcgtggacgcctacgtctcccgctccgggaggggcgagtgccggcgccagtgcctgcgccgccacgagggccagccgtgggagacccaggagtgcatgaggcggtgccgccgccgcggactggccgtcgacatggagcaagagtacggtcgcggcagcgagagcgcgggcaagtgccgggagaggtgcgagcgccaccaccgcggggactggtgggagaggcagcgctgcctgatggactgcaagagccgggagcgggaggaggagggcggcagcggcggccggcgcggcgaggaggaggaggacagcggcgaccgctgcccttgcgagaagcagtgcgagggccaccacgaccgggaaagcaggcagcagtgcgtccaggcttgcgagcgccggcgacagcagcgcggcggcagccgtgactccaacgtcgacgaggacgacagcgaccggcggtgccagatgaaatgccggcgccacagcgatcggcaggcgaggcagtggtgcgtgcagcgctgcgagcgtaagcaacaggaggaggacgccgccgccgacgacgacaacagcggccggtgccagaagagatgccagcaccacagcgatcggcaggcgaggcagtggtgcgtgcagcgctgcgagcgtaagcaacaggaggacgccgccgccgacgacgacgagaacagcgaccggtgccagaaaagatgccagcagcacagcgactggatgaaaaggctgcggtgcatgcaacggtgcgggcgacaggaggagggcggcgcacgcgacgacgctgacgacgacgccagccacggcgaccggtgcgagaagaagtgccagcagcaccaccgcgactacgacaagcagcagcagtgcgtgcgcgactgccgccgcggccgtggctgggaaacggtggccggcgccatccttgaggtggtgtgacgatcgacgacgtgcatggcgtggcgcagagctaataataaaagggtagtgtacgcttaccgcgtacgtacgtgtcaccgggcgtggcactctccagtctccagggacccatccaccaagtgctactgctccttcgtagggagacgtgggaataaagagtggtagctgcatgcgcgtacggcggccatggctctccgatgagagagctagctgtgtacgtgtgttcgtgatgttgttccatgcatgacatgtatacgtcttgcctaagtacgcttgtactagttgagagactgtgtaagtgaaatgtgctataataataaataagtaaagggcgccttctcc

SEQ ID NO: 3447 - DNA, 1841 bp, Zea mays
  Clone ID: 700265270_FLI
ctgcgcgcgatcttctcaagcttcttcctcctcgcgtcttcctggcagccggcgctcgactgctcgtgtcctgtactcgcgcccctccgctctgcttggagttttccctgccgcgcgctttccccaagctgcgaatccaccgtggagctgctccagacgtgcccttggtccgtgccatggccgtcgtcaagcccctagaacttcctcacctgcgcgctcctctgcgtcgtgctctgctcgcgtagctccctccggccctctgtttccatggccggcgcttctcccagcggaccgtgccctcctctactcgaattttgtgcgcgagctcgtcgtggagttcacctctacgcctggctcctgctcgctcttcccccagctcgccgtccttgctccaatcctcgtcctggccgcgcgtgctcgcccctagctcgccggatttcctcgccccgtgctcgcccccatggtgcccggcccttcgctgtcaaccaagaccgccgtatctgctctgccgttcaagttcttcagctcgcccaggatggcgtgttgctcgctccctagctcagatcacgcggctccctgcggcgctcaccctgctccctgcgccggatccccgttcccctatgtttccatggccgaagctcccttcctctcccagttcgccggcgctcatccatggccgcgccactggctcgtcccctgcgcagcactccagttgcgtcgctgcgagctcgccgtcaaccccatccgggttcctggcgctcctcttctctggctgtcggtcttgtctccctctctcaagcacgacggcacctgggcactgcacgaccacatgtcttctcttgttgtcgtcctcggctcgcgtcggcatgcgctcgccagcttccttgcccgcgtctgctgagcttgccaatgctccatctcgtcggactccagccacctctccatgccacgcctatttccctgtggtcggagctcgccaacgcccattgttcctccacttcgttggccatgtattccctccacacacacctcctgctcccctcgccatggcatggatgaccgatgtatctgctcttgtgtcatgttcaagcaatcactggttggtgggttgtgcactatgtcgggctcaccgagtttttggtgcgctgtcgcggatgccgtcgctcagctcgcccaaatcctagccataattcctgtcacgccctgtgtcggcatgctgactcgacgttgtcgtccttctttatcctcatcttcgcctcgacctcgcgtggtgctcggtcgtgcacagctgctggtcgtcgacgtccctctgagttgtcggtcgtcgctcatgttcacctccgtgtgctgggtggcgtgggtggtaatgtctcggcgcgctgttcgttggtggttcgaggatgtgcttgagccagagatgttccaagtggatactggacgaccttacaccgtggacacgtcgaagatccatagcatactgtggtgccaaggagagaaattcctaggaaccgggtaatgaagcgagatctgtgcaacaactgccaggagctcgaccgaatgtctaaactgagagccgttgtcgccctcgcggttatcaaatcgattcgatcgtggtgagccaatttattatttcggttaattgaattggatagttataaagccacaatgatttttcttgtcgttagcataggcccattatgtgacgatttccagatcggtagttgtaacaccccaggtgtttatattccgctcgacaacgagtacggatttaagcgcgtaatatcagtggctgaaacggatgttgaattttaatcgcattcgtctatctcgattttaatatc

SEQ ID NO: 3448 - DNA, 617 bp, Zea mays
  Clone ID: 700265286_FLI
ctccgaggaggaggccgggaagcggctgtcgcaggtcgtgagcgaccccagcctgaccaagtccggcgtgtactggagctggaacaagaactcggcgtccttcgagaaccagctctctgaggaggccagcgacgccgacaaggccaagaagctctgggagatcagcgagaagctcgtcggcttggcgtgacgacctgatgcccaccgtggccggcgccggcagccggtgacagttttttcctaggacatgttcgttacttgatctcagtcgacgcgtggtgcactcgtgtcagagtgacaggagaggaagtgtgtacactgtacacgtgtaggcatgtttggttgacttttttgttacgaggttttctgataatatagctgtggagagaatctaactataaaaaaaatctaagtatagcgaggattacgtacgaaggaagataaagtagatgaaatgatctaaaaggtatgaagtagatgaagtgacctaaaaggttgagatctagaaagcgacggattcctaatatcgtgacgactcaaacgattctatgtttatgttggttttgtatggttttaacgaatcgatttttataaaagcgggaagaaaaactagagtg

SEQ ID NO: 3449 - DNA, 1091 bp, Zea mays
  Clone ID: 700265290_FLI
gagtcaaatcaaaatgtttggttgccaggtcaaaatgaatcaggcccatacgacacattgtttggttctcattttttttagcttggtccaggggcgaacacgaagaaatagctatgattcttaccaatgatcatcggcaccggaataggggtttccccaagcccgccgctgcgcgatggtgatgctggtcgtcggcgagggagtccaagcgcttccgctgcacctccattcgattaaccccttcataactccttcacggcctggccaacacccgggaggccctgttggacgccggatcccaacgccaatgagaatccgcgacgacggtcaactcactccctcttcgctctctcagttctacctctctcgacgcttcaggcggccagggactaattccaatcaattggttcaaggtgcgccagagctctctgggtcaggtggtcaccggggctcacccgcttttccttccgcgtcgaggacgaccgctccttcacccgcttcgacctggacgacgacacgtccacctcgccgcccgagccggacacgccacgggcggccgccgccgccactggccgcgagaagccgagaagggtcgccgccgggctgacgtcgtgcgcgtcggcgccgtcgcagctgcagctggaagtgcgcggcgggagcagcagcagcaaccggagctggagggcgagcacgacgcgctggccgtcagccctggacgccaccggagtagataggtggagaggtcgaggccgccgcggcgagaggcgccgccgcacccgccgtcgacgccgggtagaggggcgcgtcctcggggagttgagcttggcacgactgtcgctgaagctggagggcgagcacggcgtggccgcggagatctacgagctcacgccagagctgctggtcgtggaggtccggcgcacgtccgacggcgccgccgactacgaggagttcttccgcacgcggctgaggcccggcctgcgcgacctcgtgtgcgacgaggacgagcccacgctccttcagtctgacgagtgctctcagagcctatcgggagtgatgggagagacgagagagaggcgtctgaggagtctgcg

SEQ ID NO: 3450 - DNA, 998 bp, Zea mays
  Clone ID: 700265383_FLI
caatgagctcccacctagccgctgctcttgtccagcgggagaagcagcagcagacaatgagaagtctcagctctcgtgaccttgggcctagtgcggcgcgagcttcggctcttggctcccctctaagctcatcatggtctaagtggggatctccttcggggacaccagattggggcataaatggtgaagaattgggtaagctccggcgctcatcgtccttcgagctgaggtctggtggtgacgaccctgatctctcttgggtgcatacactggtcaaggaatctccaccggagaagcaagttactacggctgaatcaattagttccgttggaccctcaccactaatgcctcccggcatgaacaatggcgacggttctggcctgagcacccagctggatggacacgaccaagccgcggttataggagcgttgcttgaacagatgcagctcgaccagcagattggtagtctagcaacatagactcacgacgcgattgaggtactcaacaaagatggatagctgaaggcggtgatattcagagattggttttctttaattttggggggtaaatcgtacacattattatttgaggttcctttaggttaaagagtgaagctccctcggttgggggttgttccaaggccaacccaggtagagaatcgcaccccggcagcatcggttcatcgactgaagcattaaccctcttaaggaaaaaaaaagttcgctgtgttggaaattcttttcctttctccctagcggtgtttattttgttcattatggtatcgatacctgatgtacttactgatggtgtaagtgggatcctatagtaggtctgtcaagttcaaaaggtatttttttttcttcaccctttaccatttgtcgtggattatctcgtggccttgttttggttagaccttgaggccggcgtaatcctcgtggatgatatttgcaaataaatgtaatatttgctttcgaacttactgctactgttccaatctc

SEQ ID NO: 3451 - DNA, 642 bp, Zea mays
  Clone ID: 700265413_FLI
ggcgtcaaccacaggatcaaataagtcccatatatactcttacctgtttccagcaataggcattgtgtccagtgttctcatttcatggaggattaagcagtattcctcagcccttgctgttcctgaagagctgcaaagttcacctactaatggagatcacaatggtgacgctaagctggcttccgcgccatctaaaaataccggatctgggaaaactaggaagagaaggtaactgacagtatccccctgtattcactatttactacattgtgataccaagtaccaagcagctacagccaatgctagtcaaacatttggatttccacattggtttaccactacagtaagctgtcttgtctgttccatgccatgatcttttgggggggtatttaacagatgcgcaggcagctaccttcttgtttgtcaattgtcaatgagcttctgttcttgtggcagataatatcataaaatgttgtaacagatgcgcaggctcacatagtcacatgttgtacacccgaataacctggtggtttagatttggatcgtcctgagttcaattgtatcctggggatcaatattggttttccctccctaattattgaacttgacatgtgcacggtgtagtccaaccagtttatgttc

SEQ ID NO: 3452 - DNA, 487 bp, Zea mays
  Clone ID: 700265419_FLI
ggacatctatgcgaaatgcagctagccagctacactgatgtagagatcattcaggcagtttaacctctatactgtatcattttgatttcacggtgatctgcaggggcaagcctgataaattctgcaaagacctcccattactgcaagtttcatgtggcatccctgctcgtaccacttatttgttcttgttacgacctggacttgtactttacgcgggataggaacgaagtacagacctagtgtaagaaggcggtactttttaccctcgtactgcttgtaaattgtaatgtgtagcatatattagagcatgataacttctgctgcatatattcgtcagtgtgatcactcaaggaatttgtgcagcagaattttgtcatgtcgatgttgtaagttgaaggatcacattgcttgtaaaatttggcagcatgttgtcttatcctcggatgagtatgttgttgtagaaacttgcatttggcctttgctctgc

SEQ ID NO: 3453 - DNA, 1049 bp, Zea mays
  Clone ID: 700265457_FLI
gcgcgggcggcgggcgcggaggccgtgtacgctcacggggaggtatcgcgggacgaggtccgcgccgaggagagggtgcaaaaggctgtggagaaggagggtatcaacgtgaagtacttctggggtagcacgctataccacgtggaagaccttcccttccgcctcgaggacatgccgtccaactatggcggcttcagggaggccgtgaaggggttggaggtcagaaaggtgctggaggctcccgaggaggtcaagtgcgtgcccatgaagaatgtgctcgagcccggtgacatccccacgcttgctgagctcgggctcactgcgccaccagccatgtcacaggactcaaaacctgctgttggctctactctcattggtggtgagacagaagctctggagaggttgaagaagtttgctgcagaatgctctatgcagccaaacaaagtagacaaaagcaatacccaagatagcatatatggtgctaatttctcttgcaaaatttctccatggcttgctacaggttgcctctctccacggttcatgtatgaggagttgaagaagcatgctactaaagcaattccttttgggtcaacacccaagaataatgatggcacatctgatgctggaacaaattggttaatgtttgagttgctgtggagagatttcttcaggttcatcacaaagaagtacagctctgtacagaagacatctgaagttgccactggctgcactcccgccccagcgcttgcatgaacttacttagacaagctgattgccagctgcttttttggggtgataaacttatgtgcattttcaatggagtcttttttttgccgccaataatgttggtagtcaaagtgaacgccgaatgcgcattcctgcgttttggtttggtcgatgtatttaatgctgtcgacatccctccaaatgactgttgaatgcaaatgatactgtgagcaacctatcatctgctgtgtaaatgtgttctgtcgacgttcctccaaatgacacttcgatgcaatgatattgtgagcaacctgtaagctgtt

SEQ ID NO: 3454 - DNA, 2148 bp, Zea mays
  Clone ID: 700265460_FLI
atccgtcgctcgggcgggggcctcggcgcgctcgtgttttacgtcacttccttctctatatactacgtttcgatttcgaggcgggtcggcttcttcttcaccggttgatttgttccgctgctttgcgcctccgtgctctcgcagatcccttggggccgtctcgcctccgcgcgacgccggcagcgagctgagtttggtttcgccgggttgctcggtttgcggtttattcttcccgcgattttagtttttgcgtcgatcctgtttcgtcctcgccttctcagcgtgtgggttgcaggattttgggtccgatccggtcttaggcgttcgtcatggcgtcgtgtggcgaggagatggaggcaggtcagtcttctgtcagatccggcggttcattggttatcgagagattagttgaagggtgtaggtttgcttatggttcattcctcgttttggttcattcctcgtttttcgttttgatgtcaccatattggtgtgaagattgccaccggacttttactataaggttgttgatccttcattggagatgctgctggctggatctgcaggggcaacaaagttttggaagtagattgaggcgttgactggactgatgttcatagtatcgggagaagatcgttcggatatatatatttacctaaatcgctcatctgttagttcatactcattttttgtccgctgcaattcttaattgcttaaattggggctggtggttttctccagcaactcgattgaatggatggatgggtcggaggcgagtttgatcctgcttctccttgtgcaatcaggagttcggaactgtttagagttccttgcgtttgttcactaaccatcctctctcctgtcttccttcaaaaattggcattataagcttgattacccttcattggaaattctgcttgctggatctgcaggggcagaagagttttggaactagattgaggcgttaactggactgttgttcatagtatcgggagaagatcgttcggatatatctacctaaatcgctcttctactattggttcatatttaatttctgtccgctgcaatttttagttaattatattggggctgatggttttctccagcaacaagattattatatggatggatggatggatggtgttcaagcgccttgcctgtcctgtcttgccctttgtcccttcgtcgcctcgggcctcggcgtgctcgcattttccattacttcgtttcgattttgagccgggtatcatcttcacctgttgttttgttccgctgctttgcgcctccgtgctcccgcagatccctttgggccgtttcgcctccgcgcgacgctgggagcgagctgagtatggtttggctgggttgttcagtttgcggtgtattcttcctgcaattctagttttcgtgttgattcggtatcgtcctcgacttctcagcgtgtgggttgcaggattgggcccgatcggtgttgtgagagttcgtcatgatggcgtgtggcgaggagatacaggcaggtcagtcttctgtcagatccgacgttaattggttttgttgattggacatggattgatgatttctcaggctcaaatgtatccgggtgtggtaccatcagaacctctcgtagcctgcacaccaactggattcggcccgttcttattttaattgctgatctcgcttgtgtcctttttggtgttagtcgtcctgacttcagaagcagaagaaagggtccagcgctggttacggagatattagttgaagggttgaggttttcttatggttcattcattgtttttcgtttgatgtcgtcatattggtgtgaagatcgcaaccggacttactataagcttgtttgcacttcattggaaatgctgctggctggatctgcgggggcaacagagttttggaagttgattgaggtgttgactggaccggtgtatcaggaaaagatcgttgggatatacataccaaaattgcttttgtattggttcgtcttcagtttctgtgcgctgcaattctttgtttcttatattggggccggtggttttctccagcaagattatatggatggatggggttggaggcgtgtttgatctggcttgtgcttgtgcaatcagaagttaggaactgttcagagttccttgtttgttcact

SEQ ID NO: 3455 - DNA, 2284 bp, Zea mays
  Clone ID: 700265464_FLI
gctgagcagagctgacttttgctccgcttgccttgccccaaacctcatattcccctcctccttgctgtagctatagctgtagctttcaccccactccctccacggcaccgcgcctccctcccccccttccccaaatcctcctcccctccccaattgggccaatagcccgctccgcttccagtcgcggcgtcggtcggggaagaagcttcgctcccgtgccgcagatcgggagaggagctccccgctcccgcctcgtcgtccgcttccccgccgccggtctctccgggaggcgtctccgtcgccggcgatgagctgcttcgtctgcttcgggtcggcggcgcaggacgaggagcctaggaagcccgctgccgcgggcgccggcaaggacgccgcgccggatcgcgcagtggctcgcgtcggatcagataaatcaagatcacagggtggaccagactctaagaaggatctaattatccataaggatgggaatagtcaaaatattgcagcacagactttcacttttcgtgagctcgctgcagccactaagaacttcaggcaagattgccttttaggagagggaggttttggtcgtgtatataaaggacgcttggagaatgggcaggctgttgctgtgaaacaacttgatcgtaatggtctccaaggaaacagggaatttctggttgaggttctcatgctcagtctcttacatcacactaacctggtcaatctaattggctactgtgctgatggtgaccaacgccttcttgtttatgagtttatgccattggggtcactagaagatcatctgcatgatctgccaccagataaagagcctcttgattggaacacacggatgaagatagctgcaggtgcagctaagggcttagaacaccttcatgacaaggcgagtcctcctgtgatttaccgggattttaagtcatcaaacattcttcttggagaaggatttcatccgaagctatcggactttggccttgcaaaacttggtccggttggtgacaagacccatgtttcaacacgtgtgatgggtacatatggctactgtgccccagaatatgcaatgactgggcagctgacggttaaatccgatgtgtatagctttggtgttgtgttccttgaacttatcacggggcgtaaagcaattgacaatactaagacccaaggggagcaaaatttagtggcatgggctcgtccactgttcaaggaccgaaggaaattccctaaaatggctgatccaatgcttcagggccgcttccctatgaggggtctataccaggccttagccgttgctgccatgtgcttgcaagagcaagctgctacacgtcctcacatcggggatgtcgtcactgctctctcatatcttgcttctcaggcatatgacccaaatgcccctgttcaacacgtccggagcaattcatccacccccagggccagaaaccctgctgggtggaacggcgaccagcgcagcgtgcgctcgcctaaccatcattctccagacccgcggcgcagagacgctgcgggggcatccaagtatggagcagaggttagcaggactagctctaccagcgactctggccggcgatcaggcctggatgacatggacctgaccgggtcgcaagtgggaagcccagcgcagaccggaagaagaagagaagctccaaggggcaccgacagacagcgtgctgtcgcagaggccaggacatggggggagaattcaagggagcgaacaaatggccatggcagcttcgacagcacccatgagtgaagccgtcaggttctgttccagtcatcattccagaacccccaccatgggttgagtccactcattcatcagcaccagtcagatccgatcttgggacatggcgtcggtccaagtgtctgtgaataaggcttttcttgccctcctgtggcgaatgcaattctcctggcgcccattccttgccaatgcgacctgtgtgtgtcatgcctctggcgactgggagcctcaggaggagcctgtaggattcagtcagaggtagacaggtcagtgaagaaagaggaggggcgcggagtcacattggcgagtgttttgttttttttggcggctaaatgctgagtatgttcagctgcatgtgtcctttttgtgtatgtgtacgtgtaagacgtgtaatagcaaccgtgtcaggtttggctacctgagaggcctttgaagcttctgctgctgcttccttccccttgggaattgggagttcagagttgaaatgtaggataggcgatgttgttgagt

SEQ ID NO: 3456 - DNA, 995 bp, Zea mays
  Clone ID: 700265474_FLI
gtgcaaccagtgaacagccccgtgacggtttgcggtgatatccatgggcagttccatgacctaatgaagctcttcgcgacgggtggccacgtcccagagacgaactatattttcatgggtgattttgtggaccgtggcttcaatagtctagaggttttcaccatcctattgctactaaaagcgaggtatcctgcacacatcacccttctgcgtggaaatcatgaaagtaggcagttgacacaggtgtatggtttctatgatgagtgtcagagaaagtatggcaacgccaatgcatggaggtactgcactgatgtttttgattaccttacgctatcagcaatcattaatggccaagtcctctgtgttcatggtggtctttctcctgatgtacgcactattgaccagatacgaacgattgatcgcaattgtgaaattccccatgaaggccctttctgcgatcttatgtggagtgaccctgaggagatagagacatgggctgttagtccccgtggagcaggttggctgtttggatcgcgagtaacagcagagttcaactttgttaatggtatcgagctagtttgccgggctcaccagctggtccaggaaggcttaaagtacatgttccaggagaagggccttgtaactgtgtggtctgcacccaattattgctacagatgtggcaatgtagcttctatattaagcttcgatgagaagatggaaagagatgtcaagttcttcacagagacagaggaaaacaaccagatgcgaggcccaaggactgcagtcccatatttcctctgacttcaattgtacattttagaagtcaacatttaaatctgtaagggctaaagatcagtcagatgtgtttattattgtaggttcagatcatagtgcaatcttatgcatttgatttctctttttcttttaaccacatgtacaatagaccatccggagtctcatgctcctgtattcgttcagtgacactgtcaaagttt

SEQ ID NO: 3457 - DNA, 1701 bp, Zea mays
  Clone ID: 700265480_FLI
gtctgacccaaagtgggctgaggtggcggagcgagtggccgaggctgaggcgcattttgtgcctgaggaggccaaggctgtagaagggagggcgaagaaggctgaggagcggctgctgtccgttgacccgaggagtggagatccggtgcctgccattgaggagtggaaggaagatctcaggccaaaccgtgtcgattggatatctctgcttgagcggattaaggcacggaatgtcgagttatacctcaaggttgctgaaattctgctagatcaagaatcttttgaggcaaacatccgagattactcaaaattaattgatcttcatgctaaagcaaataatgtggaaagtgcagagagagtacttggtaaaatgaaagagaagggtattgcacctgatgtcatcatatccatcgtattagtccacatgtatagcagggcaggcaagctagagcaggccaaggaggcttttgattttattcgtagggaggattttaaaccagatcggaaactcttcagttcaatgattaaatgctatatcaaccatggagaaccagaacaagcagaaaatctgataaaagttatgagggatacacgtgtcaaacccactagagaaatctacataggtctcttacgatcatatgttcagcgaggcttgatggcatatgcagagagggttcttaagacaatgtcatttgatagagtcgagcctacacaggaactctatacaatatgtatagaagcatatggacgtgttggtgatccaaaagaggcctgtgccatgtttgatcaaatgaggaggaagtttggacacgaagcagatgacagttcaattgctggggtggtggccgcatacatgaagaataaccaactagaccatgctttgcagtggctgctgagtttagagaaggaaggacttcaacttggtgtcaagacaaatctcatgttactggattggttgtctatgttgcagctagttccggaggctgaacagtttgtgcagaagataaagaatcttggagaagagcccatagaagtccatgtgttccttgccgatatgtatgcgaagtcgtcccaggaagataaagcccgcaggtccctcaagatcttggaagagaagaagaaactattgaagtctgatcagtttgagagggttataagaggccttgtcgatggtgggttttcggaggaggcaaataaattctacaaaatgatgaaatcctgtggctttgaaccatcaaaaacaatcgaggtcgctgttaaggctctcaggattaggggcggttctcatcgcactggtaggtagagcctgtacgccggcagagtggcagtgatctactgggcacgcagtcaggcaaagagggattctggtgtgagaaccttgtggcactgacacggtacaatcaaattgacaaaactcagtgctgaaagatggtttggccaattttttttttctggttgtcaattgtctcgaggcgcgacgttgcttccatagactatgtagttaataggtcctggctaaatgactttgttgtttccagtgatcaggattttcacttgtattagatgaggtttgaagtgattgtaacactgatccatctttcaggttgtgccaaggaaaacatatatccgcgattagtggttattactctgttcagacatgcaatgatgtaagttaataaatattccttctggcttccggtc

SEQ ID NO: 3458 - DNA, 2179 bp, Zea mays
  Clone ID: 700265503_FLI
gaaatctacagtctacacacagctgaccagagaggcagagagtgcaagcgatctagcaagttttaatcttggaagaagccagctaggcgcgtgaatggatcgcctcactgtgatggcgccgccgctgctcgtcctcctcctgctgctcctctcgctgtgctcggcggcggcgccacggcgcggcgggggctggtgggaggagggcgagggggagtggaggccgagcgaggaggaagagaagggcaaaggcaaagggagggggctgttcctgctgcaccgggtggagaaggtggtggagtcggagggcgggcaggtgcgcgtggtgcgcggccagccgtggccgccggcttccttcgcctgccgcgaggggctcatgcacatcggcttcatcaccatggagcccaagacgctgttcgtgccgcagtacctcgactccagcatcactctcttcgtgcagcggggtacatgctgttattattatttctatctatgcgcgtggtggaggatcgtgtcgttcgttcccgatcgatatgagatgcaatcgcgtggtattgtgatgatgagcaggggaagcgaaggttgggtatattcacaaggacgagctcgtggagaggaagctcaagatgggcgacgtcctccacatcgacgccggctccaccttctacatggtcaaccccggtaaaggccagaggctgcagatcatatgcagcgtggacgcctccgatagccttggctttggacctccttatcaggccttcttcctcggcggcgcaggggacccagcgtcggtcattgccggttttgggccgaagacgcttacccgtgccttcaacgtgagatacatatactaatctaatatgaacattttgcatggatcgtgctctaagtgacacaggtaggcggtagcagctagcagtacagtacccataacttgcatgtcttctactaggccacctacgacgagttggcgcgtatcctgttgccacgaaccggcggccccatcgtgtactacaccgcggacgcggagccagagagcggtgccgccgaagaggagcgcgggcaggtcgacgggcacgacggtgtgctggacaggggagcgcgacgcgagggagctggcgcgtggatgccgggtggcaggggagacggaggcgacgagtgcggcggcagcgatgacgcgcgtgtggcgacgtcgtggtggacgaagctggttaacagggtcgtcggaggggcggctggcggcggcgtcgccgcggaggcgaacaggaagggcaagaagaagggcggcgcgccggagccgtacaacctctacgacagcgagcccgggttccggaacgcgtacggctggaccgtctccgtcgacaagcaccagtacgagcccctcaagcaccccgacatcggcgtctacctcgtgaacctcaccgcggtgcgcgccctgcctgaatcatatcgacccgcccgctttcttgttggattactttcgccgtttcgcgtcatggcagacgaggggtcgctgctgatgagctcgtcgcacgcacagccaagctgatcatcgttcatctgcatggcaggggtcgatgctggcgccgcacgtgaaccctcgggcgacggagtacggcgtggtgctgggcggggaaggcacggtccaggtggtgttcccgaacgggtccctggcgatgagcgaggtggtgcgccccggcgacgtgttctggatcccgcgctacttccccttctgccaggtggcggcgcggggcgggcccttcgagttcttcggcttcaccacctcggcgcgccgcaaccggccgcagttcctggtcggcgcctcctcggtgctccgtaccatgctagggccggagatcgccgccgcgttcggcgctcgcgagaaggagctcagtaagctggtgcgtgcgcaacgggaggccctgataatgccgtccttccctgggaaggaggaggaggaggagcatgggaagaaagggagggagagggaggagtcactgccgatggttgtcgagcaggcggcggcggagtgagctcagctgcttgatctttcagtcttggcttcctgagaagcacgcgcgcctccgaaaagtgtttctactctgttactgcgccttgtcagtgatcgtgtttttttttttggcgccgtctataaatagaagtgctttgggcgtttacagct

SEQ ID NO: 3459 - DNA, 1619 bp, Zea mays
  Clone ID: 700265541_FLI
gacccatcaacaacaatgaatcaaatgtagctagacttgaggcgatgggaaagttgaatgatgagatgcaaaaccgctataactatcatgctcctggtattgaccctcatgttgcagctagtgctagccggaatgccaatggttttatgcctatgcaggccaattttggttgcatgtcctctacagttcaatctgttgttgatgtttcagtatccagcacatctcaagatcagtgtgatttgcaacttggatttggtgcacagaagcagcagatattttctaaccatggagagcttagaacggctacacctggatcccctctgcctgggagcattgccagaaaagattctgtacccactgaaccctcacattttgggagcatgaatggacctaaatcttttcccactggaacatctcagtttgggggctttgcaaagcctacttttgtgcctgctgcgccttctcagtttgggagcatggctcaagctaattatgtacattctgctcaatcctcccaattcacaagctgggttcaaccgaattctattcctcccgctgaatcctctcagtttggaagcaaagcccaatctagttctgtgccccctgctaatacctctcagttcaggggcatggctggacaaaattctgtacctcctgctcagtcttttgggagcacggttcgaccaaattatgtaactccagaatcctcacagtttgggagcatggccagaccaaattctgtccctccacagtatgttaacatgcccagccaaaattttgtgagctcatccgagccaacactggttttggggtatgcaccacagattggaagtggccctccacctcaagtacagttaggatgggatttgtccttgccaaggatggttactggcggcagcatggtcacttgtttatgtatatggtgcaacagtcagttccatcattttggccctgttgatggacagcagcccagttcttttggcttcatttgccccacctgtaaagataggatgtctggtcatcacagtgtgcccaacaatggttcatggcagccttgaggtgcagcgctgtctggttaatcatctgtattgctgcattcgagggatcttgtggttttctgtacactactcatgcctgtcgactgtcaaggtctgaaaatggtcttctcaagcagcagttgtccgtcctccaagttgagtggactgccaaggaatgaacggcatctctgtatcaacagtgtcagctgggagctggtgtagtagggtaatgagagaagctacttttcaagatagcaatgggagaccatgatgaatccaggccatatttatattttttcttgaatccaccagttacgttacgtgggaatgtcttgagttcactggttgcattacatctggaattttgctgccctcggatgacccagccacctttgcattgggctccgaggatgttgccactcagcttccccatgttttggtttactttgagttctagcagcgatgggagtggcctttgttattgcagtgtcttggtggctgtgtaaagtatgcgttagctctagctgtctcaggtttaatttgtccccattgaagtagttgtgcctttgtcgatgattgctc

SEQ ID NO: 3460 - DNA, 1322 bp, Zea mays
  Clone ID: 700265558_FLI
cgacaagcccacaagcgttttcctctccgagtcctccctggcctctcaaccactcatcatcgccttcgcaggcatcgccctctcgccgggccgtccgattccgccatggcttccgatgagagcaaaaattcaaaaccagagaagccatcttcagcagctggtgcaggcctccccaatccgtttgatttttcttctatgagcaacttgctcaatgacccatcgataagagagatggctgagcaaattgcaagtgaccctgtgttcaaccagatggctgaacagcttcagaaaagtgctcagggtgctggagaacagggtattcctgcattggatcctcaacagtatatggaaacaatgcaacaagtcatgcaaaaccctcagtttgtgtcaatggcagagcgtcttgggaatgcccttatgcaggatcctgctatgtccagtatgcttgagaacttgaccagtccagctcataaggagcagcttgaggagaggatggcccgtatcaaggaagatccatccttgaagccaattcttgatgagatagagaatgggggtccatctgcaatggtgaagtattggaatgaccctgaggttcttcaaaagattggccaggcaatgggtgttaaccttcccggagattctagtgtgtccactgtgctctctggacctgaagagactgaggaggaaggaggggatgacgatgagtccattgttcatcacactgcaagtgttggtgatgaagagggtttgaagaaagctttagaaggtggagcagacaaggatgaagaagatgccgagggaagacgggctttacattttgcatgtggctatggtgagttgaagtgtgcagaaattctccttgaggcgggggccgcagttgatgccctagataagaacaagaacactccgttgcactatgctgctgggtatggtcggaaggaatgtgtggatcttctgttgaagtatggtgctgctgtcacgctccagaatctggacgggaaaacccccatcgaggttgccaaactcaacagtcaagatgaggttctcaagttgctagagaaggacgctttcctatagagaagagaaccgccgaataaagtgtatcaagccgtcaaactattggttttgcattggtttatttatctcggtctggtatggttgtctgtagcttgtgaatttgatgttcttttcatagcgaatgccgtttttgaaccagtacttgtgtaagaagtacctaggcttgttcttgtcctccatatatgaatctttcacacttgtcaagaattgattacagttattttcaaggctatttcctccgttcc

SEQ ID NO: 3461 - DNA, 645 bp, Zea mays
  Clone ID: 700265563_FLI
gggcgccaagctgatattccagttgcaaaaggagccctaggtcctaggaagaagcaacgagccatggcctccggtggcccgaaacccaaactggcctacatcatcttgtacgtgagggacgtggagaaggccgcctccttctacgacgccgccttcggctacaccgtccgccgcctcgaccagtcccgcaagtaaaacacgcgcgcccgcctgatccggatgcgcgcctaatctgccgcatctgcgcgcctttctgggttttactttgcaggtgggcggagctggagagcggggcgacgaccatcgcgttcacgccgctgcaccagcgggagacggacgagctgtcgggggcggtgcagctgccggactcgtcggccgccgggaggggctccgtggaggtctgcttcgcctacgcggacgtcgacgcggcgtacaggcgcgccgtggacaacggggcggtggccgtgagcgcgccggaggacaagccctggggccagaagtccggctacgtgcgggacatggacggcaacatcgtgcgcattgcgagctacgtgcgagagtagtcgcattccgctgcatcaccatcgatcaatcgatcagcctttcccatgcatgtctcgtatactacacgtttacacgtgtacc

SEQ ID NO: 3462 - DNA, 1631 bp, Zea mays
  Clone ID: 700265676_FLI
atcgaaccatgaagaagtactctgataaccttttgcatgcactggaaggtgtaagctcaaggctttcacagatggagggtagaacacaccaactcgaaaactctgttgacgagttgaagttaacaatcggtaactataatggtagcactgatggaaaactgaggaaccttgagaacatgctcagggaggtccaagcaggtgtgcagattttgcgagataagcaggaaattgtcgagacacagctccaccttgcgaagctccagacaaacaaaaccgatggccaatcatcagaaaatagtgggtctggacaagctggcttacagcagcagccggtggttcctccacaagcagccattcagccacaacaagtcctaaccccttcgcaaccacctgcacttcctgcccttcctgctccaaatgcaccgcctccacctccaacgcttcaaaaccaatcatcattacagtttccaagtcatttacaacattcacaggtaccatctgtgccttctgttgcactggcacccacagttccagctttaccaagggatgcttactatgccccatctgctcagccgactgagaccatgcaccagcagtatcaagctccgccagttccacagccacaggcacctcctgcaccacctcagcagtaccaatcccaaacccagttccctcaatatgcacagccacctcagcctgcaaatgttaacccttcaactccccatgtgccccatgcaccccagcaaccagaggaaactatgccttatgcaccagctcagagctatccacctaatgcaacccctccaccttatatgcaaccacctagtggacctgctcctccttactatgggcagcaaaaccctagcatgtatgaacctcctgcaggccgggctaaccctgggccaccatcatcctacggttctgctgggtacgggccacagggtggaggtagtttctctgaatcttatggctatactggatctccttcccaccgtggcaatgctggaatgaagcagtcttcaccttttgctcaatcctctggaggaagcggcagctatggcaatggcaagctccccactgcccagatgcttccacaagcagtgccgatcagctcctccagcaccagcggttcttctggcaatagagtgccacttgacgatgtagtggagaaggttgctacgatgggattctcaagagagcaggtgagagcaaccgtgcggaggctgactgaaaacgggcagaacgttgacctgaatgtggtgctcgacaagctgatgaacggatgataagttgagcaatactgtcatttcacagtcccgcacagtagtatggaaacttggaaagtgtcagctcatcagctgaaacgatttttctgtctgcaacgttgcatacctgattgtgcctggagaacaataatggccgaacagccgctcatcctgattgccggtcacggttgcttcatctgaaatggaaacagctcagtgtgcctgtcagtgaattacagtatcacaatctgaatacgttgtccattttatgtatatgtggcgatgagacattccaaaacatatactgtggtttcttgtgatatgttaataagcagctttactctgtttttaggcagtgtttcagct

SEQ ID NO: 3463 - DNA, 1103 bp, Zea mays
  Clone ID: 700265678_FLI
cgtctctcttcaccgttggtgccaagttcacaagtatcagatctggtgataaatgaccgggaaaaagaccacggcctcctctgccggccgcactcgaaagaaggccaaggtggtgttggaggatgaggaagaggcagggttggaagatgaggaagaggcgactgtgacactatccgtggagaaggacgcactggagtgtgacatctgctgcctacccttccagtccgaagtttttatgtgcaagaacggacattctgtatgtgcaaaatgctgcatccgcacgaacggtaagtgctggacctgctccgagcgcattggcgacatacgttgccgtccgctcgagaagctcctggcggcggcgaccacctcctgcatgttcaagagcaacggctgctacgacgtcatcagctacctggagaaggtgacccacgaggagacatgccagcgcgcgccgtacaagtgccccgtccacggctgcgcctatagcggcctgcggctcggctaccacgtcgcacaggaccacggccacgacgacgacggcctcgcctccgtcgtctttatctacggcaaggcggtggcgaccgtgcgcaaggacgagccgttccgcgtcctgctgcagcgcaacacggagcgcgtgttcctgctgctcaacggccacgatttgctacaggggcgctcgctgtccctgctctgccttggcccgcgcttccaggatggcgtggaggtggagctgaagtataagatggaggtgagcggcggtgcgccgggagcgctcacgctgtcggcgtctggcaccataccgttcgcccggcggctcgatgggttccaggccaaagggtttctcttcgtgccggatgcatactggggctccgccggctcgatttccgtcaccgtcagaatttacgtctgacgtcgcctcgtgctagctggtgtggtgtggataggttgattcctactggtcaaccgttcgttcgtctcgttggtacttaccctggttcagtggttgtttatgcactctacgtgctgatgctagtacttttgttaatcgcaacaacgtatgctagtacttttgttaatcgcaacaacgtatttcctgtcgtttt

SEQ ID NO: 3464 - DNA, 1822 bp, Zea mays
  Clone ID: 700265711_FLI
gctacgagtctacgaccagttcggcagcacggcgagcatcccgtccgaccatccgctcgctcctcagagctagcctccaaactcgcaactatataactaccgtcccttgcaactttccagaccttttgcccccctgcttcctccgcctgcaccctctcacgagcgcccgctcgcccagatctagggttccatccgcgggcaagatgagcagcccccatggcggcctcgacgaccagatcgagcggctcatgcagtgcaagccgctcgctgagcccgaggtaagggctctgtgtgagaaggcaaaggagattctgatggaggaaagcaatgttcagcctgtaaagagtcctgttactatatgcggtgatattcatggacaatttcatgatcttgctgaactcttccgaattggtggaaagtgtccagatacgaactacctgtttatgggagattatgttgaccgtggttactactctgtcgaaactgtcacacttttggtgtctttaaaagttcgatatcctcagaggatcaccattctcagaggaaaccatgaaagccgacagattactcaagtttatgggttctatgacgaatgcttaaggaagtatggaaacgcaaatgtctggaaaacatttacagatctatttgattacttccccttgactgcattggtcgagtcagaaatattttgtttgcatggtggattatcgccatccattgagaccctcgacaacatccgcaacttcgaccgtgtccaagaagttcctcatgaaggtccaatgtgtgatcttctgtggtctgatccagatgatcgatgtggttggggtatttctccacgtggtgctgggtatacctttggacaggatatatcagagcagttcaaccataccaatagcctaaggcttattgctagagctcaccaattggttatggagggtttcaattgggctcatgagcaaaaggtcgtgactatatttagtgcacctaattattgctaccgctgtgggaacatggcatcaatcctagaagtggatgattgcagggaacatactttcatccagttcgagccagccccgagaaggggagagccagatgtaacccgtaggacacctgactattttctgtgatgcaaaagtgacgtggatctgcagcaaaggtttgatagataggcgcagtttcctggttgcagagatatataaatatatatctactatatatattggctggagttcctccgcgtgctattcttatattatttctcgcccatggcgctcttggctgtcgccggctgctttgctgcatcgtggttcaagtgtataccctactacagctggaaggactggatcgtgctcttacggtcttacctgtctctaactggttgattggcttagggtgggctgcggtggtgtgtgtgtgggttcaagcatcaggcagccatctgtattatgggaggaagtgttcccgttgtattcattttgttcccctttcttcctcatctgattttcttctcttttttttttttttatttcttctctgtgattcttgtagagttcagaacttgtatggttctatgttgggccattagtttttttttaactctctttctctgactgccccgatttgccgtatagaattacatttctaagcgcaactagccaacctgtagcattttctgtcaccagcatttgaagttttgaactgagccctggtcgtgtccctgaggtttgatgtgctcttggtgtactactcgtatttgctaattagaaaaggaccttttgtgggtttgctagcgtttggtaataacgcccacgctagaatgttt

SEQ ID NO: 3465 - DNA, 1451 bp, Zea mays
  Clone ID: 700265806_FLI
ctgtggcatgcccattttctcgactaattcggagttttctgcagcaaaaatgagtgacaacctgatggacaaggttagcgcctttggtgagcgcttgaagatcaccgggacagaagtcagcaaaaagatgactgccggaatgagctccatgagtttcaagatgaaggagttgttccaggggcagactccagctgacaagattgttgagggtgccacctcagaggatctggacgggcctgactggaactcaaacttggagatttgcgacatgatcaacacagagaaggttgacagtgtggaactcatccgtgggatcaagaagaggatcatgctgaaggatgcgagggtccagtacctctccttggtcctgcttgagaccattgtcaagaactgtgacaaggccttctcggaagttgcggccgagcgggttcttgatgagatggtcaggttgattgatgatcctcaaaccgtggttaataacaggaacaaggcccttatgctcattgaagcatggggggagtctggtgatgaactccgttatctgccagtctatgaggaaacatacaagagcttgaaatcaagaggagtgcggtttcctggacgtgacaatgagagcttggctcctatatttactcccgcgcgatcagttgctgaagctgatgttgatgcaagcttgccccagcaggtgttcgaggacgtccatgttcatacatatactgctgaagaaacaaaagaagcatttgatgtagctcgtaacagcgtagaacttctttcaactgttctttcctcttctcctgagcaggatgctttgcaggatgacttgacaaccactcttgtgcaacaatgctaccaatctcagcacactatccagatgattattgagaccgttggagacaatgaagctgtgctctttgaggccttgagcgtgaacgatgagatccagaaagtattatcgaagtacgaggagatgaagcagcccagggcctccgagcatgcagaacatgtaccagttgtcataccgattgctgcggagcatgaagatttgaatgctgttggcaatgaagacgcccttgtcagaaaaccagctgccgcgagagcaacgtcaggtggagatgatgacatccttgatgatctcgacgagatgatatttggcaagaagggaggtagcagctcccaggaaggtccgaaaaagccagatccgaagaaggatgacctgatcagcttttaattacctttccataatcgcagccagtacttgctattgtctggtgctgtacccactcggtagattgaagatttttattcgcatacgattcataccggtttgttcagttaagtcgctacactttgtcaatcttgtttcatggctgggtcccatgaccatgaatgtattgtattggatggtggattatgcgagacggcgggaaagtgtccaatgtgggtgaatcttt

SEQ ID NO: 3466 - DNA, 725 bp, Zea mays
  Clone ID: 700265809_FLI
accgttgctgcacgccaggagcaggccctcgacctcccagccgagcggtccttgttcccatggcgcgtgctcgacttcagcctggaatccctttgccgttgccatgacagccgccggccgagtctcttcctgtcgtgtgtccagtcctctgcgcagcgcgcgcgcctggctcgcttctcttgcgcgcggtcctctgttcctgcgcgcctgcgcgcagctcgctccctggctcgactctgcccagttcgtgtcctgctcgccggtcgaattctttgcgtcgcacgcgtagcgttttgttattcctacgcgtgctgccgcaaagctccatgttcagttcgcctccgtcgcgttgtcgtgcgcgcgaaactgtttgcagtcgatatcaagtccgtgacacgcgcgccggacacggtaaagcgttgcgtgggcttgtatccgagtccgcccgaccgtgacctcgctttgcttctcgtgtcgctactcgccaagtcctttccccagtccgcgccataaaattcactcggacacgatctcgtcgtcgttccgtgcgtcatcaagaaatcccgagaatcgggtgaagacgaagctagcagcatggtatttaccaagtgctcgacacaagagctaaaccagaatccttgccgtgttcgcggatagcgcgtcagatttagaatggtaagccgatttaaaatttttgttagcttaattattgaagtagttcaatg

SEQ ID NO: 3467 - DNA, 788 bp, Zea mays
  Clone ID: 700265919_FLI
gccgcagcgagataaagcggatcgagaacccgacgcagcggcagtccaccttctacaagcgcagggacgggctcttcaagaaggcaagggagctcgccgtcctgtgcgacgtcgacctgctgctgctgctcttctccggctccgggaagctgtaccactacctctcgcccaccgtgcccactgtcaaggacctggtcgagaggtacgaggccgcgacgcacagcaaggtctgggccgacgttcgccaggagcggcgcgcggagctggagaaggcggagcggatgtgcgagctcatggagaaggagctgcggttcatgacggtggacgacggggagcagtacacggtgccgtcgctggagcagctggagcacagcctggaggcggccgtgcacagggtgcgctccgagaaggaccgcaagatcggcggcgagatcgactgcctccagaacattatcagaggacgccacgaggagcgctacgggttgtgcgacaagcttgctcattctcaggcctggaacaacggcggggaaggtggagggtcgaccccaccaagcggcggcggcctggaactcaaactgggattcaactgacgctggctggcttggaagctggaggatggatcgaagactatgcgctgcttcattgtaccctatcactctgtcaggctacctccccccctgcaccctgttggttatggtttaaaatggttgttgaccaaagttgtcctggatcaaacaaggctcagcttgatgttaatgagctgagggatctaatgtattattagcctt

SEQ ID NO: 3468 - DNA, 1249 bp, Zea mays
  Clone ID: 700265955_FLI
caacttccaccagacccctaaccttttcgcagctccagcgcacagccgccgccgtttcttcatcttcttcgcagagccggcgctccatcttcggctccctcccttacttgcgctcggcacgcgggcggcgctgtggctcgggatctcagtgacggcatcaagggcttcccctcccgcctctcgccagtcgcctccggtcctccgcacaccggccggtgatctctctcctcccgcctccggtggatcgtcaacggcgcccggccccggcggctgcgtcgcgcgcgtcctgagggcagctgcaggcgctgctcgaccaaggcggtcgcgccgctttgggagcggtttatgccccaaagtgaagcgtgctcttagtgccgctctttggaaccctggctactgctgttaaatggctcaaccttcagtcattctagcaactgcaagttatgatcacacaatcagattttgggaagccaagagcggtcgctgttaccgcactattcagtatccagactctgactggcacttgccaacgagaatatgaaagtcgtgctgcagttaacactgtagttctgcacccaaatcagaaagagctaatatctggtgatcagaatggaaacatacgtgtatgggatttggctgctaactcatgcagctgtgagttggtgccagaagttgatactgctgtaagatctctgacagtcatgtgggatgggagtatggtggttgctgcaaataaccgtgggacatgttacgtttggcgcctgcttaagggtactcagacaattacctgcttcgaacctctgcacaaactgcaagcccatgatggctacattctgaagtgcctgctttcacccgaattttgcgatccaaacaggtatcttgccacagcatcatctgaccgcactgtaaagatttggaatgtcgatggcttcaagttggaaagaactttagtcggccatcagcgttgggtttgggactgtgtcttctccgtcgatggtgcttatctgataacagcatcttctgacaccacagctaggctatggacgatgtcgactggagaggccatcagggtgtaccagggtcatcacaaggccactgtgtgctgtgctctccatgatggagcagaatcagcgccctcataagcatgttgtgactgcttttctgtacatacgttagattgcagaactctttcactcttgtaaacttgagacctagcaagtggttaacgcaagcctctggggttgcgtac

SEQ ID NO: 3469 - DNA, 943 bp, Zea mays
  Clone ID: 700265960_FLI
gccctcgctctcgctcaccacccctgtctgccgtctgcttatccctggagcagaccggagtaaggccagccaaccaaattgtctatctactgaagggaaggaggaaaaaaaaagaggtaacttgaaactgtcagtctcggcattgcataatcgcattcccaggtcccttcctttcgattccgtaagctgttgtataggacgagttaggaacatctctattctctgtcggaaaaaaaatctttttttttaccatgaactgttccgtcgatctaccaggaaactggagccttctgctgttctacttatacagaaattcaaaacgccatgtgtagaatcaacaagttgttgcagctgcagctttaccaattcccatgggttccaagccgggcgaggcgccaacctgggcggaccagtgggcctccggcgagggcgacgggagcagcgcgaacggcaaggcggccggtaagaggacggtggccggcaacgtgaaggcggcggcgtcggagggactcgtcaaggccaaggcggcggcgctggtcggagcgcacaagctcaagaccgggacgagctcgggcatcaagtgggtcagggagcagtaccagaagaagaggacgtcgtccaagtgagctgcaatgtgtcaattgtgatggaggagcactgctactctctgttctgatctttcttagtgaagcccattagaggaacaggtttttctcttgggtggagactcttcttggacgctttggttcctttggatggtgagcttgtaagccgctggccttttttttcattattatgccagactagtatgatttttgcatagttttatgctctgtcaacagctaacaggtattaggagaaaatttaagggcccctttggtagggcttatttttcagcttcggctctggctcatgcaaaagttgtgccaaacacctctttttc

SEQ ID NO: 3470 - DNA, 1274 bp, Zea mays
  Clone ID: 700266053_FLI
tcttgctggcggtttcttctcgtccggtcgccatggtgcacgagacgagatcacgggtgcacgcagctgcccaggaagaaggcaagctcgcctcaaaaaagcagaaaccagataatgaaaccaaggaaaggggccagaatgtgccctccaagaacaagaagtctgccgacaacgaagggaaagacggggagccggaggcgccaacaaagagcaagaagctcaaagctgaggaatctgagccaaatgggagggaagctgctgcaagagagtttgcagagttttgcaaggccataggagaacgcctctccctcgaggacatgcgcaagatccttcaagccaatgagcaagatgcttctggatcggaggatgcggtcgttccaagatgtgaggatatgatgttctatgggcctctcgagaagtgcccagtatgtgagggtcagcttgaatttaaggagtggaaatacaagtgcactgggaactacagcgagtgggcacgctgtactttcagtactaacgacccttcaaggagaagcggttctatagaagttcctgatgacataaaagatgattttatccgcaagtggctgaagcaacaagaaggaaaggagttccctaaacgtgatcttgatgaagaggctcatatcttctctggcatgatgattgcattgtctggacggatgtcacgctcacatggttacttcaaggagcagatcatgaagcatggagggaaggtcaagaattctgtgcttggtgctacctgtgtcgtggcttctccggctgagagagacaaaggtggctctggaggatttgctgaagcattgtaatgccttgcctgatatacttctgtttttgacatgttccttgatttgagttgtcataaaaataggtagcatggttgaattaaatttgacaactaatactgcacagggagcgtggaactcctgttgttagtgagaattggataatcgatagcattgagaaaaaggaagctcagccttttgctgcctatgatattgttactgatgttgttctggaaggccgaggactcccgctaggccaacttgatccaagtgaggaggccattgagaccttagctgcagaggtgttttgccttgatctagttcattttgcatgtgccagtcacaaatttatttagttgctcaatagcaatgattggattgagtaggttaaacttgctggcaagagatctgtccacaaggattccaaactcgataaagacggtggatgtgtctttgagaaggatggcataatct

SEQ ID NO: 3471 - DNA, 1643 bp, Zea mays
  Clone ID: 700266057_FLI
ccagcggtccagcccgacctctttccaaaccggcaaatcctcagatccgccccctcctccgcctccgcctccgcctcctgtaccctcacgccgtgcttccacagccctcccacctccgaatccagatccgccgccaccaactcctgcttctcacctcctaggctgcttcgcgcgacaacctccgcgaggagcagcaggagcggcggcggcggcatggggcgggacggcggtggcggtgtcgccggcggaatgtctgaatcggtgctgcggaaggtgctcctctcctacttgtacgtcgcggtgtggatcttcctctccttctccgtcatcgtctacaacaagtacatcctcgaccccaagatgtacaactggcccttccccatctcgctcaccatggtgcacatgggtttctgctcatccctcgccgtcgcgctcgtccgcgtgctccgcgtcgtcgacctccccacctctccctccatgacgccacagctctacacctcctccgtcgtccccatcggcgcgctatacgcgatgtcgctctggttctccaactccgcatacatctacctgtctgtgtcatttatccagatgctcaaggcgcttatgcccgtcgccgtctactccatcggcgtcctattcaataaggagaccttcaggtcctcctccatgctgaacatgctctccatctccttcggcgtggccatcgccgcctacggcgaggcgcgcttcgacgtgcgcggggtcgcgctgcagctcgctgccgtcgccttcgaggccacgcggctcgtgctcatccagatcctgctcacatctaagggcatctccctcaaccctatcacctcgctctactacgtcgcgccgtgctgcctctgcttcctcgtcgtgccctgggtcttcgtcgagctgcccaggctacgcgccgtcggcaccttccaaccggatttcttcgtctttgggaccaactcactctgcgcctttgcgctcaaccttgctgtgttcctgctagtgggcaagacctcggcgttgaccatgaacgtcgcgggagtagtcaaggattggctgttgattgcattctcgtggtctgtgatccgggacaccgtcaccccgattaacctgttcggatatgggatcgcgtttttaggggtggcctactacaatcatgtcaagctgcaggcgctcaaggctaaggaggcccagaagaaagccgcacaggctgatgaggaggttgggtcgctcttgcaggagcgcgatggacatggtgatcataagagcgacaatcaggcttagactgtcagatctgatcctggccttcccatattggggatctgatgcaaggtgcaaagaccggagtttggtctacggttgctttcaaggaggtggatgacggtttcttgcacttctttaactttgtgtctggagagaaaatcagaggtatttaacgtttaggaaatatgcacctgcttggtggagagctttgccttgttattttagacactttgttctactgaaaggcagccatgccttactacctcacttgtccattgcctagatttatttgttctgctagtagattagggactaaaaatgtactgctgcagaatgttaatttggtggttattttcgatatataatgagcttaccgt

SEQ ID NO: 3472 - DNA, 2757 bp, Zea mays
  Clone ID: 700266070_FLI
catttttctcctcccactgattttgcattttagcccctcaggaagctccgatttcggccccgctccggcggaccgcttccgttcgtgctctgctccgaccgagcttgccgcgccgtgggggacagctgcgaggactctcgttcggcggctctggttctcggcttggtcccgtttcttccccaacaaatctcgtgatttttggttcagatttggcttctcggcgcccgtctgggtctttctcgtgcgtttcgcctttggtttcgccgatttggtgccggattcggtgggttgcggccgagtagcctggatctcgggcgccggtctagcgctaggagccctcacactgtggatttcctgccggaggaagcttttcaagggagctagtagctagtagctagctgcctttgggagcagtagctcttctagtctctgaaggtttcaccatacgcggtggagagcgctattagcttgaggagtagatttcgtgtagcggtgagcaaagtttgggtgtcaagtctggtggtggaagccttcaggcttgagattttctccctcacgacaccgaaggagcacgccggctctggaaggaatttcctgccatcccagaggctgccgatttcctccctcccgggaagcaagcaagggctttcttctagacgagctcttctggttccttaagtttgtgggccgtggctatttaatctccaactgcatccccagatattcaccaaattctgtgagactgggaactccgggattggtttggataaggtgttctgggaatggggaaccaatgcccaaacgggacccttgggagtgactactacaaccgccccgcttccaggttcgctgatggttgccttgaggacgatcgctactctgacttgaagaagtttgacaagccatggcctgaggtgaactcgtttaagcccactgctgttggtattttgaagaggggattggatccaacgtcaatcactgtccttgaaaggaagacggccgacgtaagggaacattatatcatcggtcggaggcttggtcaaggccagtttggcacaacattcctctgcaccgagatcagtacagggtgtgagtatgcatgcaagacaatcccaaagcgaaagctcatcaccaaggaggatgttgaggatgtgcgccgtgagatccagataatgcaccatttgtcaggccacaagaatgttgtttccatcaaggatgtatacgaggatgggcaggcggtgtatattgtgatggagctctgcgccggtggggagctctttgatcgaattcaggagaaagggcattacagcgaacagaaggctgcagatctcataagaatcattattagccttgtggctatgtgccattcacttggggttatgcaccgtgatctaaagccagaaaacttcctcctttgggataaagaagatgacctgtcaataaaagcaatcgattttggtctatctgtgttcttcaaaccaggtcaggttttcactgagctggttggaagtccatactacgttgctcctgaggtactacacaaacggtacggaccagaagcggatgtgtggtcagctggagtgatactgtatgttttgcttagcggggtgccacctttttgggcagagacgcaacaaggtatatttgatgctgtcttgaaggggcacattgattttgactcggacccatggcctaagatatctgaaagtgcaaagaatctcataaggaagatgctctgcccttgtccttcagagcgtctgaaagcccatgaagtactacgccatccttggatctgtgaaaatggagtggctactgatcaggctcttgatcccggtgttctctctcgtctcaaacaattctccgcaatgaacaaattaaagaagttggctctgagagtgatagctgaacgactttctgaggaggagattgctgggttaagacaaatgttcaaggcagttgacgttcaaaatagaggcgtaattacttttggtgaacttagacaaggtttaaaaagatatggtagcgaattggagaatagagaaattagtgatataatggaagtggctgataatgacaataatgtgaccatcaattatgaagaatttatcgctgcaactgtgcctcttaacaaaatagaacgtgaggagcacctgatggcagcttttacctacttcgacaaagatggaagtggttatatcacagtcgacaagctgcaacgagcttgtggagaacatgacatggatgacactttccttgaagagataattttagaagttgaccaaaacaatgacggtcagattgactacgccgaattcgtagcgatgatgcaaggcaacaaagttggacttgggtggcaacaaatggaaaccactttgaatgtaaccttgagagatgcacctcaagtacactgtcactgacgcgctcgccatgtacagattttgttctcttctcgtgttcatcgtttctccacacgacctgagagttccggtcgacatgacatgtatcacgaggagagagcaaatcaatcgattcatttagtggtatttatcccaaataaagtgtgggctggcaggcagaatatggtttgtcatgagagacactagtatgggtttatatgtataaatatatagtagtggtggtatattggtttatggtagcgggtgatcctgtcaagcgattcgatcgaaataccaaaagaagtgcgttcagtttgctcgttttgttacgggtttcatgaagatgaaggtgattatgttt

SEQ ID NO: 3473 - DNA, 641 bp, Zea mays
  Clone ID: 700266086_FLI
gctgcaggcttcactaccaaaacatctcaaacataaatcagttaagctcatgcgaagctggacttaaagatcatataaagaaagctaagactttgctcgaagaacttgaatgtctagtcgagaatgtctatggcatcacattaacatccagtttaagtgctctggaagtttcagacagtcattgcctcgacaacatgccaagcaccgattgctacgccatggaggaggataaatgtgcagatcatttggacatggacgtatcgctcgttacggtgatggtcatggttcgcaacatgctgaagcttgactacacgatgcaggagaagattgtcactgcattgtccttgaaaacaccagcatcggagctcgagggatactgcctcatgtgggatctacgcccgtacatcgatgacgacgtgatgcgtcttgcgtggaacatgtgtccttgaagcattggggctttggagttgtttctgctgggatggatgtctggtctgttcattattatgtgtttgtcgaaggtcgagagatatgttcagtgttatgtatgacgacgtggttgtgtgttcattgtcgtcttctggagacgagaaacagatatagtttgtcagattgaaccccttttgggggttctttttcag

SEQ ID NO: 3474 - DNA, 1858 bp, Zea mays
  Clone ID: 700266090_FLI
cgaaagcgaaaccggcgccgtctctccccaccctcgcggtcgtcgcccaccgtttttattacatcttcttcttggtttcagctgcgcacaaggaatccgtgaagctcctgtgccagacacagagagagcaaaccgtgcagcggtgcaggccagcgcgatccagctcccatcagtgggcgcgcccgccgtctcttgcgaccctgtcttcttggtttcttggcggggtcgtcctgctcgtgtcgcgctgcccacaacccgcgttctgtcgcggcatccgccgtggatcttggcccgggttgtccctatatcacgcagaaaaaagggccatccccccccccttcgccctcgggttcgttactgagtgtgccggagtggtattcgtgttccgccgggtgccgaggtggcctcgcggtcttctgccgtctcatcgtcgcctgctccccgtcgcgttcatcccgaggcatatcttggtcttgtaattgtataaaaagaaggtttggggaatcaggtttatctaaccagtggacatggtatcagttaatcttgggttagttcattatgtactggaccacatatatggaacacttcttcatcgcaccaaactaggaacaccatttttctcaaaaggatggggaggtaccaaacttgatttgctagagaagatggtgaagcagttgtttcccgaggcacgttgccaaaactggccaccaactgctgtgcagccaatgtggaaaacagtatgggagacaaacaattcttgtctgcgagaaggagttttcaggactacatgtgatgagcgactaatcgatgcattgccacctgagagtcacaatgcaagagttgcttttcttacccctaaaaatgttacacctgagaagatgtcatgtgtggtccatcttgcaggcactggtgatcacacatttgagcgcaggcttcggctgggtgggcctcttcttaagaacaatattgcaactatggttcttgagagcccctattatggacagcgacgtcctagcatgcagcgtggtgcaaagctccagtgtgttagtgatctgttacttctagggaaagccacaattgatgaagctcgcagtctcctgtactggctgcagaatgaggctggttacggcaagatgggcatatgtgggctcagcatgggtggagtacatgctgcgatggtgggatccctgcatcctactccagttgccacactgccatttctcgctccacactctgctgtggtacctttctgtgaaggggtctacaaatacgccacagcttgggacgctttgagaaaagatgctgcagtattaactcaagatgtaacacttttggcagaagatgctgcacagaaaagcgggatcaccatcgaacaagtcagggataggttacggtcagtgttgtctttgactgatgtcactcgatttccagtcccaaagaacccacaggcggtcatctttgttggtgcaacggacgatggttatattcccagacattcagtgatggagctccagaaggcatggccaggctcagaggtccggtgggtaacaggtggccatgtctcctctttcttcctccacaacgatgcattccgcaaggccatcgtcgacgcccttgatagattgtaacaccagaaggtgagagagaggccatccttgtgatggcactttatgttgtgtgacatttctgaacttggggttgcggcatgagctgaaccctctgtaactgccaacctaactgctcttagtgacgctgagattggaggtagggtggctgtacatgacaattgtagaatgtagcaccccattatttggcaattgttctgcaaaatatttgtttgtcaccatgtatcaatttg

SEQ ID NO: 3475 - DNA, 2200 bp, Zea mays
  Clone ID: 700266091_FLI
gcgagaaggtgggttggggaatctgaagcgatcagagaaggcaagcttgcttgcttgcttctccaccgaatcccccatctcgcgccctccgtctctcgccgcggagactcggccccccgccgatggaccagctcgtcaatttcatcatccgcccgcccagagctgactacagtccaaatgatgatctattagagcaggagtttatgctgaagggaagatggttcctgaggaaggatttggaggacaaacagacggggcacgcgactcttcgctgcaatagtggtggcgacctctacacctacccctccaccacagctccctcctgcagtctcgccaccacgtcgtctctgtggcatcatcgcctcggccaccccggtccttccagcctcgccaaacttcgaagcatgtaaaaaatggtcagggcaagaagttacaatgtagtcactacatgcctgttgtgattcctgaaggaaaagctcttccttgtgtcatatattgtcatggaaacagtgggtgcagggctgatgctagtgaagccgctattattcttctaccgtcaaacattacagtctttacactggacttttcagggtctggactctctgaaggagagcatgtcactttaggctggaatgaaagagaagatctcaaagctgtggttaactatttgcgaacagatgggaatgtatcttgcattggtttgtggggtcgctcaatgggtgcagtcacaagtctaatgtatggagcggaggatccatcgattgcgggaatggttcttgatagcccattctccaacttggttgacttaatgatggagctagtggacacatacaaatatccactgccaaaattcactgtcaaacttgcaatacagcatatgcgaaaaattgtcaagaggaaagctagtttcgacatcatggatcttgataccattcaggtagcaaaacaatgttttgttcctgctttgtttggacatgcaactgaggatgattttatacttccccatcattcagacaagatatatgaatcatatattggcgacaaaaacattataaaatttgatggggatcacaattcaccacgtcctcaattctactttgactcaatcactatatttttccataatgtgctaaaccctcctgaagtggcagaggatcattatttcatgacaccacatggtagccttggtcagggtcattgggatacagaacaagacatagagtatcggttctctcaatcacctacagggacagccaatgctactacaacagaagatgccattgcacagttgcgctctagaaggctcatgagtagaatggaggttccatctggtgccaccaccgaagacaggactgatcgaactgagggtttcgatagtgatcttggtccctcttcatctagtgtatcaacagcaactcctcccaatggtcgcaacggaaggctgctgactccaacctctgatgatggcgagtatgtggagtactcatttgatagcttgtcagatatgcctcacaccgtggaagatgaagatagaatgctgatgcaagcaattcttgaatcactgaaagactatgaacagtcgaatacaaaaaatgtgcaatccactgcatctgatcctgcatctgatcctgcatctaaagccaatggtactgtaaaagactgcaatggtgttgctgcagcagcattggagcaagatgcatcctcatttgatgctcctgacaagcatacgaatgtccccaacagtggagaaaaagtcagcgaagggcaaagtacagattgcaacgccggaaagagcagtgcttcggtctctgcttctggttcctcagagcccctggcaccaacacagatggtgaacggacaacctgcttcggtagactcccagaaagtgacccagaatgccaatggagaggatggcacaagagcaactttggtagttcagaagagccggacaggcggcctgatagaaaaatggggttccttcttcaagaacaacgactaaggcgaggaaagatagacgatgacacctttgacaatacgtgttccgttgtgttcatagtcatagaatcgccgttggctgatgtccagcttgattggttttacgtgtaaaatggaaaggaaacaggtgatttcaggacgttcgtgtgtatatagaaggaattgtagcgcccccattgatttataccatctctcaacttccact

SEQ ID NO: 3476 - DNA, 1063 bp, Zea mays
  Clone ID: 700266176_FLI
gatgccgtaacacaaggctgaatttttgttcggtctagccgacccgacgatggcgtccagcgacgggaaaccactgccaaccccggcctctgtgggcggcggcggcggcagcagcaccgcgccgcccgggcagccgaccacggtagcgtccaaggtgctggacatgggcgcggcggcgatgcagtcgttgcgccccgtgaagcaggcgaagcagcacatgtgcacgttcgcgctgtacgcgcacgacccgaagcggcaggtggagacgcaccactacgtctcccgcctcaaccaggacttcctccagtgcgccgtctatgactccgacaaagccgacgcgcgtctcatcggcgtggagtacatcgtgtcgaggaagatcttcgactcgctgccggcggaggagcagcggctgtggcactcgcacgcgcacgagatcaagtcaggcctgtggacgagcccgcacgtggcggggctgctggagaaggcggagctggaccacatggccgccacgttcggcaagttctggtgcacctggcaggtggaccgcggcgaccgcctgccgctgggcgcccccgcgctcatggtgtccccgcaggccgaccccgccgcagccgtgcgccccgacctggtccggaagcgagacgacaggtacggcctctccacggaggagctccgcgccgctagggccgacgtcgaggcgcccgccgaggagcacccgggccaggccgactactggctccgccaccgcaagggcttcgcggtggacgtcgtgccgcacgagatgaagcgtcacgcgccgtttccgtgagccgtgaccaaccggtgttttacagtggcgcatgtgtaataaaaccaaacgatccagcaggcgtctccgtccgaactcgtgaatggcacgcgtttatttgtttttcagttcatgatgttcaaatcggcagtacgcatgtgttatggatgcgtgtgtattggatgaagtggatcggtgagaacagactttagcctcgcaggtgttaaactagaactgcaattacacccttcccaattacaagtgggattttctttc

SEQ ID NO: 3477 - DNA, 1852 bp, Zea mays
  Clone ID: 700266206_FLI
agcgccgcgatggagaagatccgcgccgcgggtctgctcaagacgcaggggctcatcgccggacagtgggtcgacgcatacgatggcaagaccatcgaggtgcaaaatccagcaactggtgaggtccttgcaaacgtgtcctttatgggcagcagagaaacatctgatgctattgcttctgctcacagtacattctattcttggagtaaactcactgcaagtgagagaggcaaggcactaagaaaatggtacgatctaattatttcacacaaggaagagcttgcacttctcatgacactggagcaggggaaacctatgaaagaagcccttggtgaggtcaattatggtgcaagtttcatagaatattttgcagaggaagcaaagcgcatatatggtgatataattcctccaactttatctgatcgcagattgttggttctgaagcagcctgttggggtagttggagctattacaccatggaattttccattagcaatgataacccgaaaggttggaccagctttggcctgtggctgcactgttgttgtcaagccatcagagttaacacctctgacatcattagctgcagcagatcttgctcttcaagctggaataccagcaggtgcactaaatgttgtgatgggcaatgctcctgagataggtgatgcattactgcagagtacacaggtcagaaagattacgttcactggatcaacagctgttggcaaaaaactgatggctgaatctgcaaatactgtgaaaaaggtctctttggaacttggtgggaatgcaccttgcattgtttttgatgatgcagacattgatgttgctgttaaaggcagtcttgctgccaagttccgtaacagtggacagacatgtgtttgtgcaaacaggatattggtgcaagaaggtatctacgaaaagtttgcatctgcattcatcaaggctgttcagagtttgaaggttgggaatgggctagaagagagtacatctcagggtcctctgattaacgaagctgctgttcaaaaggtggagaagttcataaatgacgcgacttcaaagggagcaaatgtcatgctaggtggtagaagacacagcctggggatgtcattttatgagccaactgtagtagggaatgtcagcaatgatatgcttcttttcagagaagaagtttttggtccagttgcaccccttataccattcaaaactgaggaagaagcagtccatatggccaacgatacaaacgcaggcttagctgcatacatatttaccaagagcatacctcgttcatggcgtgtatccgaatctcttgaatacggcttagttggggtaaacgaggggattatttcaacagaggtggcaccatttggcggagtaaagcagtctggtcttgggagagaaggatcgaagtacggcgtcgacgaatacttggagctcaagtacatctgcatgggcaacttgggttgagttctgaaatctggcctgaggctagaaacgcttggcagatgatgaaccgagagaccaagaaggcaagcgttttgctgcaagaccggaggaacatggctgaaaggggccggccactggttgtgggggagcagttttcgaataaagcgaataagccgcggaacatgaacaaaagaaagccgaaatgagttgtaaatgacgtgaactataaagtatggcttcgcctccggacttttgtatacgtaatcatggcactacttgtctatagtgtctccaaagacgtccatgttacagaataaaagcgtatagggtggatgctacgttacaggctgtcggtggtatgtacacctcgcctgattcctgacgaaataaagctggatactgcatt

SEQ ID NO: 3478 - DNA, 981 bp, Zea mays
  Clone ID: 700266294_FLI
ggcgcggggcagatgggctcgggcatcgcccagctcgccgccgccggaggctgtgccgtacttctcctcgacgccgaccccactgccctctcccgtgccgtcatctccatctccgcctccctacggcgcctcgccgccaagggccagctctcccaggatctcagggacgcggatcttgtgatcgaggccgtcgtggagaacgaagctgtcaagaagaagctattcgtggagctggataaggtcacgaagccctcggccatcctcgcctccaacacgagctccatctccataacccgcctggcttcagctaccaaacgcccctctcaggtgataggcatgcacttcttcaaccctcctccggtaatgaaactgatcgagattatccgaggagccgatacgtcagatgaggtgtttgctgcggtcagatctttctccgaaagactcgggaagtccgttatatgctcgcaagattacccaggattcatcgtgaaccgcatcctcatgccgatgatcaacgaggccttctgggctctgtacaccggagtggcaaccaaagaggacatcgacgcagggatgaagctgggcacgaaccacccgatgggccctctgcagctcgccgacttcatcggcctggacgtctgcctctcagtacttcgggtactccacagcggcctgggagatagcaagtacagcccctgccctctcctcgttcagtacgtcgatgctggccggcttgggaagaagcgtggagtaggcgtgtattcgtatgggcacaggccttcgtccgtcaggccgaagtcgtctctgtaggcgtgagagcaaactgttgggcgaataaaaccaggtgcgtgttgcaattgcacgtcagagaaaaagggagcacagcctagttcagaggtactcagtcggacgcttcaggtcgtgtagattcgtaatggcagggtttgctgctctatgtagaaaagatggttcagtgttttt

SEQ ID NO: 3479 - DNA, 1964 bp, Zea mays
  Clone ID: 700266336_FLI
gtctggtttacttctcatttcattatatttttggaccagcttctctctgatgcagagactgtcaggtggcttaattacgctgtggaaaagatttggccagtttgcatggagagggttgcatcccagcagttccttttacccatattcccgtggttcctagagaagttcaaaccatggacagcaaggaaagcagtaatccaaagcctttacttgggtaggaacccaccgatgtttacagatattagggtagttaaccaatcaaccgatgatgaccacttggttctagagatagggatgaattttctttcagctgacgatatggatgcaagaatggctgtgcaactaaggaagagattaggatttggcattacaacaaacatgcatataactgggatgcatgttgaaggaaaggttctggtaggggtgagatttctgcggcagtggccatttattgggcgtgtaagagtatgctttgttgagcctccatacttccaaatgacagtgaaaccgctgtttggtcatggacttgatgtaactgaactcccaggaatttctggatggcttgacaggatgctggatgttgccttcggacagacacttgtggagcccaacatgctagttattgatctggaaaagtttgcctctgaatcaacagataactggtttagtgttgatgagaagccacctatcgcatatgctcgagtggagatcctggaaggtgctgatatgaagccatctgatcctaatggactagctgatccatatgtgaaaggacaacttggaccctaccgttttcgcacaaagatccataagaaaactcttgatccaaaatggctcgaggagtttaaaataccaataacttcatgggaagcactcaatcttcttcatcttcaagtccgagataaggatcccatttttgatgacgctcttggcgattgttccataagcatcaacaagttaagaggtggaataaggcatgatatatggattgcactgaagaacataaagacagggaggattcacgttgctgtaactgtacttgaagaagaaaatgaaaaggtttctaatgatgaagaggaacagtgtggaatacacaaggttgacaaggctagcacaccgaggtcaagtttctcctccaggaccaaccatgaaagtgaatgttctgatgaattccggaagatgtctgatgaatttgagccagttgacatagaaggatcggaaaagcccgatgtttgggtgcatcgccctggcagttatgtcaccagtacatgggaacctcggaaaggccgtgcccggtgccaggattccagaattcaccgggagaatgattcttgtagtgatagtccaaggtcatcagtgtcaggatctcatagaagtgactccagcactgaagaacccacgagcagtaaatcgcatcgccaccttcaaaaggtcaagaagggtttgggcaagctagctggagcagtgctccaccggagcccaaaggagaatgatgacgaagcttccccatgtgtaactcctcaccaaaacattcgaccggtcggggaaagcagggtttcagtaacatatgtggtcgatcaagatccagcaggggttgacggatcggggtcgagacgagatgaccaccagcaaagccctgagagagaggagctggacagcccgagtaaaaggcatctgaggaagaaggcggtgcacatggtgaaacatgctgggaaaaccgctcataacctaaagagcatgttcagcaagaagggccttgacaagagcaaagaagaacaccgcagtgatgaggaatgcgacgaggaaggcgacgttgttgctgctagaagagtgtagaatatgcaaggcttagttctattcctttggggttgtagtatacatatagtatgtactgatgaagtgttgcacaagaggcgcttgggccatgggtctcatcggctaaatagagtattacataccacatt

SEQ ID NO: 3480 - DNA, 2332 bp, Zea mays
  Clone ID: 700266372_FLI
cccgcgtgctcgcgcgctcgcgctctctccgcgacgactgggtgtgggctaccgccgccctacgccaggtgccgaggcttcgtcgatctcttcgccggcgacgagcacccaccaggatgcaaaagctctcggggcttcggagcctcgaggggttccgatccctcgttggatccacctcgacagccatgaaggtcgcgaaccccaggccttccccggatactgggggtatttcgtatgggagcttcgccaaccttaagatcacagcagagaaattagtcaaggagcaggcttcagtgaagactgatctagaaatggcgcatgtcaaattgagaagagcaacagaacagataaacattatagagggaaaacttcaacaagctttgaatgaaaatgcaaagcttaaggtgaagcagactgaagattcgaagctctggcagggattagattcgaaactctcctcaacaaagaccttgtgtgatcaactgactgaaactcttcagcagctagctagtcagacagaacaagctgaggaagacaagaagttttttgaggagatgcttgggaagaattccaaagctctagatgaattcaactgcctgttgcgtgatttatcaacaaaactggagtatgcggaacaaaagataatttcagggagacaggagatgttgcagatcaaacaagagaaagaagagatggatcgaagttacaagggacaactgtattcaaatgatactacgataaaggaaaaagattcgctcatcaagcagttggagggttcacttgatgataataaatcccgcttgatatatcttgactcccgcttgcaatgcatggagcaagaactgaagctaaaagatgatgtttgtatcagcctgaaaggaaacctagctagcagtgaaagtgaaaagaacagcttggagcttatgaataagggacacattctggaaattaaaaaactatgccaggacaataaggatcttaatgaattgtttagcagcttcatggttaaagtaactgagctagataaagaacatgcctctatgtcaagtcatgtgtctaggctgatttcttcatttgaaagattctatgaaatggcccaagaagagaaaatgctaatggcaagatcttctaaggataaatttgaacatcttcaaagccagtatgtagatttgacatcagaaaacaatgctctcaaaactgaaattgaagaactgaagtccagactcatagagttgcagagaactcaagaaattgttatggttcaacatgttgaagaatgccaagtggctgaagataagatcagaagattagagtctgaagctgaagtttctgcctccaacataaatcagttagaaaaattagcttcagaactacaagggagaattcagaagttactagaagattctacctttgctgaaaatcacaagcaagagttgcttcaaaagattttgaagctagaatcagataatcaggaactcctaggacaaatgcagtccattatggaagagaaatcaaataatgctgaatctctgcatggagagataactaagcgtgaccagcaggttgatacacttgagaatcagatcaaccagcttcgtagtgttctggatgagaaggagcaactctacctttgttctgtacaaaaagagaagactttggaggaacagaaattacaggtcgaagcattgctttctgcaacagagtgcaaacttagtgatgcaaaaaaacagtatgatctgatgcttgaaggcgaaaagatagagctatccaagcatttgaaagagctatctctcaaaaatgaccaggcgatcaatgaaatccgtaagaaatatgaacttgaaaagattgaaattactaatgctgaaaaagaaaaggcagaaaagctcataagggaaattgaaaacaaatgcaacgaaaagatatcacagaacaagcatgattctgagaggtatttgatttgccttaaggaggaacatggcacaacggtggcgagaattcagcaggataatgagcataaagagtcaactctccgggcttatcacaaagaagaactgcagcgcattcaatctcaggctgagaatgaaatgagggagaggttgtcattgctcagaaaagagcatgaagttcaaataaaatcactaaggatgcatcatgaggaagaatgccagaggatgcaggaggaactggagcttcagaagtccaaggaggagaagcaaagagcattgttacaattacagtggaaagtaatgggagaaagtcaacgagttgatcaagaagtgaactctaagaaggaatactctgtttcgtcgattaggaggagcgacccatatgg

SEQ ID NO: 3481 - DNA, 857 bp, Zea mays
  Clone ID: 700266523_FLI
caagcatcagcggcaggagctctgggcagcgtgcgcacgtggggtacctagctcgctctgctagcctaccatggctgatcaccaccggggtgcgacgggaggtggcgggggctacggcgacctccagcgcgggggcggcatgcacggcgaggcgcagcagcagcagaagcagggcgccatgatgacggcgctcaaggccgcgacggccgcgaccttcggcgggtcgatgctggtgctgtccgggctgatcctggccggcaccgtgatcgcgctcacggtggccacccccgtgctggtgatcttcagcccggtgctggtgccggccgccatcgcgctggcgctcatggcggccgggttcgtcacctccggcggcctcggcgtcgctgcgctgtccgtgttctcctggatgtacaagtacctgacgggcaagcacccgccgggcgccgaccagctggaccacgccaaggcgaggctggcgtccaaggcccgcgacatcaaggatgcagcacagcaccgcatcgaccaggcgcaggggtcttgagagaagaaccacactcgagcggaccgcgcgcgcgacctccttgaaccactgccggcgcggcggcatatggcccttaaaggcggtggctgctgctacgtacgctgccgtagagtctcggtcgccgcgatagctctagctagtcgtttatgtgttgtgctttgtgtgtgcatgcttgtgtctgggggcatgcagtgcagtgcagtactatatgctgtattcgtctctctttgatcggagaggcggatgtacagcatgctcgatatgtctagtttggatgtcatgtttatgatgaggaataaaatgcagtgttcaggtg

SEQ ID NO: 3482 - DNA, 1520 bp, Zea mays
  Clone ID: 700266538_FLI
cggcacgagctcgccgcgatgtcatggttcgctcgctccatcgctgccacactttcatctgcccactctgacgacgatgaatccgagcccgcctccggcgacaacagcccgccgcgcgcctccgaccccaccagcgccgagaccggtgagtccgatgagcagccggacaccccgagccgcggcgttaagggcgacatctcggagctgaccgagtccctcacccgccggttctggggcgttgcctccttcctcgcgccaccgccaactgaaggagagactgaagaggaggaggaggagacagccgccgccgcggaggtgcctcagtccccacggatcgacgggatccggagtgacctggcggagatcgggggcagggtgaagaccggcatctcgatgctgtcgaacgccggcgcggtggcggagatctccaggttcgcgtcatcgttcctgccattcggtcccggggatcagggggaggaggaagagggcgaggcggtcggtgtgaccgaggaggtagtggtgttcgtcggtaacatctcaaagcatccgaagacatggctcgatttccccttgtttgttgatgaccgacacgcagatgattttgaactatcagatgaacagtatggacatgcagttgctatagagcggcttgtaccaagcctatcatacctcaggactgagctttgctctaccaatatgagtgaagcgtgcttctggaagatatattttgtgcttctccattcgaaactcagcaagcaagatgctgaaattctttcaacaccacaaatcctggaagcaagagaaggactactgcaaagttcaccgacaaagcacaagctgttatcagaaagcaggaatactacagaacctgaagagagtgagttgtcaccggcaagcatccaaaacaagcatggagtatctgaagcgccgtcattccaagaactaacttctgaccctgtgcctaatgttgaggctgacaagcatcctatctcaagtactgaggcagaaatagttgacaagtctgtaattcaagaagagttggtgatgaaaactgaggccaagagtttacccactgaggaatctaaccctgaccctgcggatgatgatgatgaaaaagaagtagatgattggctacaggatgtcgactctgtgcccagcaaaactggcaacaatactgcagttggggaggaggaagatgtatccttcagtgatctagaggatgactgaggggctgttattgagccaaccagctatcagtttactgttagacggtagcttcatgaagtgaagaacacttgctctgtggctttaccacttcactgcctggttcttccgattgcagtagcagaatcacgtaacaatgtccctcggtgtgtcccaattccatgttgtatctaagcagtcaccgttttctctgtacataaagttccagatgcggctgtgcattcatgctatatcgttgtccttacgagctgctttttgaaacacgagattctgaatgtaatatattagaatcatct

SEQ ID NO: 3483 - DNA, 758 bp, Zea mays
  Clone ID: 700266631_FLI
gccgacctcaccggcctccccatgtccaacgcctccctcctcgacgaggccaccgccgccgccgaggccatggccatgtgcagcgccatcctcaggggcaagaagaggactttcctcatcgcctccaactgccaccagcaacatctgctttgattctgccaatttcctacacatatatagccatgatgggctcacaggggctcactgatgcttcgaagatcgcgatcttgaatgcaaactacatggcaaaacgtctagagaaacactacccagttctgttccgtggagtcaacggaactgttgcccatgaattcatcattgatctaagggcatttaagacgactgctggtatagagccggaggatgtggcaaagcgcttgatggactacgggttccacgcaccgaccatgtcatggcctgttcctggcacacttatgattgaaccaactgaaagtgagagcaaggccgaactggacaggttctgcgacgctcttatctccatcagggaagagattgcagagatagaaagcggcaaagcagatgtgcttaacaatgtcctgaagggcgctcctcacccaccgcaactcttgatgggtgacacatggagcaagccgtattccagggagtacgctgcgttccccgcggcatggctccggggcgccaagttctggccaacaactggtcgtgtggacaacgtctacggggaccgcaacctcatctgcacgctgcagcaggcgacccaggtggccgaggaagcc

SEQ ID NO: 3484 - DNA, 2726 bp, Zea mays
  Clone ID: 700266667_FLI
gggcgggctcgtgcccgatcttgtctggtcctgtcttggctccccgccaggaatagcgcaccgagatcccttgcgcgcacggaccagcagatcgcgcgcgggagtgagagggcgacagggcgtggccgcgaggtgggcatgggatcggagggacgggtctggaatggcgcgggcgtggccgccggcagcggctatggcggcagcgtcgaggcgaaagcgaccaccgcggcgcccgcggacgttcccacgtcggcggcctccgtcgacatctcgctgccgctcccggagatgtcgcctcacatcatgcaagtacccccccctactctcctatctctcttcgatcctcttgcttccgctcgcacctcgggctggtctcgtgccgctgtgcgcctgtcagcagctcgtgtcatgttcgagcattcgcgagcgcgcggggcgtcgtacccgtgcccgcgaaccagccggtaaatgcctccgcgtctgcgggtgacaggaatgtgctgatgcacggaaagtctctctgatttggggattgctggtgccttttcagaggtctctgcaaggagttggtcaaagggtggtcgtcgattgacagctcgcgcttctccatcgagaccgtgtctgggggcatcaccaatctattgctcaaggtttctgtcaaaggaaacaatggcaatgattcttctgttactgttcggttgtatggaccaaatacagacttggtgattgatcggaaaagggaattgcaggtgagaatctgagtggtatttatatgctttccatagaagcagtttttttgcctttgggagtggtacaagattgtgtgttacctatagtattccacaatgactctaggcttcttgcattaccccttgtgttagtcatatttttctagtggcacgttttcaattcttctagacacataatagtaatgcttttgtattagcatctgttctaccaaatgcattgccttttgtttcatatctgtaccttttccctgatgaatggatttcatttcgttctatggaaaatgctaacatagaatgataattttaagggtccctagactgtacacgtagtataatgtacccataaaattaaatctcatttcgattctaaaatatttcctaatgcatacatctactaccgtcatggttaggcgataccgtatctctcagctgcagggttcggggctcggctgcttggaatgtttgaaaatggagtagttcagtcattcatctatgctcgaacactgtcacctgcaggtaggcatacttcctgtctgaacaacgtatcgggtgtggggtcctaatcaacttagtgcgatagtttctctattctcttttgtagttttaggtacaatttcaaatgcgacttcaaacagattgtgtttttttccctttctctatagtcagcattatccatgatttggtatgtcaatttgaagccttggatgtttggaggttttatgaaatgcttctgaaaataaatctactgatcctttgttttgtagacatgaaagaacctaaaatagcagctgaaattgccaaggagctacgcaaatttcatcaagtagatataccagggtctaaagaaccacaattgtggaatgatatattcaagtttttgaagaaagctgcagcattgaagtttgaggataacgagcagcaaaagagatatgtaaagatctcatttacagaaatacaagatgaagttaaagaacttaaggtaccttgaacttgacaatgtaccttctgatatttcgggcccattttgcttcttaaagtgatatttccttttttttgtttgggcacaaatagtagttgatccttctctggtatagtgggaacatccgtctagcatagttatgaagcaaaatattggttgtgatggtgatgggtttaggcccatactagggaactgaaactgaagataacagttactcctgccaatttcctactatctgtactttgtatttcttcatcaatgtccatgcaccttgtaggatctcttggacattctgcatgcacctgtggtttatgcacacaatgacttgctttcaggaaatctgatgctcaatgatttggaagggaagctatattttattgattttgagtatgggtcatacagctaccgtgggtatgacattgcaaatcatttcaatgagtatgcaggatttgactgtgactttaatttgtacccagataaagatgcccagtatcacttcttcaggaattatctgcatcctgatagacctagtgaggtgcaggcacaagatatggaagtgctttatgtggaaacaaacactttcagactagcatcgcacatttactgggcattatgggctcttattcaggcaaaggtatccccaattgactttgactatcttggatacttcttcttacggtatggtgagtacaagaaacaaagggactcctgcttcgccttggcacaaagtttcctctccgggctaagaaatggctagagcctgagaatctggtcaagggtttgcactgttgtacgcatactcggggcgggtacgcgttgtgatcatcgtctgctactcagaaactctattatagtggtggtagcagcctcattttgttgtatctgatggtagtttcgtcatcgcctgataggaaagtctcatgatcgccctcgggaacgcagggtggcgagatctgtacttatatttgtaataaacacaatccggatgggttctgtcc

SEQ ID NO: 3485 - DNA, 1598 bp, Zea mays
  Clone ID: 700267018_FLI
ggcgtccacatccattatcgcgctcaggctcgtgccgctcgtggtcgtacgctgcagcaggcgatcggagcaaactaagaagcgaacaggccgcccgtcgacgccatggcgccggatctggtgaacggcgtgctcaactgggtggggacgccggccatggtggccagcctgctgctcttctacccgccctactatctcttcaagacatgctactccttcctttcctggctcttccccgaggacctcgccggcaaggtcgtcctcatcactggcgcttcctccggcatcggcgagcaactggcctaccagtacgcgctgaatcgggcgtccctcgccctcgtcgcgagaagggagtcgagcctccggcacgtcgccgaccgagcactcgagctcggcgcgcgcgacgtcgtcgtcctcccaggcgacgtctccgcccccgacgactgcgacaggttcgttcggaccgcgatcagtcactacgaccgattggaccatctcgtgtgcaatgccggcgtcgcgagcgtcggcgcgttcgaggagatcccggacgtcaccagctacagctcccagcttgacgtcaatttctggggttccgttcaaacaaccttcgctgccctgcctcacctgaagaggagccgaggaagaatcgtggtgacggcatctgcgaccggatggaacccagttcctagaatgagcatctacaacgctgccaacgctgcgctcatcaacttcttcgagacgctgcggaccgagctagggaaccaggtcgggatcacggtggtgacgcccgggtgggtcgagtccgagatgtccagagggaagttcctcaaggagcacggccaagtggaggtcgatcaagagatgcgcgacgtgagtgaggaacacgaccatgcaccggtcgagtgcctgctgatgaatcaaccccctgcgacgcgtgatcgtagtagttaataatacgctgctaactaatagcgacgtgtttccaggctcagatcggcctgttcccggtggagtacgccaagaactgcgccaaggccatggtgcaggcggcgcggcaaggcgagcggtacctcaccgtgccggcgtggttcggggcgatgtacctgtggcggctgttcgcgccggaggtggtggaggcctgctaccgcctcctgtacatgcacggccatggcgccaggcaggccgacgcgcccagcaggaccatggccgaggcgggtggcaagcagctgctgtacccgacctcgctgcgctctgaggagattaaggagtgacctaactgccaactgttgtgtgtgtgtgtgtgtgtgtgtgtttgtgtgtgcagcagagctctcagaacacctgtggtcatgtttaatatgtgctagctgtgtgccttgacaatgaataagctgctgctctctcttttgcatagtttaaatctacaattctgtagtcgatataattgttttgtttgaagctgttgaagtctacaattctgcagttgataattgtttttgtatcaagttgtttagagcatcggatataacgttctatttttcaagattttagaatttgaattgaaagtttcccaaataacatcaaatgttgacatggtc

SEQ ID NO: 3486 - DNA, 806 bp, Zea mays
  Clone ID: 700267044_FLI
gccgccctcgccccacctctctcctctgccgtcgtctagctcggacccgcacccagccgtgaatacccatggcgcccaaccccagcttctttctccctcagctcccatggcgctctctctctctcctgctcgctctctggtgccgcgcgtcttctctgctcgtcggtgctcgccgcgggagacgacgctcggtcgcccaaccttcctgctcctccctgctgtcgtgtccctcggcgccggtcgcttcttcttgctattccatgccgcggcaatcgccctactgctccagtgcgcccagccgagcgattctctgctctgtgcgcgcggtatttctccagcctgccgcgcccagtccctgctccttgtttttctctgcgatgtggagcagtgttttctgatcgtccgattaatcgcgattaatcggcgattaatcgactgatcgtcatcacgcatccgataaggagtaccgacgcgatcagggcgatcagaaacctgatcgtccgattagtcgacgactaatcgcgattagtcgtccgattagatcgcggacgatcagtttggcctgcttcgttacttcatttcggcccactcactgcatgcatcttctgtgaactgtgaagctgtcccatttctttcgtgctactttttcattttggttctttatataacatatataatgtgtggctgtggcatggtaagagagcaggctacattgagccaatgagccttgtcagtttagtagcataacagtagcagactattttatttctagggtctttgcctttaagcctatacccattatttct

SEQ ID NO: 3487 - DNA, 1167 bp, Zea mays
  Clone ID: 700267056_FLI
cattagtataaatgtgtggttctgcacttcagtttggttcatctcactcatcagctagcaccaccaggaagtaggaacacacctcccaccagtccactgtttcatcgctcatcactaggctgcaatggctgcaaagtcacctgtgcttgcagcactggtactgctcctgagctccgcccagctgtccacgggggcaaggaggcgcatggagctgtaccagcccgatccggcggacatgctctcctaccacaacggatccgtgctccactccgacatcttcgtgtccgtgctctggtacggcagcttcacgcaggtgcagaaggcgatcatctacgacttcctgctctcgctcaccaccacgccccaggccgcctcgccgtccgtcgcggagtggtgggacatgatcgagcagcagtacctgtccaaggcggcgcagaccaccaagcataccaccacccgggtgatgctggacaccacccaggtgtcgtccgacgacggctgctccatgggcacgtccctcaccctggcgcaggtctccgccctcgccgcgcgggccaggcccaggaagggcggcgtcgcgctggtgctcacggcgcaggacgtcgccgtggagggcttctgcacgagccagtgcggcctgcacggcgcggagtccggcgccggcgccgcctccgcgtacgtctgggtcggcaactcggccgcgcagtgccccggccagtgcgcgtggccgttccaccagcccgagtacggcccgcagaccccgcccctcgtcccgcctaacggcgacgccgccgtcgacggcatggtcgtcagcctcgccaccgcgttcgccggcgccgtcaccaacccgttccgcgacgcctactaccagggctccagcgacgcgcccctggaggccgccacggcgtgccccggacagttcggcagcggctcgtacccggggtaccccggcaacctcaagatcgaccaggccagcggtgccagctacaacgccaatggcgcgcaggggaggaaatacctcctccccgcgctctacaacccttccacttctgcctgcagcacgctggtctagcgaaaacaccgatgcagtgtattatcgtcttagcttgtttgttcagaaggttccgtttatgggtgtatgtatatatgcaagttcacatcaggtgt

SEQ ID NO: 3488 - DNA, 1841 bp, Zea mays
  Clone ID: 700331891_FLI
gtccacggccaaaggcgagagagagagagagagagcacgggatgggttgaggaacgagatggagggagaaagtgggcagcctgctggatcttggcatctcgccgccgccgctcacttccgctccacctgtttggtgcagtgtgggctagttatctactagacttgccactggtgcagattccgttgatcccacatctgaaaagcaggggagtcgacgaccctcatggttttgaggataatatattgcatctctgcactgttctaagcgtgaggaagtaaagcattatttattggttggagtagtttctgttgctatccggcaccaatggcgactttggttcgtcatgattcaaggcagtactcttggtggtgggttagccatatcagccccaagaactcgaaatggctccaggaaaatctcagcgacatggacacaaaggttaaagcaatgatcaaacttatcaatgaagatgctgattcttttgcaaggagagcagagatgtactacaagaaacgtccagagctaatgaaatttgtggaggaattctatcgagcataccgtgcgctggcagaaagatacgatcaggccactggggcacttcgtcaggctcacagaacaatttctgaagcatttccaaatcaaatgccgtcaatgtcagacgagtcaccctcttctttcagccaagagatggagcctcatactccagatatgtctacttttacacgtgcggcatttgattctgatgatcttcagaaggatggagttggtatgtcaccacagcgtttcacctccaagagaaatggtacacaccctgaggaaacaagtgcattgtcaagtagaaaaggtctaaagctgttcaatgatttgtcatcgagtagtgaaaatgctcctcgtgctggttttgatgggaaagtacggaaaggcctaacctttgaaagcccagaagttaaagggaaagatggtatcagcaatgagatggcaaatttgcagcaagaagttgcaagactattatccgagagccagaatctgaaacagcagatgctgtcagaatccgagcgggcaaacaaagctgaaaatgagatgcaaatgctcaaggcaacagtattgcaattaagtgctgataaagacacatcacttacgcaatataatcattcctctgagcgaatatctacgttggagtccgagctcttgaaggcgcaggctgacctcaagaagttaactgatgaaatggctgcagatgtccagaagctaattaatgctgaaacactcaatattgctatactgtctgaggctgagggtttggatcagaagatgaagatgcaacaacaagaactagaacaaaagcttaaggaattggagagtttccgctcaagcttccaggaggagcatgaaaagcgtatgcaggctgaaagtgctctactttcccaggggaaggaacttgctcaatctcatgaagaagtacagaggttgactatagaaataaagatggcgaatgaaaagttgaatgagctcaagcagaccaaggaggaccttcatgacactgtttgtgagctgaagagggatgttgagcgccttacagaacaaaaccagtcatctgaggtgcttatacgggaacttggtgacgagataaatacactcaaggattcaaaaaatgaactccaaagtgaaataaaaagccttaagagcaccatttcacagctaaacactgagaagaatgcagctgcgcttcaacaccagcagtctgtggagcaggtttcggtaatcgaatctcagctgtcaaagctacagtcagagctagatgagactgagcagaaagtacagttgctgacacaagatcttg

SEQ ID NO: 3489 - DNA, 2496 bp, Zea mays
  Clone ID: 700332652_FLI
ccgcccctgccatgggaagagtggcaggtggcaaacgacagttggctcgacgagcggaacgcagccgacgggggcgtcgaggccacggacgccacggtggcggccgtgccgaccgcggacccggccccggaggtggtgctccgattgctgcgtttccagaaggagtggctcgcttgggcgctcgcgcaggaggcgtccgtcacgcggggcggcatcctcgccgacgagatggggatggggaagaccatccaggctatctcgctcgtcctaaccgcgcgccgcctccggcccccggaccatcactccgccgcctcctcgtccaactcctcggtgggccgcaccaagccccaggtcgggtgcacgctggtcgtctgccctgtggtggccgtcatccagtggactgaggagatcgaacgccacactgctagtggcagcgtgcgcgtgctcatctaccacggtgccaagcgtgtcactcagagtttcgatttcaacagctatgactttgttatcaccacctactctaccattgaggcggactaccggaagcacatcatgccgcccaagactcggtgccaatactgcaataaattgttctaccccaacaagatgaaggtgcacttgatgtatcactgtgggcctaatgctaaacgcacagaagctcaggctaagcagcagagcaagaggaagtgggacagcagcaaggaaaaggtgaaggagaagaggagggttcataagaagggtgatgaggtgaataaggattttcaagagttggctgatgaactgggcagacagttaaggggccaatctcctctgcattctgtgcggtgggagcgtgttatcctggatgaggctcacttcataaaagatagacgatgtaatactgcacgggctgtttttgcattggagtcagaatgcaagtgggctctgagtggaacacctttgcagaaccgtgttggagaactttactctcttattcggtttttgcaaatcttcccctactcatactatttctgcaaggactgtagctgtgagatactagataccagtatgaagaaacaatgcgactgtggtcactcatctgttaggcacttttgctggtggaataagtacatatcaacaccaatacagtatgggtcaacaagtttcgaaggaaaaagagccatgactcttctgaaggaaaaagttctgaaaggcatagtgttaaggcgcacaaagaaaggccgagcagcagatcttgctcttccaccaaagattgtgacattgaggcgggactcttttgataaaaacgaaatggaattctatgaagctttgtacactcagagtgtcacacaatttgatgcatatgtagatgctggaacactgatgaataactacgctcatatcttcgatcttctcacaaggttgagacaggctgttgatcatccctatcttgtagcatattctaaaacagcaggacatcctgaaggaatgaagaatgaaggaaacgagtccatggagagccaatgtggtatatgtcataatttggctgaagatgttgtggttacctcttgtgatcatgcattctgcaagacttgtttgatagactactctgcagctttggggaatgtttcatgtccatcctgttcaatacctctcaccgtggacttaacagcacaaaattcagttggaaaagtaactcgaagtgtcaagggtcgcaaatgttcaggaatattgagcagactaccaagccttgtggattttaagacgagtacaaaaattgatgccttgagggaggagataagaaacatgattgagcacgatggttctgccaaagggattgtcttcagccagttcacatcattcttggatttgattcagttttccttggagaggtccggcattaagtgtgtccagttgaatggagccatgaacattaccgaaaagggaagagccatagacaccttcacccatgatgcagactgcagggtcttcttgatgagcttaaaagctggaggagtcgctctgaatctcactgtagcatctcatgtgttcctgatggacccttggtggaatccagcggtcgagaaccaagcgcaggaccgtatccaccgaattgggcagttcaagccaatcaagagcactaggtttgtgataaaggacacggttgaagagcgcatactgcaactgcaacagaagaagcagctggtgtttgaaggcaccgtgggggactcgccggatgccatgtcgaagcttacagaggcggacctcaagtttctgtttcagatctaaatgctgacgtagttaagcatgagtagggagggccaggctatgctaggactaggagcactgacttgttggaagttggaaccctgacgctgccataacaccaggacggacggggtcggcggtgcgtagatcgactgctgctgtgcctgttggaactgatgtacttttgcagtgtgtgtaacatcgatggcagcgactagcgaggctttccgttggagtagcccgtttggg

SEQ ID NO: 3490 - DNA, 999 bp, Zea mays
  Clone ID: 700332949_FLI
gactatggcaagaagtccaagctcggtttcaccgtgtacccatccccccaggtgtccacatccgtggttgagccatacaacagtgtcctgtccacccactctctcctcgagcacactgatgttgctgtcctgctcgacaatgaggccatctatgacatctgccgccgctcccttgacattgagcgcccaacctacaccaacctcaacaggcttgtgtcccaggtcatctcatccctgactgcttccctgaggttcgatggtgctctgaacgttgatgtgaacgagttccagaccaacctggtgccctaccctaggatccacttcatgctttcgtcctacgctccagtcatttctgctgagaaggcctaccacgagcagctgtccgtggccgaaatcaccaacagcgccttcgagccatcctccatgatggccaagtgcgacccccgccatggcaagtacatggcatgctgcctcatgtaccgtggtgatgtggttcccaaggacgtgaacgctgctgtggccacaatcaagaccaagcgcaccatccagttcgtggactggtgcccgactggcttcaagtgcggaatcaactaccagcctcccagcgtcgtccccggcggtgacctggccaaggtgcagcgtgccgtgtgcatgatctccaactccaccagtgttgtggaggtcttctcccgcattgaccacaagttcgacctcatgtacgccaagcgcgccttcgtgcactggtacgtcggtgagggtatggaggagggcgagttctccgaggctcgtgaggatctggctgcgctcgagaaggactacgaggaggtcggtgctgagtttgacgagggtgaggacggcgacgagggtgacgagtactagacgctctactggcgcggcgtcgtcgggcttgtgtgccactgctatcctgtgatctgccctgagtggctcctatcgtgttatgtttctgtcggttcttatctatctgtcgttgtgtggttt

SEQ ID NO: 3491 - DNA, 1656 bp, Zea mays
  Clone ID: 700333024_FLI
caggcacaaagcctcaaagatgactttttcagaaggttaaaggacattagaaacaaattgaaaaatacgggcagtgagctgctggagaaggttgtctctagctacaaacatgtcctgaatgctcctatggatgaggatactctgatgcgaaaatgccaagcagctcttatcaattttgatgaactcaataaaacgtatggaaacaactctgttttaggtagcagcaatcaatcggaatttatgcagggggtgcaggaacaacacaacattctcagaaactccattgaacaactcaaattgtcagaatcactcagggccactctgatttctcatttgaaggaagcgctgaatgagcaggagctcaaagtggaacaagtcagaagcctgcttcaggcagctcagcctcgattcaagagagctgctgagctctgcgtggggcttggaagcaacatggaaatgcatgagccatcaaatcaagggcttaagaggtctagcctctctgatccacttagtactgttgctccaggagctgagaagtctcttcaaaagggacagtcaagtgcagtgttgtattcacaggagggaaatggttttgagcacatcatgacagagacaaagcttgctgcaggtgatgcttcagacaatatacgtggtggtgatttgccttcacaagtgaacgggggcaacaccaagctgaaaatagaagagcacacttctggtaacaagaggcagaagctagaggatgacacagatatttctcagcctcaatcacagtcaccgccaccgccacccccattccctcatcctgacgcattcgaaccaccaccaccaccaccacctgaggttcctccatcaccagagcctagcccaccaccaccgccaacttcaccgccacccaatatgatccccccgccgccgccggcaatgccaccccaaatgatctcacatgtaccacctccagctggtacatttgtaccttttcctgctggaccacctggtccaatgtattccagctacccaccttttactcctgtggtcaacttccccataaccagcccaccagctggtttccctagtccaagcccgcctccgccttttcaaggattagtgggtacattctatggccctcagttccccaccgcacccccaccagcagacaggaaatgagtgtagtaacctaccagcagccccctcgtcatactagtttatttccccttttcaacagagaatatgactcggggggtaggggggggcgctccatccgcatgtgttgtggagctcagaagattgttgtattgttgtaaatttagccagtcagtgcgcagcagtgaattttctgaactagttgtggtcttggtcctggagtagaagtgtagaacctgtagatttcgactggtagagagaattaggaattctgagagccgagaacaaatgcctgcgacagattaataagttgtggtcttgttggagtaaaaactgtagattccgacagcttagagagagagcatggaactcggtagcatgacatgttgtaactcatgtacaattgtgttcattgccagatcatccgagaacatgtacatgttcccgtgatgttttgagcgtgtaattctgttgttctgtgtaagatatgacttgagccgctgtcgatggttg

SEQ ID NO: 3492 - DNA, 913 bp, Zea mays
  Clone ID: 700333062_FLI
ggcggctggcccatcgaattccccttcaggcaggctgtcacggccgcctctctcaccttcaccggcgacacaatcgcgcaagtccgcagccgcatcgtcgaccgccgaagatgctgccccgactccaacaccaaggaactcataccagacatattgctgaaccatgattggattcgtgcacttcgtatggcttcctatggatttcttctttatggtccaggttcatatgaatggtatcagctccttgatcgatgcatgcccaagcagacatttgtaaatttgtctgctaaggtcatcctgaaccagatcgtgcttggtccttgtgttattgctgtaatttttgcttggaacaacttatggttggggaaactttcagaactcccatccaaatatcagaatgatgcccttcctactcttctatacgggtttaagttttggattcccgtatcgattgtcaactttggggtgattcctttgcctgctcgtgtcgccttcatgtcctcttgttccattttttggaacttttatctgtcgaccacaatgagcaaatgaaacctccagttagttgtcagttgccaacctatctggaacgaacaatctcatatggaccctgatactctgcaattttgctcagtttggttgggttcattacacagaggagcatctgaagaagttagtttcagcaggcataacagtgttaggtctatctttggacagtccttgtggtgtagtgacattaaactgtgaggccttactcagatgttgatgagcgtaaaggtcaattcagcaggcataacagtgttaggtctatctttggacagtccttgttgtgtaatcatgcatggagcatttgtctctattttgaattcaaaaaaatgtagttgagtttattatgtgcgatgtgtattgaatc

SEQ ID NO: 3493 - DNA, 1323 bp, Zea mays
  Clone ID: 700336273_FLI
catgcaccctcgttcctactagccacaccagctatgagacaccccggctacttccttcttggtacgtactggtggcggtactgaaaactactccgcagagatacacgagaagacgtatagttctgtacctagccaagccaagctacctccctcgctcgctccacacctgcctgcatgggcggcggcggcgaaggcagagacagcggcggcggcggcggcgcggcgagctttcgggaggcggctcgtgacttcagcaacgtcgcgtccttctccgagcttccgttcctgcagcgctccgccgccccgccccgtggaagcccccacaactccggcatccgcatcttcggcatcgacgtcccgcactccccaccggagagaaactctaataaagatgccacggccgctactactactaccgccgccgcttccgccacgcagagcagcggcggcggcggggccaccaccgacagcagcagcagcagcagccgcaagttcgagtgccactactgctgcaggaacttcccgacgtcgcaggcgctcgggggccaccagaatgcgcacaaacgcgagcggcagcacgccaagcgcgtgcagatgcagtccgcgatggccgccgccgcagccgcggcggcggcggctggcggcgcgcaccaccaccacctactcggctacccgcagcaccgcttcggcgtcgcaggccccacggtggcgacattgtacccctcgtggccaacaatgaggcctccagctccagcaggcgccggtgccggtgccgtcgccatcggcggcccgcagttctacagcgggatcggctcgatcgcccagccgatcaacgggagccccctcctcacggctgccgggctctggaggggcccgccgccgcctgctgccgggcatgggaacgcgagcttgccgtcgtcaccaggcggagagcgccgccggccggtcgcgctctcgtcctcgtcccccgtgttccgcggagacgatccgagggcttccacttctcttttggcggcggcgtcgtcgccctcctcttcctcctctttgctgctatctccacaaggtcagtttgtctgtgagcagcctgctgccaccactgcggccgagggcgtgagcctagatttgcatctataattgtttccttttggtcgtctatgctgcttttagcggacgacggtggtgtgagcctagattttcacttgaattcagatcgtgccttgtttcctgacacgggtgcacaagaatttcatctatcgaagtttcggaactttttgtctgtgtgcatacacatatacagaaagattcagacaatatgttagggtt

SEQ ID NO: 3494 - DNA, 1097 bp, Zea mays
  Clone ID: 700336294_FLI
ctgtgaagaagatagacagcgcttcgctgtctctgtacgaagaagacaactttctcgcggttgtgtcgaacgtgtcccggctcaggcatccaaacatcgtgccccttgcaggctactgcgtggagcacgggcagaggctccttgcgtacgagtacgtcgggaacggaacgctgcatgacatgctgcacttctctgacgacgacgggatgacgatgccgggcaagactactaggctcgcatggaacacccgcgcgaggatagcgctaggcaccgcgcgcgctctagagtacctgcatgaggtgtgcctgcccccggtggtgcacagggccttcaagtcatcaaacatcctgctcgacgacgagtacagcccgcgtctgtccgactgtgggctcgctgctctgtcgccgaaccctgagactgagagggaggctttcgctggagtggttggctccttcggatacagcgcccctgagttcgccatgtcagggacgtacactgccaagagtgacgtgtacagtttcggggtagtgatgctggagctgttgaccggccgcaagccgctagacagctccagggagaggtcggaacagtctcttgtgagatgggcgaccccgcagctccacgacatcgatctgctcgccaagatggtcgatcctgcactggatgggctgtaccctgccaagtccctctcccgtttcgccgacataatcgccatctgcgtccagtcggagccggagttccggccgccgatgtccgaagtcgtgcagcagctggtgcgcctgatgcagcgggcgagcatcgtgaggcgacaatcggacgaccagctgggctactcgtacagggttcccgagcgcgacggcggcggcacggcaggcggcgacgtcgtcgtcgcctgagctagctagctagctagaggccgcgacgagaccaaagctggcgtacactcctactcctacacaaagcgctgcacagtttatatatattcataaacaaaagagcgagcaaaagaaaagaaaagcagttggatatggatggatccttcacgttttgttaaaaagtcacccgtaaacgacatatatgtatagggtttgcagcgt

SEQ ID NO: 3495 - DNA, 475 bp, Zea mays
  Clone ID: 700336343_FLI
acgaggccaccaagggcgcccacgggctgtgcatcctgaccgagtgggacgagttcaagaccctggactaccagaagatcttcgactccgagaagctgagggagatcggcttcatcgtctactccatcggcaagccgctcgacgcctggctcaaggacatgcccgcggtcgcctaatcccacccccctcacccatggattggattccgggaaggaagaggagagaagctggttgaccgttctttattacagtttgtttttgcaggctacgctaccgattttctcttgtgtcaggcataaaaaaaggttggacgggctgctagtattccctgctgtttggtgttttcgtatcggaggacgtctgtagatgtacaattcctcaggccccttgtgttcggcttgaggaagtttccgttgtaccctggacctgctatagccggttgattcttcaattgtattcctaaaagttactacac

SEQ ID NO: 3496 - DNA, 1018 bp, Zea mays
  Clone ID: 700336372_FLI
cgcttctgcccctctgcggctctgctgcctgcccctttttctattcccaaaactcccatctcgcggcggaaagagagagagagaggagaggtgcgagctggtgagatggatcggttggaggagcggaacattaagaagggggagagggagatggaggaggcgcgcaaggaagaggagcggaaggaggaggcgggggacaggaatacccaggagccgcagcaaggtcaaggcctcagcctctcactcgccaacggcagcgacagcggcaggtctgcaatgttgccgatgtcgaacccttcagctaatcccacacagcttacaattttctatggtggatcagtatgtgtgtatgactcggtgccaccagaaaaggctcaggcaatcatgcttatagctgcagctgcggcagccaccaaaggcagtgctgccactgcttttaatcctccaatgagcacttctgtagcagctggacaagctcaggttgttgctgaccctagctcaataagcaagcttcaggctgatctccccattgccaggaggcactctctccagcgcttccttgagaaacgtcgtgacagggtcgtgagcaaagctccgtacagccccgccaagtcgttcgatggcatggagtcagcgggaatggagatgactgcggacggcaagcagggcgcaaggcccagtatcttgaaaggttggggagccgcgaagtctgaagtctgaacggtgaaaggctggctgacgctgtggggaggaaggggcagggacgtgctgttggttttattatattggtatttatgttattatatatgtggtagcagcagcgtggaaccgcattaataatggggaccttaacacctctattttactgtcgttgctttgttgtcgcgtgctaggttgtattctgaagtggattcctcaataccgcataccgtactgctacgcctgttgactttgttacattgattgatcgttgtccacttgtaatggaatgccgcaccatgttttctgtcgtgccatc

SEQ ID NO: 3497 - DNA, 1107 bp, Zea mays
  Clone ID: 700336428_FLI
cccacaccccccgagctcagcttagctccactccagctccaatcacagtcgtgaccagagcgcgagagctagctagagggccgtgaaaatgccgatcaataggatcgccctggggagccaccaggaggtgtaccacccgggcgccctcaaggcggcgttcgctgagttcatctccaccctcatcttcgtcttcgccggccagggctccggcatggccttcagcaagctgaccggcggcggcccgacgaccccggcgggcctgatcgcggcggcggtggcgcacgcgttcgcgctgttcgtggcggtgtctgtgggcgcgaacatctccggcgggcacgtgaaccctgccgtgaccttcggcgccttcgtgggcggcaacatcaccctgttccgggggctcctgtactgggtggcgcagctgctggggtccaccgtggcgtgcttcctgctccgcttctcgacgggcgggcaggccacgggcaccttcgggctgacgggcgtgtcggtgtgggaggcgctggtgctggagatcgtgatgaccttcgggctggtgtacacggtgtacgccacggcggtggacccgaagaagggcagcctgggcaccatcgcccccattgccatcggcttcatcgtgggggccaacatcctggtgggcggcgccttcgacggcgcgtccatgaaccccgccgtgtccttcggccccgccctcgtcagctgggagtggggctaccagtgggtgtactgggtcgggcccctcatcggcggcggcctcgccggcgtcatctacgagctgctcttcatctcccacacccacgagcagctcccctccaccgactactaaaagccgaagccgaccgacctaggggtgcgcagcgcagctagcgcatccagctctctctccccgctcgccgccgtttagtttctctcgtgcacgtgcatgcatcgtcgactgtctcaggccgccgctgcgccggcgccgctcgcatcgtttgcttccttggaccagcagtcgtcgccgtcaggctgaactgcttgtaaccgtgaattccggacccgtttgcttctgtaagatttgtgcatttgcctgagtacacctcgatctgcagc

SEQ ID NO: 3498 - DNA, 502 bp, Zea mays
  Clone ID: 700337932_FLI
gtggcacagaagttgtggaggcaaaggctggatcaggctccgcgactctgtcaatggcttttgctgcttctaaattcgctgacgcatgcttgcgagctatgcggggcgaagctggaatcgtggaatgctcatatgttgcatccgaggtgacagaactgccgttctttgcaacgaaagtgaggcttggccgtggtggagccgaggagatcctcccgcttggccctttgaatgatttcgagagagctggtctggaagcggcaaagaaggaactgggcgagagcattcagaagggcatcgctttcatgagcaagtgaaagcggagcggtacggagggatcgtccctgagtcagatccggaccatacgtagtaacgtagatgtagggtgttgtgatatagtgctcctacctatacttgtaaggccacggtaaaaagaaggctaattaccctttagcaactgtgaccatctacttggcataatggcatggaataaatctttcgtctt

SEQ ID NO: 3499 - DNA, 463 bp, Zea mays
  Clone ID: 700337981_FLI
gattgttcctgatcgaaacccgaactttttggcaaatgagtgccggtggtgcttttggcggaaataggggggtgaggcctgtacctcctgaaaaaggtgtgttcccattggatcacttacatgagtgcgacttggagaagaaagattatcttggctgcctgaaatctacaggattccagtctgaaaaatgtcggcagttctcaaagaagtatttggagtgtcggatggagagaaacttgatggccaagcaagacatgtcagagcttgggttcagaattgtggatgaagcgggtacatctcctgacaagaacagcaaaccggagagccctcctaatcagccaaaggattaaaaaaatagctgtttggctttgatgtagcttttgtatgtttcttcatcccaaagatctgtcaagatctcaaacaaataagggtataatgaaaggacgatgttagtttacatagt

SEQ ID NO: 3500 - DNA, 214 bp, Zea mays
  Clone ID: 700338020_FLI
ggtgttacacgcttctgtagccctgcgcagttttagcactagcagtgaagcagcagtactgctggatctagattagtagtcatcggaaatgccgaggtttggtcagttatcttgtgctctggtgttaaatcagcagatgacattgtgtcgttgttacttcagtaacgtgatataacggtcctatgtcgtgaaactagctcatggtgttagaact

SEQ ID NO: 3501 - DNA, 473 bp, Zea mays
  Clone ID: 700338021_FLI
atggcagaaggatgggatgatcgtggtaaatgtatttgttggtggggagatggttggacttggttcctcggagcagaaggtaattgctaagctgaatgctgcacgagatgcactgggcaagcttattggtggtgcaaagcagcaagtgttgatcaattgtgccgccaatggattggtggatgacattgcagagcttagggagtgtaaacagaaacttattgagcagtgcatcagaaaacattggccaaaacctatctttaaattagaaaaagaaggtggccctgcacatgaaaggaactttgtgtgttctgttcaggtagatacccaaactggcacttttgtaaccataggtgaatctatgtcaagagttaaggatgcagagaattcggctgcgcataagatggtcgaactattgttgaaattgtgagatatattcatgtacatggctagatctttggtatacctctttcgag

SEQ ID NO: 3502 - DNA, 737 bp, Zea mays
  Clone ID: 700338026_FLI
aactgagtgcagtgttgagcactctgtcattggtatccgctcaaggttagaaccgggagtgcagctcaaggacaccatgatgatgggggcagattactaccagactgaagctgagagattatctgagctgtctgttggaaaagtcccagtcggtgttggagagaacactaaaataaggaactgtatcattgataaaaatgctcgaattggaaagaatgtagtcattatgaactctgagaatgtgcaagaagcagacaggccagctgaaggatattacattcgttctgggataactgtggtgctcaagaatgcagtaattctgaatggtacaaaaatttagaagattatagaattatctgcagaataccaatccctcagtgaagagcacagcattgaagcccacagcagagttctacgacgcagatgcagtcaataaaaaccccaatagcacaaaagattaggagactgtcgatgcagctaaagaagtgtggatataggcatggagcacctgcacctgcaacacgccaacggtacggacaaaccatgagcttgaggccatttcacgtcctttcataagcctcggctagtgccggcgcgcgcagggtatcttttgttccttttttctagcagtaatttacgtgaagtgtctgtacatgtagagggagagatagggtagtacgagagagcatgttatagtacctactcttattatttgtttatttatcgttgtgccgaag

SEQ ID NO: 3503 - DNA, 450 bp, Zea mays
  Clone ID: 700338029_FLI
agattttctcgataagctcctgcgctatgatcaccaagacaggcttactgcacgggaagctatggcacatccctacttccttcaagtcagagctgtggagaacagtaggacgagagcacaataatcatggtctgcactcttgaaatggagttgttgctagttcgtgaaaatcataggcttaaatccatgttcagtattcacatcgctccaggaatctgggccatgactccatggcaatgaatcaaaatagtacgagccgcatcatgtggacaaccttggcagatctttttattcttgtctttattgctgggagcactgtagctttaaacctacaagtagtgcttgaatgagatgagattcatatcatctcctgtggtggaatgtgaaattgtatgtgacctttagactaattaaaaagtacaatacagcgctaagcatactgcttgtatt

SEQ ID NO: 3504 - DNA, 940 bp, Zea mays
  Clone ID: 700342858_FLI
cgtgctctctctgccccatccgcgcgcccctcctcctccaccgcccgtcccactcccgccgccgccgccgcccggccgtctgctggcgatggcgtaccgggcggacgacgactacgactacctcttcaaggtggtgctcatcggcgactccggcgtcggcaagtcgaacctgctctcgcgcttcacgcgcaacgagttcagcctcgagtccaagtccaccatcggcgtcgagttcgccacccgcagcatccacgtcgaggacaaggtcgtcaaggcccagatctgggacaccgccggccaggaaagataccgcgctatcacgagcgcgtactaccgcggagcggtaggggcgctggtcgtgtacgacgtcacgcggcacgtcaccttcgagaacgtggagcggtggatgagggagctgagggaccacacggacgccaacatcgtcatgatgctggtagggaacaaggcggacctgcgccacctcagggccgtcccgaccgaggacgccaaggccttcgccgagcgccagaacgccttcttcatggagacgtcggccctggaggcgatgaacgtggaggacgccttcaccgaggtgctcgcgcagatctaccgcgtcgtcagcaagaaggcgctcgacatcggcgacgaccccgccgcgcctcccaggggccataccatcaacgtcggcggcaaggacgacgtgtccgcggtcaagaagtctgcctgctgctcgtcttagcttgggaggacaggatagagcgtgtacttgggtttggttgttgatacttcagcactagagggcacatgacgttattgcagtcatggtcctcgatctgtattcattcgtttccaggtgtctcgttgattttgccatttgatacattgattcattcaggacttgggcctttctggtatagtgtagggataccttgttcctttt

SEQ ID NO: 3505 - DNA, 2688 bp, Zea mays
  Clone ID: 700267114_FLI
gtcggagagagagagcgagcgagcgagagtggtggtggtgtgtgcgcgagcgcaacagggagagggagagcgtatttcttcttcctcaccctcctcgaggaagagagagggcagctccggagccgcacgggcgcgagcgaggcaggcagtggctcctcccccctcctttcgatatcagctcatcgattcgtcctatcacacacatatcattaccgctcctcttcctctcctatgcttgtcctctaactcattggcagaaaaaaaaaaaaaagtccttgttgagttgttgtatcgggttctggtggtgactgttactggggtttccttgtccggttcttgattcgcgcaaggacagatttgccgtcctctcgggttccgccgtgcggtgctgaatcctccttccctgttcccttcccttaggtttggatcggggatagggatggaagtggacagaaagaagaatttgcagattggatccaaggggaaggaggttcagagcaagaatccgaggcgggaggagccgctggcatcgtcggaggtggacatggatgagccagacgctcctgagagcggtgacatgattgttgatggcaacaatggctgctccagagggagccccttgcagcccatggattccaagaattccaagggctgtgcggtcaagccaacatcggtgagctcagacttcggtgaggagctggacttggaccttggtggggagaagagtgagacgcagcaggagaggaagctctcaaggcaagaccgggttgagctttgccggtcgttccagcttgcagtgagctcccatgattgggagagcgccgaggggctggtaggaatggctgatgcacaagggctcaacgatgtgctgtgtgtggcagtggatgcgatttggttcttgagtgatagggatgagctgcttgctattgtggggttgatcaaaagggttgtgtctgagggcgcaaaagattttacccgtgctgcgctccggacatcattcctcgcatcgtgtgtatcagcatgtagggggcggtcgactagccttgctgatgcagtgagcttcatgggccagaaattgcatgaacgacttcaagaatcccaaggtgatgaggtattgaaagcagaagcaagtgcaaaggtgcacaggtttacagaatgggctctaaagtgtatcgggctgcattcacgtgttcgagagaacaggggcaaaggaaaccacgacactgtaattgaggttcagcttcagttgtctgctttcaagatatttcttgatcttgctgataatgagcttaccgggaaggattttacggaggcttttgatgctgcatgcttccctcttacactcttttcaaccaccttcgaccaaggatgggcatcaggaatatcagcagctgcagtacaaggccttttagagttgttggtagagggtggtgcagacaatgtgaaccaatgctttcttgaagctgcacgctatggcagcactgagctcgtgcggatcttacttcaggttgctcaaagaaacagcttggacattgatgtggacctagcccttggctttgccgcacactatgggaagatcgaaaccatgggatgcttggttgaagaaggtaatgctattggctttcttggccctttgatgcgtgctgctgaacgtgggtgcctccaagttgtggaatggtttgtcaaccacgggtgtcgagaaatggagctttgcctagcccttactgctgccacctctaatagccagattgcagttgctgcttatcttcttcctcttgtcccgcaacatgttcttgcccccctcagcattgagattatcaaggctgctggtgagaggactacgggttccctgcagggtgtggattttcttctccgctcggatttcctcaatgacccagctgccacatatgccgtggcagacagtattgcaagatgcaccgatgaagctgtggacgcaaagcttaggtctttcatgaatgagcactggagcgaggcagctttttgtgcgggattcgaatctgcacagcagcactttgttaatttcatgaggataatggaaaggggtgaatcaccaatccgcttaggggacctcccacttgagctggtgattgccatggcctacctgccgctctataaggaatgcatgaattccaatgggcgacttttgcctcaaaggcttagaggtcagcttgtggaggctgcaagcaggctcgaggaccggcaagtggaaagggatagccaaagcagagaactcttggccatcttggagcaccacataccacgattcatgatgcaaacttgaaggtaagcgcaggcatccactctgaaccactgctgtcaatgcaagcaaaaaacaacttacaagggcaatccacgccgtcttcagtgccgccatcatgttcctgcttggggacatcaccaaatgatagcatcttgagttggctctcctgcaggcgatcttcggagagtatataattctggggaatggtgtgtgccttgtcgaggcatgtgtcggagtgttttactgggaccataatcttccatgaaaaaaaatgatataagccttcggtatgtaatcctgagttttcggtgtaattcaaaacgctggtcttgtggcaacatgtcgctagttttggctagcgacttttttgatcatggcttcaaaaacaaaacgaagggagtatattc

SEQ ID NO: 3506 - DNA, 1148 bp, Zea mays
  Clone ID: 700267149_FLI
gttccaagctggtgatgcatttgagtacttgactcatgaaggcttactgtttgtggcaaccctttccgcagaatacgagaagtggagttgaagcgcgactatgcatttattgagttcagtgaacatcgtgatgccgatgaagctcggtaccaactagatggcagggatgtcgatggaagtcgcattgttgttgagtttgctaaaggggtcccacgtggtccaggtggctcacgtgaatatatgggaagaggccctccaccaggcacaggtcgttgtttcaactgtggaatggatggtcactgggcaagagactgtaaggctggtgactggaaaaataaatgctaccgttgtggagaaagagggcatatagaaagaaattgccagaacagtcctaggagcgtcagttactcacgctccccatctccacgccgtggaagaggtcgcagtccaagctatagcaggagcaggagtcgtagccggagccggagctatagccgatcgaggtccctatctggatctcctaggggaggccgccgtgaccgtgatgataggagatcgaggagtcttagctacagcaggagccccgtgcggtcgccacctgcaaaggaaaaggagcgcagtcccacacctggcggaagcaggagcccaaggagccgcagcccacaggatcaggtgatgagcccaccacctaaggataacggcgataggaatggttcagaccgtggcgacagccccagagggagggaagacagcaggagccgcagccgcagcccatccggtggtaaccgcagccctgcagctaatgggcgtagcccgagccccagaggtgaccgtaccccgagccccatggctgaccgtggcccgagccccatggctgaccgtagcccgagcccaaagggcaatggtaacaacgatggtggtgatgatgatactggccgtggtggttcccccacaggaagcaagtcaccctgaacgctgcaccgtctcagttcttaggtgcttcgtgatgcagtgggcaaacataccaaagacgtgatagctgtatcgtttccctatctgagacgtggacttatttagcttgctttgatcttggactcttatttttttctcttatggatatatgatatgatgccttcgggctggcttgg

SEQ ID NO: 3507 - DNA, 1744 bp, Zea mays
  Clone ID: 700267251_FLI
taccactctcgattaccagccctctcgccttctccgctcctccgtcgtcgccgaaccccatggccccaaaaccctaaactgagcccgccgctgcttctccagtccgcacgaagcgccccacaaaatgccgcggctgacgccggcgcacgccaccctcatcctggaccacgtcctgggcgatccctcgatccccaccgcagtcaccatcgcgttaatcgctgggatcccctctccctccgatccgaccccgcgcctccgccgcggggtccttctccgccgcctcgccaccgaccccgtatccgaatcctctctcgaaaccctccacctcctggcctcgctcccggcctgcgcctcccccatcgcagccgcccacatcgccgtcgcggcattcctcgcggcctccgcgcccgacttcgacgccgtcgccagggctctcttcgcgcgccccgacggccgcgcgcgccaagcggtccacggcggaagttcccccgcgctcgcatccgacgatgccatcgccacagtagaccagttcgaggctgccgtcgggatgtcctcctctcagaccatcctcagggtcctgtggggcaaccgggccgccgtggaggagcgggtccaggagctcctcgctgctgaatgggccgcgattggcccgtcgcggctcgaggcgttggctatgcggatcgtcggggatggggccgtcgatacatggggtgccgcagatgaggccatgcgtgccaatttgcgcatcttggctggggaagcaaaaacgcgcgagattctcgacaaacttgaaaaaactacctgcaacacaaatccaatttcaacaccagctgttgagaaggtgatggatgcgctcaaagcaagctgtgctgacctccacagcattgtggaggatccccttccagctgcaaaggcagttgcagatgagttattgactgcgaggatggaaaaattagttagcctgaatgcccaagaagtaggagggcagccaacaacttgtggcgttgcaggaccgagtattcataatgacaaagacaatggtccaggtataggcaaacctcacagccttatggagcggaacgcaacagcacgaacctctcagtgggaggagtcacttggtcttgatggttcggaaccaccctcaccaccgagaccacacttgcctagcccaaggagactaccaccttctcctttgtcaccgcctgggaacaaaaacaataatcggagaaaggcaaggaggtggagcttgttcgaagaagaaaccttaagaaagggtgttgaagagtatggtgttggcaattggagggatattctagataacaatgctgaggcttttaccggcaggacaccggtggacttgaaggacaagtggaggaacatgcttttccgttgatgtaacggggaaacatgtagctggacatgctttactagggtaaagtacctagcaattagcatgtagtcctcgtacatcacagcagactcttggtcaagcttttctggcagctgcagctacatgattttgtgtctcggtgtagtagcagccgcagcttttctggcagctgcagctacatgattgtctcggtgtagtagcagccgcagcccaaacggttggctttcctggcagctgcagctacagtattttgtgacggtatgcttaccgagtggctgattcgcgcactgacgtattatggactcgattttgtatttttattatgtacattgtcctgcatgcttgcattgtact

SEQ ID NO: 3508 - DNA, 1391 bp, Zea mays
  Clone ID: 700267284_FLI
cagcagacgacgggcgccatgaaagtcccggtgcttctcctcctggtctccctgtgcttctcgctcgcgctcgcgtggcaaacggacacggaatcgggctcaggcaggccgtaccactacggcgaggagagtttccggcactggacgcgctcccggcagggccggttcagggtgctggaacggttcacccacgagctgctggaggacgccgtcggcaactaccgcgtcgccgagctggaagccgcgccgcgcacgttcctgcagcccagccactacgacgccgacgaggtgatgttcgtgaaggaaggcgagggcgtcatcgtgctgctccgcggcgggaagagggagtcgttctgcgtcagggagggcgacgtcatggtcatccccgcgggcgccgtcgtgtactcggccaacacgcaccagtcggaatggttccgcgtcgtcatgctcctcagccccgtcgtctccacgtctggacgcttcgaggagttcttccccatcggaggcgagagccccgagtccttcctcagcgtcttcagcgacgacgttatccaggcgtcgttcaacactcgccgggaggagtgggagaaagtgttcgagaagcagagcaagggggagatcacgacggcgtccgaggaacagatccgggagctgagcaggtcctgctcacgtggtggccgcggcagccgcggcgagggtggcgactcgggttcttcttcttcttccaagtgggagatcaaaccgtccagcctcacggacaagaagccgacccattccaacagccacggcaggcactacgagatcaccggcgacgagtgcccgcacctccggctgctcgacatggacgtcggcctggcaaacatcgcccgcggttctatgatggcgccgagctacaacacccgtgccaacaagatagctatcgtcctcaagggccagggctacttcgagatggcgtgtccgcacgtctccggcggccggtcgtcgccgcgccgtgagcgcgggcacggccgagaggaagaggaggagcgggaagaggagcaaggcggtggcggtgggcaaaaggcgaggagctacaggcaggtgaaatcccgcatcagagagggctccgtcatcgtgatcccggcggggcacccgaccgcgctggtcgccggcgaagacaagaacctcgccgtcctctgcttcgaagtgaacgccagcttcgacgataaggtgttcctcgcgggcacgaacagcgcgcttcagaagatggataggccggcgaagctgctggcgttcggggcggacgaggagcagcaggtggaccgtgtcatcggagcacagaaggacgccgtcttccttcgcgggccccagagccacagggtctcgtcggtgtaagtgcatgcttgagatgt

SEQ ID NO: 3509 - DNA, 1575 bp, Zea mays
  Clone ID: 700267302_FLI
tctgtgctctcgcctttccattcctccaccggcctcatcccccaactccgtcgagcattaccgtcagagggcggcggcgcggcgcggcgcggcgccgccggcgacggggaccgcgtgaggcaggctcccctcaaggctcgtcctcctcgtcgggaggcgtcgccgttgccccgccctctgggctggcgcggcgtggaggggacagctggagatccgcccgtctctgcttggattgcttccttctcccgcagagggtatgagcaatgtactcaccaaaaccagagtctagttttggcccaaatcccaactcaggtacacaccagcagcaaatggaattaactggggccaacatgggtcctggtaatggagcaaataacaataccaacatggctgggaggcaacgcttacgctggacaaatgaactgcatgaaagatttgttgaggctgttactcaacttgggggtcctgatagggcaactccaaaaggagttctgagaattatgggtgtacaaggattaacaatataccatgtaaaaagtcacttgcagaaatacagactagcaaagtatattcctgatgcttcaactgatgggaacaagaccgataacaaagacccaggagatttgcttgccggacttgagggatcctctggattgcagatatctgaagccctcaaactgcagatggaggtccaaaagcggctgcacgaacagttagaagtacaaaggcagctgcagttacgaattgaggctcagggaaagtacctccagaagatcatcgaagagcagcagcgcttaacaggtgtgaaatctgaaactcctgctggaggtgcttctgtcactgtatcaagtgatcaattcccagactcggagcggactgagccctccacacctgcaccagcatccgagtctccaactcaagttggtgcttccaatagggacactggagaccgaactgaagcaaccaagagcacctgtcatggtgattctctttcccgcaacgagccactaacccctgattccaactgccagaacggttctcctgtcgctagtccaaaccatgaaagggcagccaagaggcagcgaggcagtggtactgaattcttagattctgaggctgagttttcccttccgcgccacatcttcgagtcgagttcaggctcagagttccaacaatactcaatgtcctactcaggacagtagcttctgatgttcacatcatctctgcaccgttgctagcttgttcagcacgatgcgcatggtccgtaggtctgggtaggttgatgtctcaaggagcgtgttgttggtaaacaaagctgtaggtgttcagtgattgtctacatggtatacgtgaccagctatttaagttcctaggtttgtaacatgtatgtccgcctgcagttcagttgagatgcttcaaggctaaggttctgttgtgtgacctgtagacacgaggctgtcagcttgtattctcttggtaatgtgtgtcagcagagcgttagcattaagtctaattgaacagtgctgttatctgtaacgtctgagtttgatcagaaactgaagttaattgaggaag

SEQ ID NO: 3510 - DNA, 1290 bp, Zea mays
  Clone ID: 700267313_FLI
tattgatcataagaaatatgatgaggctaaggcatgcgcaagtgtgagcattgctcgcctgaagaatctaaaccggagaactgttgatgttttggcatcacgactgtacttctattactcttatgtgtatgagcttaccaacagccttgctgaaatccgtgggaatttgcttgctctacacagaatggcaactttgcatcgtgacgagcttggccaggaaacactgctcaatctcctccttcgcaattacctccactacaatttgtatgatcaggcagaaaagcttagatcaaaggcacctcgttttgaagcacactccaatcaacaattctgccgatacttgttctacttgggtaaaatcaggacaatccagttggagtacaccgatgctaaagaaagcctcctgcaagctgctcgtaaggcaccaataacagcctgtggttttcggattcagtgcaacaaatgggctatcatagtgaggctgctgcttggagagattcctgagaggactgttttcatgcagaaaggaatgaagaaagctctgataccttattttgagctcacaaatgctgtcagggttggggaccttgaactgttcagggctgttgcagacaaatttgcaagcacattcagcgcagacaggactcgtaatttgattgtgaggctgcgccataatgtcattcgaactggactgcgcaacatcagcatttcttactcaaggatctcccttgctgacattgctaagaagctaagactagactctgagaaccctattgctgatgcggagagcattgtagccaaggccataagagatggcgccattgacgccaccatagatcatgcaaatggctggatggtatccaaggaaactggtgatgtctactcaacaaatgagccacaaattgcattcaactccaggattgcgttctgcctcaacatgcacaatgaggcggtcaaggcgatgagattcccccctaattctcacaaggaaaaggagagtgctgagaagcgccgagagaggcttcagcaggaggaagaactggctaagcacatggctgaggatgatgacgacgacttctaagttagctgccttttgagcaactacttgcaatgtggagtttgttcgatttgtgaacgcctggttcaaagcaattcccctacctctagttactccagtcatgcaaacactgaagttcatccactgtaatgttgtgtcgatcaggattttgtactaattctatacttgagttttagtccccctgaattgttgaaccagggaatttactcacc

SEQ ID NO: 3511 - DNA, 629 bp, Zea mays
  Clone ID: 700267388_FLI
atcccaacccccccaaggcacactccacctccgcaaccaaacgcgctagggtttccgcaccgcacctctagtcctccaccccaccccactaccggcgatggccaccgcggcggcgcagggcggtagcgacaagccggcgctccggaagcccgtcttcaccaaggtcgaccagctcaagccgggcactaacgggcacaccctcaccgtcaaggtcgtcagcgccacccccgtgcccggccgcgcgcgcccgggcgcacccgccgccgcctcgtcccgcgcgccgcgcatcgccgagtgcctcgtcggagacgagaccggcgtcatcgtattcaccgcccgcaacgaccaagttgatttgctgaagcccgatgccacggtgatcttgcgcaatgccaaaatcgacatgttcaaaggatcaatgaggcttgcagtggacaaatgggggcggattgaggctacagagccggccagcttcacagtgaaggaagacaacaacttgtcccttgtagagtatgaattggttaacgtggctgaataaccgtcgaagcgtttctgccccccctttcttcttctttttcacgcacgccataagatgataaggaaacgaacagcatctcgaagctgagttt

SEQ ID NO: 3512 - DNA, 1867 bp, Zea mays
  Clone ID: 700267466_FLI
gtggagctggctgtgacggccatggaggagctggttcggatggcgcagctggacgagccgctgtggaacgcgccggcaggcgggcacgacgggtctgctgagacgctgaacgaggaggagtacgcgcgcatgttcgtccctgctggagggctcgggctaaaaaagcagtacgggttcaagtcggaggcgtcgcgcgacagctccgtcgtcatcatgacccatgccagcctcgtcgagatcctcatggacgtgaatcagtatgcgacggtgttctcgagcatcgtgtcgagagctgcgacgctggaggtgctgtccaccggcgtggctgggaactacaatggcgcattgcaagtgatgtcggttgagtttcaggtgccttccccactggtgccgactagggatagctatttcgtgaggtactgcaagcagaacgcggatggaacatgggccgtcgtcgacgtctcgctggacaccagctcagtcctcaagtgccggcgccggccgtcgggatgcctgatccaggaaatgcccaatggctactcaaaggtgacctgggtggaacacgtcgaggtggatgacaggtcggtaaacggcatctacaaactgctggtggactcagggctcgccttcggtgcacgccgatgggtcggaacgctggaccgccagtgcgagcgccttgccagtgtcatggccagcaacattccgaccagtgacatcggcgtgatcactagcacggaggggaggaagagcatgctgaagctggctgagaggatggtgacgagcttctgcggtggcgtgacggcctcagccgcgcaccagtggacgacgctgtccggcagtggtgctgacgacgtccgtgtcatgaccaggaagagcgtcgacgaccctggcaggccgccgggcatagtcctcaatgctgccacctctttctggctccctatcacacccaagcgtgtcttcgacttcctccgtgacgaaagctctcgcagcgagtgggacatcctctccaatggcggcgtcgttcaagaaatggctcacattgccaatggccgcgaccatggcaactgcgtctcgcttcttcgtgtcaatcagagcaccaactcgacccaaagcaacatgctgatcctgcaagagagctgcacggacgcctcgggctcgtacgtcatctatgcgccggtggacgtggtggccatgaacgtggtcctcaacggcggcgaccccgactacgtggcgctcctgccctctggcttcgccatcctgcccgacggcccgtcaggcagcagcaacatgcaaggcggtggcggtggcggcgtcggctcaggcgggtcgctcctgacggtggcgttccagatcttggtcgactccgtccccaccgccaagctctcgctggggtcggtggcgaccgtgaacagcctcatcgcccgcaccgtggagcgcatcaaggcggcggtctccggcgagagtgttacccagcagtagctagcttagtcgaatcagacactcttcttatccttgcatcattgaaggagcagcaagttttagagctttcatcagtgggaagtcaagaacgcacctcagactctccttgccatgtggtgctcatagttcgagttcttttttcgcctagtttccccaaaatttctgggtagaaatatttcagtcgcgcaacaagaaaatgagtcaccactacgcaagggttgttggttcgggtattgacttcctctacatgtcggcctctcggatgctgctacctctgaatttaggcttctttttcttctcttgtgggatacaaaaaccgtaatttagcatgtaatttgtgctgttgctgcagttgttcagatttatccagcatatatcctggattccc

SEQ ID NO: 3513 - DNA, 1931 bp, Zea mays
  Clone ID: 700267479_FLI
aagattgagaacttcaaggttggcgattggattagagtcaaagtgacagttccctcacccaaatatggatgggaggatgtgactcgaaatagtattgggataattcatagtctacaagatgatggagatgtgggtgttgctttctgctttagaagcaagctttttctttgctcagttgcagatatcgagaaggcacaaccatttgaagtaggggaaaaagttcatgtgtcaccttccatatctgagccacgcctcggctggttaaatgaaactgcagctactattggagccatatcaaggattgacatggatgggactttaaatatcaaggtttctggccgaaaaagcttatggaaggttgctcctggtgacgctgagaggctttcagcttttgaggttggagattgggtccgcccaaaaccaagtattgggagcagacctacttatgactggaatagtgttgggagaataaacattgcagtagtccatagcattcaggactctggttacttggagttagctggctgtttcaggcatgggaagtggctaacccataacacagacattgagaaagtgcagacagtaaaaattggtcagcatgttcggttccgtgctggaatttcagagcctagatggggatggagagatgcgaaccctgattctagaggcatcatcgctggtgtacatgctgatggagaagtaagggtcgccttctttggtgtgccgggattgtggagaggcgatcctgcagatcttgaaattgagaatatcttcgaggttggagagtgggttaggctgaggaacgatgtggagcagtggagatcactcaagcctggtagcattggtgtggtgcatggggtgggatatcaaggtgatgcttgggatggaaccattcatgtcgctttttgtggtgagcaggaaaggtggattgggccttctagccagcttgaaggagttagcaagtttgttgttgggcagcgtgttcgaatcagaggctgtatccgccagccaagatttggttggtccaatcatagtcattcaagcatagggacaatctcatctattgacgcagatgggaaactgaggattcatacaccagctggtgccagggcttggttgacagacccagcagaggtggaaaaagtggaggacgaggaggaagtctgtattggggactgggtgaaggttaaggactcagttggaaccccagtgtatcaatggggtgatgtgaaccacagcagtataggggtggtccaccgggctgatgatggagagctctggattgctttctgcttctgtgagaggctgtggttatgcaaagcatgggaggtggaaaaggtgaggcccttcagacaaggtgacaaagtacggatacgatctggtcttgtatcccccagatggggctgggggatggagacctacgcgagcaaaggcgaggttgtgggtgtggatgcaaacggaaagctgaggataaagtttcggtggagggatagactttggattggggacccggctgatgtcgttcttgatgatgcccatttattgacggaggcttctaatggcttttgacctttttgttcataggcttgtggtattcttttgaccccatatctcatttcttgcacccatccattttgcagcatttcaaatttagcaaaatctcaacctgcagtggagttgcaagttgcacatagttatcatcgcataggcatgcatggcagggtgtatttcttgttgataaccggggaatgagaagacagcgatagtgaaatactcctagagttgataaccaccacctaggtttttttccctttggtctacatgtataattatgccgcctgataccttttgggtttcagtgtaccatatataccagtgtacaggttcggacctgaacattaatttgattgatagtggtctactggtcttgt

SEQ ID NO: 3514 - DNA, 1329 bp, Zea mays
  Clone ID: 700267568_FLI
gcgcgggccaagcggcggctggtggaggtcccctacaccgcgacgctggcgcacacggccaacgcgctcctggcagcgcgcgtctctgccgtggccgtggctgcgccaccgggccactggatcggcgccggcggctctatgatcctcgagtccgcaagcactacatcggcatggtgaacatgctcgacatccttgcccacatcgccgaggccagcgacgacgacgaggcggtcgatctcgaccgccggatggccgtgccggtgtcctccgtcatcggacactccctcgagggcctcactctgtggacgctccacccgagcaccagcgtgctggactgcatggagacgttcagcaagggtgtgcaccgcgcgctggtgccgctggagagctcggcggacaacgtggtggcgctggagctggtggagtcggcgccggggtaccggatgctcacccagatggacgtggtgaggttcctcagggcgcacggcgcggagctcaggggcgtgctgttgcgcaccgtgcgcgagctcggcgccgtgaatgacaccgtgttcgccgtctcttgcgttaccaaggtgatcgacgccatcaaggcgatgcgggcggcgtcgctgaccgccgtgcccgtcgtggacgccgtcggtagcggtacagagacccttcaatacgggagcgggcaaagggcggtcgagacgttctcggcgacggacctgcgggactgcccggtggcgcggctgcaggcttggctggggatcagcgtgatggagttcaagaggaaggtggctgagtaccgcgccagcaccaggcttgtggtccccggcgccgacgccacggacactggcacccctgtcgccgggtacgccgacacccccgcggctgccgccgccactgacgaagagcagagcgagcagcaggagtcggcgctggtgacgtgctcccaggagagcaccctcggcgaggcgatcgaggcggcgacatcgaggcacgtgcaccggctgtgggtggtcgacgaggaagggctcttgcgtggggtcgtgtcgctcaccgacatcctccgggcagtgcgggaggccgcgctcggcgaggacctggagctgcacagcatcgtgccgtgagcccgtgggccgtgagtcgtgacgtccaagaacaagctcgtagctgtttctgcccatagtgtccgtccacctgtcgtgctcctgcagaggagggggaaaagggcgatcgagacgtgttggcgacggccgaccggcgaccgccgccgagctcgttttgccttgttgctttgtttgttatatggccctggctccgatccgggcttcgtatttcgtt

SEQ ID NO: 3515 - DNA, 1840 bp, Zea mays
  Clone ID: 700267629_FLI
ctctcgccgtccgcacagccgctcatcgtctcccactgcctgccctctccctgcgccggccggtgccccgacgcgccatgtcgtacaacaaggccccgtccatcaccgccgagaccataaatcccagggtcaagatcatcagatacgcgccttgcggggagatcgtcaagcacgcagcgcggctggagcaggagatagaggagaaccctgcttctatccctttccaagagataatatactgcaacctcgggaacccccaggtccttggtcagccgccactaactttctttcgtgaggttctctccctgtgcgacaacccagccctcatggacagagatgaagctcgtgccttattcagcccttgtagcataagaagggccaggaggatcctaaactcgatccccagcaaagacactggtggatatactgattgccggggaatcaaatgcctgcgtcaagtagtagcagatgggattaccgcaagagacggttttccatcgacagcggacgatatctttctgacagatggagccacctcagcgatcaacttgatgatgcagatactcatcaggtctcacgaagacggcatcttgagccctctacccgaataccccttgtactcggcctccatcatactgcacggtggaacgatggtgccgtacaatctcactgaagataacggttggggcctagagatctttgaagtcaagaggtgcttggaagaggctcgttcggctggcctcactgttagagctatggtggtaataaatcccggcaaccctactggacagctcaggttgtaccagagtttctcttcgtcaacacatctcattcctttagttataggtgctatccgtcacaaaccaggaggagatagtagagttttgtcggaaggaaggtctggttatacttgctgatgaggtataccaggaaaatatctacgcagagaacaagaagttccattccttcaagaaagtggccagatcacttgcttacgacgaaaatgacctcaccctagtatcacttcattccgtttcaatgagctatggggagagtggcagaagaggaggctacatggaggtgtctggtgttgcagctaatgtgaaggatcagatttacaaggtggcttctttaacactctgccccaacattgctggccagattctcgtcagccttgcaatggatccaccgaagctaggagatgaatctttcgagtcatttgataaggagaaggaacagatccgttcatccttctgcaagcgagccaagaccctggagaaagctttcagcggcctggagggcgtgacttgcaacaagttagagggtgcgctgtacttgttcccacggctccacctcccctccgctgcgatcagggccgccgatttcgagggagtttcacctgacatattctacgctcaccgcctgcttgatgccaccgggattgccgttgtgccgggctctgggttccaccaggcctctgggacgatccatatccgatgcacgatccttcctgacgaaagaaaaatcgaggcgatggtcgcacgcttgagggcgttccataaggcgttcatgaacgagttccggggctctcagcaggtcatgaacgatctccgtcgctgatggtgtcgatgcatggcacggttaggcctgtgcgtgtgcccatgggcaatcaagacaacttctgagctctggagttgttgtttgttgttctgtgttcttgcttcctcgttgagctgtgcccgtttgtcctcacttatgcagtcagtggtctgtctgtagtctgtactgcttaaagataagctgtgctttcaggaataaaaagtctgcagcttgtgcatat

SEQ ID NO: 3516 - DNA, 1865 bp, Zea mays
  Clone ID: 700267637_FLI
aacaaaattgttggaccatagctttatttcatagtataagaagcagttcaccatataggcatataccaagtataatgatgcacgactcatgagtaagagaccaggttatttcgagcagtacatactcgagtatgtgaacaaagagcgagtgaaagagctagctgttcaccgactacgtgcggcgtagacaaaggacgcagctgctaacacggttgtggtagctgggcacagccatgtccagaccacattcttcccactgcgctctgcatcggcgactgcaagctgcacctgctcaagctcactgttcaagtcattgatttgtttgtccctgccaccaacttctgcctttagcaccccaatctcatgaacattatctctgttacaggattcaagctcctggattttgaacttaagcttctctgcttgggctttctcctgctcaagttctttgagaaccaaaactttctcatcgtggagaaaagaagactttccattaagatcatcacagagagcacggagctcagccatggaactgtggagcttcttcagttcatccctcaactttccaacctcagcatctttagcatctaccaagactaaggcaccatctttctcagcctgaaccctatccacgttcaccttcagcatctccagttcagcctccaccatcttcttctcagcctcatgtgccccagcagcagcttcattcgctatcgccacttggtcaatctcactttggagcctagccacttcagcggccacagcaatctgcttctggtccatctccgcaagcgaggcttggagcttctccacatccgccttggtagcggccatctctacatccaatttgtgcccttccaactccaatccatggttcctagcgacggcctctgagagctctgcctccaaagaacccaccttcgcttctaattctaccttcctgaattgcagagcctccgagtccttcaattgatcctgaagcgtagcctccatctcctgcttgtacgcctcgttttccttcttgagctcgttgaagcttgattccaacacatccttctcggactggacagcatgagctgacgcccgcatggcctccaactggctctcgaattcactcctcttcgcgcgcaggtccgagatctgggactccaatcccgcaaccgcagcctccagtccggccacccgctcggcagccgcgtccgcctcatccgccttcgcacggagctgctctgagagcgagccgttctccacgatcgcctcctgaagccgcgccgcggcgtcggcgctggccatggcctcgctggccgcctccgcctggacgcgctcgagggactcctgcgccaccgcaatgcggtccagcagcgcagcctgctcctcctccacggccctgagctgggcagagaaggccgcgagcagtaccgcgctctccccgtccgcgagcacggcggcgtcggcggagagttcagcgagccgcgcctcaagcgccgccacccgctcccgctcctcggaggccgtgcggatgagaatgccgttgaggagcttcagccgcgcggcatccccgtcgccccgctccggcgacgagtcccgcctcggctcgtccggctccaccaccgccgtcgcctccccgttggccgccttggcctcatcggttccctccgctgaagccagcggtgggtcctgatgctccacacagagcgcctccgccgaagccatggcctcgttagcgtcgtcgacggaagccacggcggcgctgcgcttgcccttcctcctgcccgtgcccatggttgccgggtcacgtgtcccccctatctagcaccctcgtccgccactagggttcgggcccccgtccgcgcggcatggctgcc

SEQ ID NO: 3517 - DNA, 683 bp, Zea mays
  Clone ID: 700267708_FLI
ccaccgagcccatggcggaccagctcaccgacgaccagatcgccgagttcaaggaggccttcagcctcttcgacaaggacggggatggttgcatcacgaccaaggagctgggcactgtcatgcgctcgctggggcaaaatcctacagaggctgagctccaggacatgatcaacgaggtcgatgctgatggcaacggcaccatcgatttcccagagtttctcaaccttatggctcgcaagatgaaggacaccgactctgaggaagagctcaaggaggccttccgtgtgtttgacaaggaccagaacggcttcatctcggccgccgagctccgccatgtcatgacaaatcttggtgagaagctaactgatgaggaggtggacgagatgatccgtgaggctgatgtcgatggtgatggccagatcaactacgaggagtttgtcaaggtcatgatggccaagtgagccacagaaccataatctgaaggcagagaagattatgcattgcatattagtcaagatgcaactttttattccatcgacttctagtgaaacattctgctagttgtagttgctgaaaaaggcaatgtagttcctgctttgttcttccctccagtgtgttttcagaactgttgtttcatgtgaacttgtaatgattgccctctctgctgtgtcttgattgcagtt

SEQ ID NO: 3518 - DNA, 1616 bp, Zea mays
  Clone ID: 700267768_FLI
atcgtggagtggaaaccctactcgtccccttccgcagccgtcgccgcccaattcccccacccaattcccactctccgctcgacagatccatacatgatgggagaggccaaggagaacgacgtttatgaggaggagctcctggactacgaggaggacgacgacaagacggtcgatggctccgctgctaagcccaccggagaggtcgcaaagaagggctacgtcgggatccacagttccggtttcagagacttcctgctcaagccagagctgctccgtgctatccaggattgtggttttgagcatccttccgaagtgcaacacgagtgtatccctcaagccattcttggaatggatgtcatctgtcaagctaaatctgggatggggaaaactgctgtttttgtcctttcatccctccaacaaattgaccctgttgcgggtcaggtagcagcacttgtactgtgccacacaagggaactggcttatcagatatgccacgaatttgagaggttcagcaaatatcttactgaagttaaaggtgctgtcttctatggaggtgttcacatcaggaagcataaagatttgttgaagaatgaatgccctcatattgtggttggcacgcctggtaggatacttgctcttgccagggataaggatctctccttgaagaatgtgaggcacttcattcttgatgaatgtgacaaaatgctggaatcacttgacatgcggagagatgttcaggagatcttcaaaatgactcctcatgataagcaagtcatgatgttttcagcaacgctcagcaaggagatccgtcctgtatgcaagaaatttatgcaagatccgatggaaatatatgttgatgatgaggcaaagttgaccctccatggtcttgtacagcactatataaaacttagcgaggcagagaagaaccggaaactgaatgatctcttggacgctcttgatttcaaccaagttgtgatattcgtgaagagtgttagcagagctgccgaactgaataagttactttgtgaatgcaacttcccatcaatctgcattcattctggaatgactcaggaagaaaggctaacaagatataagaacttcaaggaaggccacaagagaattcttgtggctacagatttagttggcaggggcattgacattgagcgtgtcaacattgtgataaactatgacatgccagactcagctgatacttatttgcacagggttggaagggctggacgttttggcacgaagggacttgcaatcacctttgtttcctctgcttcggattctgatgttcttaaccaggtgcaagaaaggtttgaggtagacataaaggaactgcctgagcaaattgacacctcgacctacatgccatcataaatgggaaggacaactgagaagagaggaggataggggagtgagcagccgtctggagatggttacctttgaactatccgatctggaggatttgatttgcctcctttgtgtactttaaaaagggcagccaggatgatgatctgtattttaagacaatgctgtctgtttgggtttaggattttgctttgtcgaaaactagcacacttattgtactactgagcagcatatttgttttc

SEQ ID NO: 3519 - DNA, 1141 bp, Zea mays; identical to SEQ ID NO: 3337
  Clone ID: 700267941_FLI

SEQ ID NO: 3520 - DNA, 760 bp, Zea mays
  Clone ID: 700267950_FLI
accgccgccaacgtcgcctggcggccgtctgcagctccgcgcctctgctcggaagttggtgaaggtttcttgaagctgagaagatggtgctgaagacagaactctgccgcttcagcggccagaagatttatcctgggaaaggcatccgatttatccgtgctgattctcaggttttcctttttgccaactcaaaatgcaagcgctacttccacaaccgcctgaagcctgcaaagcttacctggacagcaatgtacaggaagcagcacaagaaggatatccatgctgaggctgtcaagaagaggcgccgcgccaccaagaagccatactcgaggtccattgtgggtgcttccctagaggtgatccagaagaagagggctgagaagcccgaggtccgcgatgctgctagagaagctgctcttcgcgagatcaaggagcgcatcaagaagaccaaggatgagaagaaggcgaaaaaggctgaggtgaccaagtcccagaaggcacagacgaagggagcggtccagaagggttccaagggccccaagttgggtggtggcggtggcaagcgctgaaagaacctaagtgtcgttccttgaccttgcaattgctcctccatagcccaccttgttgcaccaacgccacttttgtagtacctcggttaattttgcattttctttcagagttgtttgtgggttttgagttccatctcaagagagttgagtttatttatctttatattgggtgaaatgttcatatgctttcc

SEQ ID NO: 3521 - DNA, 606 bp, Zea mays
  Clone ID: 700267963_FLI
gcacccagtacgatctgacgctcatcccacatcagtagtcgaccaagcacaagcagcagagccggccggaatatgtggacgatcaggaaggtggcgacgccgcaggtggccgtcctcctgctgctcctcatcgtcgttgcgcaggaggcggcgccgttggcggaggcgcgcgtgtgccggcgccggagcgcgggcttcaagggggtctgcatgtccgaccacaactgcgcgcaggtgtgcttgcaggaaggctacggcggcggcaactgcgacggcatcatgcgccagtgcaagtgcatcagggagtgctagctagctagcagctataccggcctttaattaaattaataaggatcgacgtcgcggtcggtcgctaaatatgtactactatacgtctacactacatgcaataatgcaccacatgtacgcgtacgcgcgccgagctgtgtggacgccgcagctagcacggccatcgttcctatacatcgtcgtctgtcgttcgagtactcatgagctgcgtcgtcgtcgtccacccatgcatcccatccgccaaactttgatgatggtcatatgacatcttgacaataaacacgtgcatgcagtatt

SEQ ID NO: 3522 - DNA, 744 bp, Zea mays
  Clone ID: 700268014_FLI
gtagtcgtatctgtatgactgtatcccagcaaatagcttaccagtacgcaaagaaggtagcgagactggcgctagtggcgaggatggtgggaagcctgcatgatgtcgcggcgagagccagggatggcggctcgccagacgttctggttgttgccggggacgttgcgaaaccagaggattgccggaggtttgtgcaggccacagttgaacatttcggccgattggatcatcttgtgaacaacgctggtgtagcaaatgtctgctggtttgaggacgtaccggatgttgctgctttgaagcgagtcctggccgtgaacttctggggcgcagttcatgcgacccactgcgctcttccccatctgaagaagagcggcggtgggaaggtcttcgtcaactcctcggctgcggcggcgctggcaatgccaggaatgagcctctacaatgccagcgaggctgctgttctcaacttcttcgagaccctgcgggtcgagctccgcgacgaggtcggcatcaccatcgcgacttccgggtggatcgtgtcggagatgaccggagggaagcagctgtccaaggaagggacggtggaggtcgccgtgcggtgcgccgaggccaccgtggacgccatctgccgcggccggcgccacctcaccgtcccgctgtggtaccgggcgctgttcctgtggcgggcgctcgcgcccgaggtggtggagttcagccagagactgttgtgccgacggaccgcgg

SEQ ID NO: 3523 - DNA, 1148 bp, Zea mays
  Clone ID: 700268040_FLI
ccctcctgctggttcgatccaaaccctaccaaatcgatggccgacggcggcaactgcgggccgggcggcggcaatgcatcggcgccggtgtgcagtttcgtgaggaaaccacccaagaacatccggaagcgccccgccgcgcccgcggggtctgatgacgacgacgacggcggcggcggcgccctcgccgccgcgcgctccaagaaggggccaccgtcctcaaccgctggcaagctcgttttctccaccgcaggtgcttcctccgaggcgccgcggttccagtacgaatcgtcccggacgatccagtccacggacacccgcgcaactgccacgctcgagacggagacggagtttgaccgcgacgcgcgctccatccgcgagagacagctcaagcaggccgaggagtccctcaagaagaacccctccgctgttgctgcttccgcctccgcctccaccgctggagaggtgtacaaggggatccacggctacacggactacaaggctgggttccgacgggagcacacggtatctagcgagaaggccggcggttcgcatggtccgctccgggcgtccgcgcacattcgcctctcccagcggtttgactaccagcccgacatctgcaaggactacaaggagacggggtactgtggttacggcgattcctgcaaattcatgcacgaccgaggggattacaaatccgggtggcagctcgagaaggaatatgaggaggctgagaaggcccgcaagcgacgaattgccatgggtggtggtggtgagagtgatgatgaggcagcagatgacgaggatgaggaggaggcgctgccctttgcctgcttcatttgtcgggagccattcgttgatccagtggtcaccaaatgcaagcactacttttgtgaacattgcgctttgaagcaccactcgaagaacaagaagtgctacgtctgcaacaaaccgacgctgggcatcttcaacgctgcacaggagatccgcaagaagatggcacaggacaagaagcagcagcagcaggagtaggagagctcaaaacacaccgttgctaatttagctgtgttgtacaacgatgattggtgcgataactagagtccggtatttttcgccatcagataaaagagaccaagttttgaacgatc

SEQ ID NO: 3524 - DNA, 1300 bp, Zea mays
  Clone ID: 700268092_FLI
ggcatgcccttgacaagggtgaggcagttaattttttgaaaggtgcagttgtgacagcagatcgaatcgtgactgtcagtaagggttattcatgggaggtcacaactgctgaaggtggacagggcctcaatgagctcttaagctccagaaagagtgtattaaacggaattgtaaatggaattgacattaatgattggaaccctgccacagacaaatgtatcccctgtcattattctgttgatgacctctctggaaaggccaaatgtaaaggtgcattgcagaaggagctgggtttacctataaggcctgatgttcctctgattggctttattggaagattggattatcagaaaggcattgatctcattcaacttatcataccagatctcatgcgggaagatgttcaatttgtcatgcttggatctggtgacccagagcttgaagattggatgagatctacagagtcgatcttcaaggataaatttcgtggatgggttggatttagtgttccagtttcccaccgaataactgccggctgcgatatattgttaatgccatccagattcgaaccttgtggtctcaatcagctatatgctatgcagtatggcacagttcctgttgtccatgcaactgggggccttagagataccgtggagaacttcaaccctttcggtgagaatggagagcagggtacagggtgggcattcgcacccctaaccacagaaaacatgttgtggacattgcgaactgcaatatctacatacagggaacacaagtcctcctgggaagggctaatgaagcgaggcatgtcaaaagacttcacgtgggaccatgccgctgaacaatacgaacaaatcttccagtgggccttcatcgatcgaccctatgtcatgtaaaaaaggaccaaagtggtggttccttgaagatcatcagttcatcatcctatagtaagctgaatgatgaaagaaaacccctgtacattacatggaaggcagaccggctattggctccattgctccaatgtctgctttggctgccttgcctcgatggaccggatgcagtgaggaatccagccgaacgacagttttgaaggataggaaggggagctggaagcagtcacgcaggcagcctcgccgtgattcatatggaacaagctggagtcagtttctgctgtgccactcactgtttaccttaagattattacctgtgttgttgtcctttgctcgttagggctgataacataatgactcattagaaaatcatgcctcgtttttattaactgaagtggacacttcgcatt

SEQ ID NO: 3525 - DNA, 553 bp, Zea mays
  Clone ID: 700281787_FLI
ctattaccagttgatgttctgtttgctttttgaagaggaaagacatcctgctattacctctctgtctgcccatttgggacttttcagatatcccttaacttgtaatctacacctttcgcaggttgggaagtaattttccaccaaaagcaaatctgcctccatttcgctgtgcaatctgccaagtggaccaagagccattcgaaggtttaatgacggacaatgtaggtggctgctgctcaaccccatcaacaccatggggtggtccttatctttgctcaggctgtaggaaaaagaaggacgcgatggaaggtaaacgatcgaatcgttcaacgacgtgcaggtgaaggttctgataggaatcactgggactgggtcctgtgatcctgtcatgcaagcttgcaaagtagtctccgatttcggttttctgctccttgtaaaaagagaagaataaaccgtctgtcgtttgattgaagtattgttcggtgaaaactaactgcactccagcctgatctgagaaaaaccggggtactaataacaagcctgatttctattg

SEQ ID NO: 3526 - DNA, 1327 bp, Zea mays
  Clone ID: 700281859_FLI
gtgtcactgcaggtacgtctacttgggcctgttcgacaccgaggaggaagccgccaggtaaaataattggaccgcactgtgtgcccgcgaggcgtttctcggagcaccgccacccccctctgggccgcgaaactgactgatggatggatgccccgtgtctgtgggattgtcgggtcgtgtgtgtgtgtgtgtgtgtgcagggcgtacgaccgcgcggccatcaagtgcaacggcaaggacgcggtgacaaacttcgatcccagcatttacgccgaggagctcgagccggcggcgtcgacgggcggcggtggcgatgaccacaatcacaacctggacctgtcgctggggagctcggcggggaacaaaaggggcagccttgacgacggcggcggcggaggaggcggcggcgacgacgagacctcggaccagcgcgtccccatggcgttcgacgtcgactggcagacggccgcgccccggagcacgaaagcaaagctggacgcgagctccaagcaaccccagacccagatgctgcctcctccgcctcctgctgtcttgcgagtcgcccaccagctgccgttgccgttcggtcccaggcatccgcaatcgcagttcctgagcaacggcggcgatccggggacctcgggaggcctgtccctcgcgatcggcggcgcgggcggcgggcactggcctccccagctgcagcacctgcagcagcagaggctgcacggcgcctgggccaacggcggcggcacgagctggccgcctccgccgcacccgcacccgcacccgcacccgccgccaccgagcaccgccgcgaccgcagctgcagcatcatcacgattccctccctacgttgttactacgacgcaaggcccggcaggctgggctcagaagaatgggttccattcgctggccaggccaacctagtatgccaagaaccacgactggccggagcgttcattcgtcgtcgatcgtcgacccagggcaaacgacacctccaaccactgcacgacgacgttttaatttaccggatgccattctctctctcccctccccccttcccttctcccttctcccttctcccttctctgtgttcttgattgggtgagacatggatccgaggatggatggacggcctgtacctgaggagttcccgggaagaagacgagtgagtgagtgagtgattggtagggtaggcgactaggcgtcgcgtcaggcagtacgtccttttggcgccttttttcttctttcactcaccattggcgaccaccaatgaatgatgacactgactggggtgtcaacatcgcagctggttttgtttggtcta

SEQ ID NO: 3527 - DNA, 1404 bp, Zea mays
  Clone ID: 700281866_FLI
agccactcaaaataaggaacaatccaaaactttgctgcaaggaattccacagctgccgaaggccctatttcaggcacaaataatgcttggaatggtgacaccacagatgatgcacatggcaaagagccaacagccctcgggctccttatcacaatcttcatctcacctcaatgagccatatccacagacagatgctatgattccgctagtctcaagaccttcaagtttgccaactaacataccaccgaacccaactgtcctacaggaacaaactgcaacactacatagtattcctcagcatcaacatgcatcccagcccctagtcaaaatgtttccacatggacatcagtctgggatcgccgcacaatctccaatgctacatcagcccctcgatggttcttctagtgttcctactcaatctcttgtgacctcagtaggcttaacctcacaagttcagctaccattggtgccacagcaccctggaccatctgtcatgcctacaagtgtaccacagctacctttgacccaccctcatcttgctcaggtagctgttgcacctgagaccctaccaaatgaaataagtactttggcagagtttacccatccttcaaagttgagaaaattggaggatggaacctcggtgcctggaatagtgaacagcagccatgctgtttatacagttccactgcaagcagtgggccctagcggaccatcagggagctatagtgctggttctgttagcttacagcaaccagggaatgaagagcagcttacgcctgatgtggagtcagctcttctgcagcaagtcttgcagctgacacccgagcagctgagttcgttgccaccagagcaacagcagcaggtgattgagctccagaagatgctttcagttagtaaatagaagcaactgagagctaacgcagcaaaaatgctggttgagaatctggcacatcacataatggcgagttggtaactagtggaaactggaaatgatcctcagatttgtttatgaagtcaccacgccgcctgtaacctgtaagcattgtcggcatcctgatgccatcaggatccatatggttttctttcttcagctcggagataaaagaaatgtgataggagaagagtagtgtggaaaaagggatacgcattatccatcactgttgtatcattatagggagaaaaaaataatatgtattcaaaggaactttttttcagcgcttctcgaatgggctgtagcatcacacatttttgtccttagagttttcttgcaaaaaatgtaggtaggaaatgaattttgtgtaagcttatgacgaagagattttttttatatttgttgccataggtctgtttaattgtttgaggcaagtttggaattcgtggaattgcttcatctattatccttcc

SEQ ID NO: 3528 - DNA, 2145 bp, Zea mays
  Clone ID: 700281922_FLI
ccctgtcgcgcacgccacggcgcacccgtactgggaggagggaggattcttgtttgagagccgtcgctcacgccgatcgcggcttttcaggaccaccggcaattcaagcagcgctacttcgagttcctcgactaccatcgggcccccggcggcccggtcttcctgcgcatctgcggcgagtccgcctgcgacggcatccccaacgattacctggccgtgctcgccaagaagttcggcgccgcggtggtgacgccggagcaccggtactacgggaagagttctccattcaagcagctgaccaccgagaacctgaggttcctgtcgtcgaagcaggccctgttcgacctggccgtcttccggcagtactatcaggaatcgctgaatgcccggtacaaccgatcaggtttcgacaacccctggttcgtcatcggggtctcctactccggcgctctcagcgcctggttcaggctcaagttcccccatttgacatgtgggagcctcgcgagctcaggggtggttcttgcagtgtacaactacaccgactttgacaagcaggttggagagtcagctggccctgagtgcaaagctgtccttcaggaaataactgaactcgttgacgaacagctccggctggagagtcactcggtgaaggctctatttggagcacagacggtttcgacaacccctggttcgtcatcggggtctcctactccggcgctctcagcgcctggttcaggctcaagttcccccatttgacatgtgggagcctcgcgagctcaggggtggttcttgcagtgtacaactacaccgactttgacaagcaggttggagagtcagctggccctgagtgcaaagctgtccttcaggaaataactgaactcgttgacgaacagctccggctggagagtcactcggtgaaggctctatttggagcacagacgctgaaaaatgatggcgacttcctcttcttcctggcggatgcggcagcgacaaccttccaatacgggaacccagatgccttgtgccctccactaataaaggcgaagaagaacaggaaaaacttggtggaagcatatgctcaatttgtgaaagattattacattaaaaaaatggagacaccaccatcctcgtatgatcgagaatatctgaaggaaacaactccacatgattctagttctaggctctggtggttccaagtttgcagtgaggttgcctactttcaagtggcacccaaaaatgacagcgttcgttctgcaaggatcaatacgaggtaccatttggacctatgcagacatgtctttggggaaggcgtttatcccgatgtgttcatgacgaacttgtattatggaggcacaagaatcgctgcttctaaaatcgtgtttacaaatggctcccaagacccatggcgccatgcctccaagcagaaatcatcgaaagacatgccgtcgtacataatgaaatgcagaaactgcggacatgggactgatctgaggggctgtccgcagtggcctttcaggatcgaaggggacgcttcgaactgctcgtctctcgctgtagtcaataccgcaagggagaggatcgccaagcacatcgacctgtggctgtcgcaatgcagcaaaccatcagtaggagcctggtaaccgcggactagtggttcatccactcgggctcgggaagagtggaaagaggtttggattggatgtcctggagcaaacttgtgtcgggacttggattacgtgtttgtgcactttgaaaagcagataaagctgatggtgtaaagcagcagtgcccggtaccccaccagggtacgtgatgcaggcaggggtggtgctgtctgtgtcgatgccgtcgtccttttctggcgtggcgctgcagatgaccgacgtgtcacggcgcgtttgggtgcgcggcgcgcgcgcgtcaaaacgtaacaagtactactactacgtgccgtgccaggtgttgcgtcaaaacgtaacaagtttctcccttccgttctttgtccgagcgagtttacaagtactatatactaccaaaggcgaaagcgaacccgcaattttcctatgtatatactagtggactgcaccaacatccggtccacgtaaaccatgtgccttttccgacgtgtatgttttatttcatggc

SEQ ID NO: 3529 - DNA, 1966 bp, Zea mays
  Clone ID: 700281975_FLI
tcttcgtctatctctctcccgactcggaaggaaaccctaggcgccacgcgagggttctcgaaccttcgctccccacccccccgattcggaagccctagcctggaaggttccgggatcttctggcgcgggaggatggcgggaggggtcgtggaccagtcgctgctgccccagatccatgccctcttctccgacccgcttcgcgtggtttcgtacaaatggctcagtcggaacttctctgtgtcatcaaatgatgccaagaggttgcttcaggactttgtcaacaaacatggaactgacctgcaagtgatttacagtgtgtcggggtggttgaagaacaatcctcaaaactattgtgtaaagctcatttcaggcccaaaacttgaagcaaggcaaattttcaaagattcttgttcagttcagatctacagtatccaggcctgtattccaaaagatacagctgtactttggaatcctgaatttgtgcaggcagaggagcttttcaaccagccttttgattatgagaactgtttgagagataataggttttgtggtgttttgaattcttttgtcaagcgaacatccaatggaaagcatgtgagttcattgccaccaaagcccttgaatagtgctgcagccgccgtgcagtctaagcctagtgttactccaaaggaacagtttgttactgctcggcggcaagatttgcctgtaagttcaaagcagggagcagacactaagtccgagaaggataatttcacagtattagataaggctggcaatggtcctgttgtcaaagaacaatcagttgatgcccatgcaagcaaaagtaaagctcaaaatggaaaggccttgcctagtaatggtggatcgctggctaacatgtggggccgtgcatcagcaaaacctaagcctccaagtaccactaattctacagctgtagcaagtgttgcagctactgctgatgcacaaatttgtgcaaaggaagaagcagatggaaatagcagcgatgatgaacatgggataaagtacaagaggggatccactaatgcaaataacagaaagagaagagcggtatttgattattcggatgatgaggaagatgacaatattgtaagcattgcatctcctgagctaccaaaacagcataccccagaccctgttgttggaattgctgaagacgctgaagtaaatcaaaagagcttggaaaatgaacacgatgtaccaaacaatgggaaaggttcctcaacggtggtggattctgacttcacatctgaatgtaaaatcaaaacaatcgatcctatgaacgattctgggattactttaaaagaaaagagcagtgatcctccaatcaatgacaagaagcaggattctgctgctgagcctgcctccaaatcaccaaagaggagaaaggttttgaagacacgcatagatgagaggggaagggaagttaccgaggttgtctgggagaatgaagcttctgcagatgacaaggcagagcagaatgtcaacactattgatgcgactgcaagcggggcgactgtcccaagcaaaccgaagcccgcaacaaacgctgacaaaagcaaagctccaagcaaaacagcagcaggcaacaagaaagctgcgaaggctggagccaagcaagggagcattatgtcattcttcaagaaagcatgagccagcggggtgcgcatgcaccaaaatgagacaggacttggttaagcaaactggcagtggcagctctacctgaatattgtcaggccggcgagaaagaagggctccaagcaggcgaccgttagctgtatcgtttgttttagctagcgtagcgatggttgagtcaagcagcacagagcacgcattctagctgaggtagtactatcttgctgaagatgtacacgtacaataactgttgtctgtgatgtctagaagagtaaaggtccaaggtgcaagggccgcggaacactttgagtac

SEQ ID NO: 3530 - DNA, 1737 bp, Zea mays
  Clone ID: 700282006_FLI
tagagacattggaaattaagcttgcagctgccaatgaaaagttaaagaggtctaatatgacggcctcggaaaccatgaccgagtatgagaacatgaagaaaatgctggaaagtgttcagtctcgccttgaagaggccgagcaaacaattctggaaggagagaatttacgaaaaaagttacataatacaattcttgagttgaagggaaatatcagagtattttgtagagttaggcctttgctgccaaatgattcaggagcagtatcatatccaaagaatggagaaaacttaggccgagccattgagttgttacataatggtagagtcatcattacagtcatttttctagttttaaactttgatatattatatttgagaatacaaattatgatacaattgcgttgtatttcttattgttttcagcacagggatattcatttacttttgataaagtatttgatcattcggcgtcacaagaacatgtgttcatagaaatatctcaacttgtccaaagtgccctagatggctataaggtctgcatatttgcctatgggcaaactggttctggtaaaacatatacaatgatgggcaaccctgagttagaagatcaaaaaggaatgataccacgatctctggagcaaatttttcaagctagccagacacttaactcacagggttggagatataagatgcaggcctcaatgttggagatttacaatgagactatacgcgacttgctagcaacgaatcgcatggctgctcaggatgttggtgcttcaaagtacagtatcaagcatgatactaatggtaacacgaatgtgtcggaccttacgatcattgacgtaactagtatcaacgaagtttcttctctccttaggcgggctgctcagagcagatcagttggtagaacacaaatgaatgaggaatcatcaagaagtcactgtgttttcactcttcggattttcggtgtaaatgagggaacggatcaacaagtgcaaggagtgctgaatcttatagatctagcaggcagtgagcgcctgaacaaaagtggtgccacgggtgatcggttgaaagagacagtggctatcaacaaaagcttgtcatgtttaagtgatgtcatcttctcgattgcaaagaaagaggaacacgttccatttcggaactcaaagctgacatatctgctccagccgtgtctcggaggggactcgaagacactgatgtttgtgaatctgtctcctgaagcgtcctcgacaggggagtctctttgctcattgcggtttgctgcaagggtgaactcctgtgagatcgggatccccaggcgccaaacccagatgcggagctcacaatgatgaaaaacggcggaagcgagctgccagtgtaatgtttgtgtgttgatttggtgatgcaaccgatcatttgcatccccttgtctggaggtggtgtgagttgccaattttatttggtttgtggccttgttgattgcgctaacggctggcagcggtgggtgtgctggcctattatattaatcttaggacctgatctgatttgtatgttgggatgtgttgccattttcaattttttgctttcattcgtagtcttgatttgtcgtttgcccaatgcccaatgcctctgagctgagctgggcgtgtatgtaaacaactgtgtacccgtcgtcggacaagcacacaggctgacagcctgacatgataattgtatttccctgctctgggaattctgc

SEQ ID NO: 3531 - DNA, 270 bp, Zea mays
  Clone ID: 700282050_FLI
acgtggtacgcggaacgctacaaaaactaggatttaatactactggaacgagatcgttcccacgttcccggaacggaacgaacgttcccggaacgaggaacgtggccaagttcccggttcccggttactaaggtctagatcttcgcagcaaccacaacaactcttccgaatcttcgaccaatgctgcaaatcagagtggtcgtggaggtcctagccggtttggacgaggtactcatggaggaaggaactcaaacgctccaacctagcggg

SEQ ID NO: 3532 - DNA, 1254 bp, Zea mays
  Clone ID: 700282066_FLI
ctccaagccttttcgccttttcctccgccttctcgcgatggcgccgccgcgccgcgctctactcgtcctcgccgctctcctcctctccctctcccttggggccgcctccttccattccgacgagctcctcctcaacgatgacgaagagttcgagggcgtcgtcgcccgcccctccgccccctccccgccggcggccccggtggtctcctcctcccgccgcagatcagcggacgcgccgttgcccgggtcaggcgagtccaacgcagtgcagttcacgctcgagcacgaccttggcgacggcaagggcttcgtctcagctggaaccttctcggcccgcctcaagaccttcgcccacggcacgcagaccctcactaaacttcgctttacaaggaatgattttactgaggatgataaagcggcgttcaaaaaagtgcttcaggaagatggcttttatacaattaggctgccatctaatgtgttggacactacaaagaaacatcatgttgtttcttcaatcagagctagatgcattccacgtgacagtttggatgaacacattgttatccacatggatggtgtaaatatcttggcagtcaattatggctctgttgatgggtgccaataccctaggcctatgaaattgccatcaaaatggacattcagctcttacactatcctaaagactgctgaacaggcaccaagaaccccatcgtttgcagatcagttaatagaagctgacaatggtcttggcgaagtaatgaaaccacctgagaaatctttctgggctaaatattggatgtacatcattccgcttggtcttattgtcatgaatgctgttacggcagctgccaacataccagaggaagctgcagggcagggccaacctggagcacaacgggcacctgctgctgttgctgggaggaggagatgatggctgccttccataccgtagttaactatcttcacattgttttctgttttttttggggtattgtatcaatcttaccttgactgcatcatctatggcactgcatgatgatgccatcttttgcttgtgttgaaacacgtagcctatccaagacaatgtggttcctatacatctgtagccaattttggccactagcatgccattggacactgaaactttgcttgaagcctgtgcacacatcatttgcagtgaccacttcatacttgatgcagcaaaaacacctattaatttcagctgttgaattttctgctaataaaaaaagaaac

SEQ ID NO: 3533 - DNA, 2058 bp, Zea mays
  Clone ID: 700282210_FLI
cggctcccaccagcgtgagtgcgtgaccagccccaatgccctccaaaccctagtccacagctcctgtaccctggcggccatgccggatctgagcaccagctacctccctcccttccctgaactgtccctcgatgcgggggccctcgccgtcgaccacgcggggaatgctgcagccgccgcctcggccgatgcggcgtccgcgtacgcgtcttcgtctgcctctgtgggcagcggcgtagacgacctcgttattccagcggaatgccggtggaagggccatgtccgcaccttcgacatggcgggcgcgggcgctgtcaccacttgccccgccgcgcggcgtggcggcgggaagaagctgtcactgattccgtcactcgagccggcacggacgcaggcttcagcatcggctccgacgctcgaggaacgcgtgagcgagtgggcggctaagaaggcagcggccggcgttccgactcatcactgcgtgctgcctttcctcaccggggcgccaatggcggtcgaatgtcgtttgtgctccaagattatttatgttggagaagaaataaaatgttcagttaaaaagtgtccacaaatgttccatctcaaatgtgttgcggaagatacttcaaactttaccgttgaaagcttcaggtgccctcaacatgggtgtatggtttgtaagcaaaagatgttcttttggcgctgcggacgttgtacagttgcagcacatacgaaatgtgcaccatggccagtggttcacctaaaaaatgatcaaggaagtgcaatttgctggaggcatccttctgactggctgctgcaaaataagaatgctgactttaccaacagtgtagaggaagtattttgccggctacctcttccatatgttaatgaagacttaaatattgattcaatcatcagggattatgctgaggctgtttataagccacccccctatacatctatcaggcgcaatgtatatctgataaaaaagaagcgcactggtgttcgcgtggatattgggtgcacaaactgcagggctgattctacttgcaaagaagactgtgaatgcaggggtctttctatgagttgttccaagaattgtcgctgctcagatctatgtacaaacaggccattccgcaaggataagaaaattaaaattgtgaagacaaagcgatgtggatggggtgctgttgcgttggagccattggagagaggtgattttgtaatcgagtatgttggtgaagtcattgatgatgcgacatgtgaacaaaggctttgggatataagacggcgtggtgacaaaaacttctacatgtgtgaaatcagcaaagattttacaatagatgcgacatttaaaggcaatgtgtcacgttttctaaatcacagttgtgagcccaactgtaaactcgaaaaatggcaggttgatggtgagacaagagttggtgtctttgcctctcgttccatcgaagttggagagcccttaacttatgattacaggtttgtgcattttggagagaaagtgaagtgccattgcgaagcagtgaactgccagggatacctgggcagccaaataaagaacccaattcaaagcattcttgccactgtagcaccgcaagtgcagttgcgagagtattcgcccatgcaccacgaagctccaagattgaagccaataaatcacttgttaccctggaccaactgtatagaggtctcttttaacctgagaagcaaaaggaaaattgaccggctatgctgggcccgcaagaagaagagaacatccctcgtgccatcttcaacaagcatgccagcatcgccgagtgaagttcctgccgcggatttctaactgcccttcgttgaagagcaagcctgccctgtataataatttcatggtacattctttacatgcattggttggaaacgattctttcacattgctcatcaatggtgttgtaacctgcaacattctttatttggtttcatagggcattcagtcagtttacgggtggtagtttgtcggaacatgtacccaatttttctgatgaaacaaatgtttgagcttcatgt

SEQ ID NO: 3534 - DNA, 3141 bp, Zea mays
  Clone ID: 700282231_FLI
agcgactcgtttctcgtctctgcgctgcgagcgaggctcctgctcctcgcggtctcgcttccctccaagttccaatccagcaccgggcgccaccgctaatcagtgctgatatatgaaccccgcatttggacatttggtggtggcaaggcaacgccaaccttccctgttgctgctttgaatgttctggtggttgtcggatggatcgccgcagttggctctggaagcgcaagtcattggataagagccctggggagagcgatagctctggctctgcttcatcacactctgagccttccttcgatgatcaggaacctaaacctgtgtctagtaattcttctccaaatcatagtcattcgcctgatgtttcttctagaataatttataatgagaatcaagaagctgaaagagcagaatcattgaatgagaagctggtgttagcaactagctcgaatgattcttctccacaacatgatcaatcgatgaagccagatatataccaatcacctctgctattcccaaatatcaggaatgatgatgttccagattctgtaaagaatttgaatgagaaggtgtccccaaagtttaaggtcgatgatgtccaggattctgtaaagagtttgaatgagaaactttctgctgcccttttgactatcaatgataaagatgacttggtaaagcagcacactagagttgcagaagaggctgttgcaggttgggaacaagctgaagctgaagttgcttctctgaagcaactacttgaaactgcatcaaagaagaatacctctctggaggatcaggtcagccacctagatgacgcccttaaagaatgtgtaaggcagcttcgccaagcacgtgaagaacaagagaataaaatccatgagacagttgctaagaagtctaaagaattggagtctgagaagtttgagctccagcaccatattgctgaactcagtaagcagttgcaagccacgaaactagaagctactacggtgcgtgtccagcgtgatctgcaggaaaagcttcagatagtggagaaagaaaacaaagacctcaaggtagaattactcgcactgtccaaggacctgaagatacttgcacgggaaagagacctgagcaaccaagcagcagaaacagcaagcaaacttcacctggaaagtgtgaaaaagataacaagagttgaggcagaatgccttaagttgcgtcatttaacgcggcgtacgtccttgaccaatgattcaaggctgataactaacagtgcttgcatggaatctcagactgacagtcagtctgacagtggggagcacatgctagttgatgagatgaaaaattctgattcatgggcaacagctctgatagctgaacttgatcagttcaagaatgccaacaacgacacaagaaatcttgtgaataattcggttgaaattgacctgatggatgatttcctcgagatggaaaagctggctgcactgcctgaagtagactgtgtaagctctagctttggagctgaaactgattctgaccaaggtgtgagtagagataaatcatcaaaagttaaaactgaaccattgcagtgtcaggtgacagatttgcacgcaaagatcgagaagattgaaggtgagaaaagggagcttgaaatggcccttgcagatgccagagttcagcttggcacatcatgtgatgctctaatggtggccaacaacaggttgattgatttgcagatgcagttggacttggcaaatgagtccaaacatgctgctttcggagaagctgagcgactgaatggtgagaggaaagatttggcattgcaactggagtccaggtcttcacaagttgatgagcttcagctgatggtggcatcgctggaaaagaatgtagacaggaaggtgttggaattgcagttagagttagtttctgtggaggctgcagatctgcgcaagacagtggcttccctggaagagaagattgatgcagagataactctctctatgcagcacaaaacaaatgcagacctggcagaggcgtccaaagaatcattagaggcgcagctgcagtctgcaaacacagagatagggaaactgaacgggattgtgcaaactttagagaatgaggtgaggaaagagacagattctcgtgaagaactactgaaacagatagaggctatgaaaattgagtcagagagatcactatctgtggtgtctaccaaagagtcattagaggtgcagctccaggtggcgaattcagaagttgcaaagttgcgtgggatggtgaatgctctggagtgtgatgcggcgaacgagaaggcatattcttcagatctccagatgcaacttgaggcagtggaaggtatcaggaaggtgttggaatctgagcttgagtcttcacaccaggaggtgatgaggctgaaggagaaagtttcgtccttggaagcaaggatcaaggaccagacctcgttgcttgtagaatatacagctaaatcagaggatgcagtgtcccggaaaaaggcaatggagggtcaactagaagcagcaaatctggaagttacaaaactgagaaacaaggtgagcctgatacaaggcaaggtggagcaggagaagcttctgtcagaagagtacgaagcaaaatgccgcaagctggaggcgcaggtgttgagggacagccgagaggcgaaactttggcgcctcacgaactcaaacggagacctgaaggtgaagcaggagaaagaactagtcagtgctgccgggaagcttgcggagtgccagaagactattgctaaccttggccgccagctgaaatcgctaacagatcttgatggcgtggtggccgatcctgaaaagctggaatcgagggacacgcacctggacttcagagatggcggagacgtggctgatggactgtatgaactgggtcttcctaagaggaacggtagctgcctctcaccccttcggtcggatccgtcgccgaggggtttgccgtcccttagtagctacctgagcaaaacaaaaaggtgaaaagtctgatgggatcattcaccattgtgcttgtgcataaattatttgacagtctatggatgatgccagttgtgacctggtggtagatcggtgtacatttacagaacttgatggttgctcacatgtgtacttt

SEQ ID NO: 3535 - DNA, 1709 bp, Zea mays
  Clone ID: 700282258_FLI
cttgaagcaatacggcacaactgatatggagttttgaggaaaagggtttcctatgtatggattttagcaacggtggtcttctattattttgttctatagtatcttttggtaggcaagtttaatcatcatttccacaaatttttttctgttgatgattgcaggtcagctgcctggtgtcaccgctcctattcctggggttggggtgcttccaaacttgtataatttggctgcaggacagccacaagccatgacacaacaggctaccaggcatgctcggcgtgtctatgtgggcggacttcctccaactgctaatgagcagaccgttgccatattcttcaatggagttatggctgctattggaggaaacacagctggtccaggtgatgctgttcttaatgtctacataaaccacgacaagaaatttgcttttgtggagatgagatctgtggaggaagcaagcaatgcaatggtcttagatggcataatgtttgagggagcaccggtcaagattagaagaccaacggactataatccttccctagcagctgctctgggcccgagccagccaaatccaaatctcaatctttctgctgttggcttaacacctggctctgctggaggattagaaggtccagaccggatctttgtaggtggtctacaatattacttcactgaggcccaagtgcgggagttgcttgagtcctttggacctctgcgtggatttgatcttgtaaaggatagagaaactggtaactcgaagggatatgccttctgtgtgtaccaggatcttaatgttaccgacattgcctgtgctgctcttaatggcatcaagatgggagacaagactcttactgttaggcgggcaaaccaaggagcttctcagcctaggccagagcaagaaagcatcctgttgcaagcacagcagcaggtgcaaatgcagaaattcgtataccaagttggaggtgccctgccaacaaaagttgtatgcctgacacaggtagtgacagaagatgaactgagagatgatgaggaatatgatgacattgtggaggacatgagggaggaaggacacaaatatggtaaaccgcacgagactcatcgacttctattaccctctttgttttaaaagctcctctacgttctgctgtcactaccctcagttactgaattggtttcctttttgtgtttttgtcttgtgtgtcttttttgtagtcccgcataatgccattgcagattgttttgtagtccgaccttatgcaatagtggcaatcgggccttaacccacagaagacactattcttttgactttgattaatcattttattattagcgcgtcttgtctatatatatctactctgctcactaagatttggacaggtaacttggtgaaagttgcaattccacggcctgaccccagcggtgctcctgttgctggtgttggaaaggtgtttttggaatatgcagatgtggagggctcaaccaaagcaaagacagggatgcatgggcggaaattcggcgggaaccaggtggtggcggtgttctaccctgaggacaagtttgcagctgagcagtacgactgaaaagttttagaacccctattctagagttgcagttgtggcacacaatgtggttgttttgaccttttgtagttaagtttggtgattgatccgctgataagtgatataagtttcgtgctcaagtattatatc

SEQ ID NO: 3536 - DNA, 1594 bp, Zea mays
  Clone ID: 700282259_FLI
cacaactacaagacccacacacccgtcggtaaatgcaaagatcgcaagtccacggcccaccccccaaatcggccaatctccacttcttaagctccctgtcgcctccgcctcctcgtcgtccggcctcccgcgccaccaccggggcctcgccgccacgaatggagtacgagcgcatccacgagccactcccgcgccgtcagtccggcggattctccccagctaagctgcgagcgatgcttcgcgggctagagaaacaccagcgcaacagcggcgaggacacgtcgccggaggccaacgactccggcgagctcgacgaccggaggagcttggaatgctccacctccaccgagatgtcgagcaacagcggccacaggtcaaggaaccgggccccggacgacgacagcttcgactcggagagcagctcgtcggggccgcccacggtgaagaggtcggccgcggtggccgctttgctgccgcccttctctcggccaacgccgtccaagtgggacgacgccgagaagtggatttccagccccacgtccaaccgtactggccgtgccgggcctaccgctggaactatgccaaagaagtccgcattggcatttcctgaacatggagcccgccagccagccgttgctaaggtggtcacggatgtgcctactatcgctggaccattggttaagaattcagatggtctcgcccatcctgatttgcttaaacctgcacacgatgcttcaatagttgatggaccagctcctgcagttaggtctgtctctatgagagacatggggaccgagatgactccaattgccagccaggagccttctcggaccgcgactcctatgattgcatccagtccaacctcctctcggacaccaactcctcaacgcaccacagaattcagtgtgagcaatatagattctaacaagatggcgatgtctgaagaggaggtccatataagtacaagacaggaaattatggatcttggcgaaaggttaggcaagactactatagctgcatgggcaagcaaggaggagaaagctgctgcacgttccacggatactgcagccgataatgctgttgatgtcaacagggagaatcgagcggcagattggcaggaggcagagaaggcaaagtatcttgcaaggtttcatagggaggaggcaaagatccaagcttgggaaaatctccagaaagcgaaaattgaagctgaaatgaaaaggatagaggccaagatcgagcggaaacgggcgcgcgagcaagacaggctcgccagcaaactggcagcggtgagccaccgagcggaggcgaagagggaggccgcggaggcgaggcgggaccaggaagccgcgagaacggaggagcaggcggctcagatccgagaaaccgggcacacgccttcctccttctcatgctggtgctggtgcctgtgactctggttccttcactgcatgaccagcacagcacgtcatccaactgtaacatagcatgacccgtgagactgatctccggccatggtagaaaaatttgctcactgtacgacttgtgtagttccttggtctaatggtgtccagttttttggtgcctcgcggtt

SEQ ID NO: 3537 - DNA, 878 bp, Zea mays
  Clone ID: 700282280_FLI
ggagcagcgagatcgtgcgcacctccgagatctccacgaagttgtggtaacatggggctcaccttcacgaagctcttcagccggctcttctccaagaaagagatgaggatccttatggttggtctcgatgcagctggtaagaccaccatcctctacaagctcaagctcggagaaatcgtgaccaccatccctacaatcgggtttaatgtggagactgttgaatacaagaacattagcttcactgtctgggatgttggaggtcaggacaagatcaggccattgtggaggcactatttccagaacacccaaggccttatctttgttgttgatagcaatgacagagatcgtgttgttgaagcaaaggatgagctccacaggatgctgaacgaggatgaattgagggatgctgtcttgctcgttttcgcaaacaagcaagatctaccaaatgcaatgaacgctgctgagatcaccgataagcttggtctccattccctgcgccaacgccactggtatatccagagcacttgtgctaccacaggagaaggtttgtacgagggtcttgattggctctccaacaacattgcaaacaaggcctgaatggacaattctgctgtttcacgaagcacatctgcacatggcgaggcatggtcattttgaccctcagacgattattgtttcattggaaagtatcgtatttctttgctaggcttttcagagagatctctctaagaaactgatccgaaattaagacactataattggcagtggcactagtagatcgtttactgagtaatgcagtttattttaatgtatcccaattgtgttgtaagatacaaatatctgtcggaattatccattcaatttgaatctagatacgt

SEQ ID NO: 3538 - DNA, 539 bp, Zea mays
  Clone ID: 700282282_FLI
tattgtacgagcgctcgtatgatgctcgcaaggctcttcagaaaaatggtatgcaactaagcaacagtctgatagttggagtaaagcctattgatgcagtgcaccggcagcagctggacaagggtttcactcaaagcaatcaaggtggatttatggtttccttgccttcaaagtcactgggcttgaagagcgcaggtgcatcaaaccagttaggagccttgccccgcccatatgacccgaaagctaacacgaatgtcagccgagatgctggccgtcgtgcaactggcagcgttgctgcaccaacaaaatcaattgtaaccaatgtgatggatttgatatttggcatttgatatggcaatgagaaccaatcatccggaatcttctctgtttcttctgtttacttgttcgagaatgccagcatgccaaagattcagcagcaaattttgatgaagtttgagagcttactgactgaacttccttttggcgatgtaacattaaaattattcaattttcacgtttaatcgaagttatgttgtctc

SEQ ID NO: 3539 - DNA, 1240 bp, Zea mays
  Clone ID: 700282284_FLI
gagcattaccggcaccaatcaatcaggctggcagtggagtgacagcggcggcaacaccacgcccacgcggcgccggagccgatcccccgatggatctcccgccgctctcccaccaggccctcttcgccgccgtccgatccgccgacgcgcccgccgtccgcgcggtcctggccgacgccgaggcgtcggccacctccttggccgcgctcgccgccgctcagacggacgccggggaaaccgcgctgtacgttgccgcggaggccggcagcgaggaggtcgtgcgcctcctcctccctctctacgacttcgaggcagccaccgtccgctcacgccttgacctcgacgccttccatgtcgccgccaagcagggccacaccggggttgtgaaagagttcttggggcggtggccagggctttgctcagtctgtgactcttccaacactagtcccctctactcggctgctgtcaaggatcacttggatgtggtaaatgctatactggacactgatgatagctgcataaagattgtgcggaagaatgggaaaacatccctacatactgctgcaagaattggataccatcgtattgtcaaagcactcatagagagagatccaggaatcgttccgatcaatgataggaagggacaaactgcacttcacatggctgtgaagggcaaaaatacagatgtagtggaagagttattgatggctgatgtttccattctcaatgtgagggacaagaaaggaaatactgctttgcacatagctacacggaaatggaggccccagaatatctcaatgtgaaaaacatgtcgtatgtaagccatggtggtttcttagtggagcagagcatctattggaagagcaaccatatatctaagaacacacgaccatcttataaagcactataaagacattagttgctgctgctattaactgtctgccactagtcttactaagtcattgcaacggcgcaggaatgtatctggatgctaatatctcggtatcactattgtggaagtgtggctgacttctcaacacactattctagcagtccagcccaccccacataggccttaaagtattatataaatgatgcttgtgtgttaaaggaagatcaaaaatagccatccagaaactcacagaacgatggggtgcttttctattttatggagtatttacgattagtgttctaacttctaagttaccttactctcaaactccgaacatatgtttatatt

SEQ ID NO: 3540 - DNA, 1515 bp, Zea mays
  Clone ID: 700282303_FLI
cagaagcaccagcagcacgttgcatctgtggtccaaaggttagctcgtgaaaaggataagtggttgagctccagtccggatgcaatgaaaatcaacatggaattcttgcagcgctgcatattcccacgatgtgtttttagtatgcaagatgcagtgtattgtgctacatttgtccaaacactacactcccttgggactcccttctttaacacagtcaatcatatcgatgttcttgtctgtaaaaccctacagccaatgatatgctgttgcacagaatttgaagctggcaggcttggaagattttttcatgatacgttgaagatggcctactattggaagagtgatgaatctgtctatgagcgtgaatgtgcgaacaaacctggttttgcagtgtacttcagatacccaaacagccagcgtgtgtcctacagtcagtttgttcgggttcattggaagtggagttcaagaatcaccaaagcacttaatcaatgtatggaatcaaaagaatacatggaaattcgaaatgcccttattgtccttacgaagatttctagtgtcttcccggtgatccgtaaaagtggtgtcaatcttgagaaacgggtggctaaactaaaaggggatgaaagagaagaccttaaagttctagccactggtgtagctgctgctttagctgctcgcaagagttcttggctatctgaagaagagtttggcgggggtcacattgatctgaagccagcaacagcaagatctgtgcttggaaaccagtcagcagatctctcgatggcaaaagatcaaaatgcccgtgcaaagtctgtagagaataggcatgaaaggtcagagggtgctatgaagcctgacgttcagcaaaagaagagcactgtggcttcaaatggatctgatattctaataccatcttcctccgtacaagggaaatcttcagtggttgcacgtgcagtggatgagcctccaaaacctgtgtctgatgagggggttaaagtttctacaaaatctacttcagaatttgagacaagggcaacacaaaagcgtgctggcaatgctgggaaggtaatgaagcatgatgttgcaaaggaagatgcaaaagctgggaaacctacaagctggaatgtaaatcaacaagtctccactgttgatagagaagtgtctcatgcagctgatgctgcccaagaaaccagtaccactattagcaatggtaacttgcatccagcgccgcataaggtttcatcatcttctcaaagaaatgcagttacacataatggagcagccaatccctctgttgagtctactgatatgattgactctcctgtgagacagcagaaaagaccgccggttgaggagcaagatagatcaggtaaacggaggaagggagaaaatgaacccgatttgagtgaacaccatgtagacaaggaaaagagtttggactcacgtggtggagataagtttcgttcagtggatcatgagaagagtgctaatgaggaacaaaatttaagagcgggc

SEQ ID NO: 3541 - DNA, 727 bp, Zea mays
  Clone ID: 700282306_FLI
ctgccttcctgcctgcttccctccctccgtgagatccccgctcgggttgccatggcggaccagctcaccgacgaacagatcgccgagttcaaggaggccttcagcctcttcgacaaggacggcgacggctgcatcaccaccaaggaacttggcactgtgatgcgctcattggggcagaaccctactgaggctgagcttcaggacatgatcaatgaggttgatgctgatggcaatggaaccatcgactttcctgagtttctcaacctgatggcgcgcaagatgaaggacaccgactccgaggaggagctcaaggaggccttccgtgtgttcgacaaggaccagaacggcttcatctccgctgctgagcttcgccatgtcatgaccaacctaggcgagaagctgacggacgaggaggtggacgagatgatccgtgaagccgatgtggacggtgatggccagatcaactacgatgagttcgtgaaggtgatgatggccaagtgagatatgcccgccgtttttaagctagttcctctcctgatggtagtaactagtctagttttggagactgactgcttttggttgtgtcttacgcctatccttgcgtcaatggacatatccgtttgttttcaaccaagggattttaccatgtcggtaatttcgttcaaatttggttcttgttgtattacatttgtgttatcttggtacaatgataatgtctttctctttc

SEQ ID NO: 3542 - DNA, 1546 bp, Zea mays
  Clone ID: 700282319_FLI
ccctaatcccgaatccctcccggcctcctccgtctcgcgctcgattcgaatccgagctccctatcctgctcctgctgttcccactgcaatggaggacaacgcggtcgaagagcccgagttgagcggtgcggcggagttcgcgccggcgctcgtcgccgcccacccacacggcaactccgtcgccgtcgccatcgggcccgagctccgcgtgtttgatctcagggctggtcatccagtttcattgtcagatgattgtggtggccattctcattcagacgcaataagagctatctgcttcagtgtgagtggagctttgtttgcttcagctggtgatgacaaacttgtgaaggtttggaagactgattcgtggcgttgcatccagactataacttcggagaagagggtcagtgcagttgttattagcaacgatgacctgtatgtatcttttgcagataaatttggtgttgtttggttagtcactttgcgggaagatagtgcagagcaggtttcagttgataacaaacctgtgtcaattcttggtcactattgcagtatcatcactagcatgaagttttcgccagatggacggttcattgctactgctgatagggacttcaaaatacgagtcacattattcccaaagaatcctctaaaaggggcccatgaaatacagagcttttgccttgggcatacagactttgtatcatgcatcaccttcactagcatatctgaaaaccagagtttccttatatcaggaggaggtgattcaactgttcgcctgtgggactatgtaaatggatgtctccttgatacatttcaagccaaagataagatgggagaactcttaggaccaaatgaaacagatgatagcagcctagccattacagacatatgtccgagtaatgatggctcattggttgctgtagctattcaaagtttcagtggcataatgcttttagcatgtgatttggtaggaaagaagctatctttcctaaaggtgattacaatggaaaagagttatattcctactagcctagcatccagctcggcctcggaactcctgtggactgtcatgggcgcatcaaacatgcccagccaggcttcctcccatctattgacccgtttaaggatcatcacgtgtttccaaaaggacagattatcttcttccgatgccggtcctgcaacccttgaagacggcgatgtaccccacggtgagaagctccttctggcactgcaaggaagcctcgacgtcgcgaagcaagaggaggtgctagcttcagtgctggctgcgctgaaggtttccatgcataagatgctggtgaagaagcactactcggaagagaggagggagcagaggaaaagaggtaggaacgacaagaagatgaagaactagctgaaaagaggatgaagaactagctcagcatgcggtatcgagttgctataacggttctcttttttgtttgtttttttaggtaaacaaaaacagatattactgtagtatcagaaaccgtaagagtaataaatttgccaggatttttcttttctt

SEQ ID NO: 3543 - DNA, 397 bp, Zea mays
  Clone ID: 700282325_FLI
ggaggacaaggccgcggagccgcctccaccgacgttgtggttcgcgctcaagcggtcgctgcactgccgctccgagctgtcggaggtccacgtgccgcgcgccaacaaggcctccggtccagtcgtcgcgagcggtggccacctgtcgtcgatcgtcaccaagcgcgcctccgcgcggtcggggtgctcgcgctccatcgccaacctgcgggacgtcatccacgggagcaagcgccacccggggcagccgcccagctgcagcccgcggtccatcggcagcagcgagttcctcaaccccatcgcgcacgaggtcgtgctcagcaccaactcccgctgcgagctcaagatcaccggcttcgggggctgcggcgggctggcggccgtggggaccggcgcc

SEQ ID NO: 3544 - DNA, 1318 bp, Zea mays
  Clone ID: 700282336_FLI
ccatccagaactcggtcccggccatcaccttcgccatggccgcggcgctgcggatcgagaaggtccggctggaccgccgcgacggcgtagccaaggtggcgggcacgctggcgtgcgtggcgggggcatccgtcatcacgctctacaagggccccaccatcttcggtcccggcggcggcggcggcctcgagctggcgtcaaccagcaaggcggtggccggcgacaagaactggacgctgggttgcgtgtacctgatcgggcactgcctgtcgtggtccggctggctggtgctgcaggctcccgtgctgaagaagtacccggcacggctgtccgtcacctcctacacctgcttcttcggcgtcatccagttcctcatcatcgccgccttcatggagagggacgccgacgcatggaagttccactccggatccgagctcttcaccatcctatatgccgggttcatcgcgtccggggtggcgttcgcggtgcagatctggtgcatcgaccgcgggggcccggtgttcgtggcggtataccagccggtgcagacgctggtggtggccatcatggcgtcgctcaccatgggcgagaagttctacctgggcggcatcatcggcgccgtgctcatcatcgccggcctgtacctcgtgctctggggcaagagcgaggagagggcgcgcttcgccagggacgccgccaccctcgtctccggcagcggcgaccgcgaggggctccttccggccggcggcggtggcatccggagcgccagcaaggcggcagcgtcggccgccacgcagcctctcttgctgccgtcctccacctccaccgacaatgtctgatcggtcgacctatgaatccttcgtcgtcatccattgaccatggtgcgtggagataagagactgcatgcgtacgatccatgaggcgctgccatgcatgctgcgcgctctggtgcactcatggattggagcagtatgatccgatccagcagtaataattatcatcagctagtcttttttttgtggtttttccttgttgatttcacgcatgtatgtatgctgcaacctacatatatgcattactatggtgtgtgtgtggtgagagcagacgacggcaaggtttattttaacttcgatcacgacctgcttgctgttcaagtatattaattctcgttgtacaatactacgtatgtacgtagccagaattgtttggaccgagcgagagcatgcatatatgcatgatcgttagtgtgtacgtcaatttctatctatatatctatctcttcttgatctattatattaaaacaccagtttcttgtgtt

SEQ ID NO: 3545 - DNA, 1034 bp, Zea mays
  Clone ID: 700282376_FLI
agcatctccgctccggctgcgctctgccttgctttcctgctacctgctctagcgcgagcgagagaggtacggcggccgatctggcggcgcaggcggagggctcggccggggccggcaagtcggcgccgaacatggggaggggccgggtcgagctcaagcggatcgagaacaagatcaaccgccaggtcaccttcgccaagcgccgcaacggcctgctcaagaaggcgtacgagctctcggtgctctgcgacgccgaggtcgcgctcatcatcttctccaaccgcggcaagctctacgagttctccagcacgcagagcatgccaaaaacacttgaaaagtaccaaaaatgcagttttgcagggcctgaaacagcactccagaatagagagaatgagcaactgaaaagtagccgcaatgagtacctcaaactgaaggcacgtgttgataatttacagcggactcaaaggaacttgcttggtgaagatcttgagtcattaggcataaaagagctggagcacctggagaagcagctcgattcgtccttgaagcacataagatctacaaggacacaacacatggttgatcaactgacagaacttcagaaaaaagaacaaatgttttgtgaagcaaataagtgtcttcgaagaagactggaggagagcaaccaggttatatggcagcatgcgtgggagcaaagcgagcggcattctgaagtgcagccgcagcagctcaatggcaataacttcttccatcccctcgatggtgctggtgaacccacccttcagatagggtatccttcagaggcactgactagctcatgcatgaccaccttcctgcccccgtggttgccatgagatcgaactactgcgcaattccgaattaataagcatggccgcatgcagctgcctgtgctatacgttgtgcttggagtgtactttaaggttcttgcatggcaagtatgtgtgtaacatttgtgatgaacatggaaactatccacttaattctcgaataatcaatgaactgggtaagattgt

SEQ ID NO: 3546 - DNA, 1390 bp, Zea mays
  Clone ID: 700282438_FLI
gcaagcagcacacgagacgatatagagggagggatcatggctctcttccgtgccgccgcgtcaggagggttcgcgctgatccttctcgcgtgctgcagcctcataatgctggcggcggcgtctggcggcggcggcgtggacgacgacggcgtcggtggtgacaggctgatgatggaccggttcctcagctggcaggcgacgtacaaccggtcgtacccgacggcggaggagaggcagcgtcggttccaggtgtaccgccgcaacattgagcacatcgaggccaccaaccgggcgggcaacctgacgtacacgctcggcgagaaccagttcgccgacctcacggaggaggagttcctggacctgtacaccatgaaggggatgcccgtccgccgtgacgccggcaagaagcgggccaacgtctcctcctccgccgccgccgtggacgctccgaccagcgtcgactggaggtccaagggcgccgtcacgccgatcaagaaccagggcccgtcgtgctctagctgctgggcattcgtgacggcggcgacgatcgagagcatcaccaagatcacgacagggaggctggtgtcgctgtcggagcaggagctgatcgactgcgacccctacgacggcggctgcaacctgggctacttcgtgaacggctacaggtgggtgatccagaacggcgggctcaccaccgaggccaactacccgtaccaggcgcggcggtacgcgtgcagccgctccagggccgcccagcacgccgccaccatctccgactacgtgcagctgccggcgggcgagggccagctgcagcaggcggtggcgcagcagcccgtggccgcggccatcgagatgggcggcagcctgcagttctacagcggcggcgtcttctcggggcagtgcgggaccaggatgaaccacgccatcaccgtcgtcggctacggcgccgactcctcctcgggcctcaagtactggctcgtcaagaactcgtgggggcagagctggggcgagcgcggatacctgcggatgcgccgcgacgtcgggcgcgggggactgtgcggcatcgcgctcgacctcgcgtacccggtcgtgtgattcatatactatcaatcgtatgcatgcatgatgcgtacgtgcgtgcgcgcctgcttgttggttgttgcatatcggcggcacgtacgtgtatacatatatatatatacgtactactactacggattgatctgcatgcggcgacgtataccacgcatatatacacacgaaaactactacgtgtaatcaatcgatactagtagacatataccaacggtaacgtgttgcatcattgtaaaagctggctatcagggacaaaatgcccacattaattattataaaaggctttgttattatt

SEQ ID NO: 3547 - DNA, 1191 bp, Zea mays
  Clone ID: 700282472_FLI
atcaggaggacggtggtttcctctcctccgttctagagaaccgaacctccattctagatccctcgcacaacgaaccttcccttgtcggtgcgcatgagaacctgtgtgtccgagccctagacgcagagtttggtttgtcgccttggaggagctgactcgtccgtcaccaggtgaccagggacggctgccctgtcatcttccatgacaacttcatctacacgcaacaagacggccaagtctcagcgaagcgtgttaccgagctgaacctggacgagttcctgtcctacgggccgcaaagagaccaggggaaggccggcaagccacttctccggaaactcaaggacgggaggatcctcaagtgggacgtgcagtccgaggacgcgctctgcacgctccgtgaggtcttcgagggcgtccaccggcgtgtcggcttcaacgtggagctcaagttcgatgacgacctcttctacacggaggagaggcttacctgcatcctaaaatccgttctcaaggttgtcttcgagcacgccaacgacaggcccatcatcttctccagcttccaacccgatgccgcgcagctcatccgcaagctgcaagacaaataccctgtgctcttcctgaccaacggagggacgcaggtgtacgccgacccgcgtcggaactcgctggaggaggccgtcaagctgtgcgtcgccggcgggctgcaggggatcgtgtcggaggtccgggcgatactcaggcagccgtcggcggtggccaagatcaaggaggccaacaaactgtcgctgatgacctacggtcagctcaacaacgtggcggaggtggtgtacgtgcagcacctgatgggggtggacggcgtcatcgtcgacctggtgcaggagatcgcggaggccgtgtcggcgttcacggtcgttacggccgtgcaggcgtcgggctcccaggacggcggcggcatcgtggtcggcgagaggatggagacggctgccgtggcggtggcagggacgccgagcttctcgccgcgggaggtgtccttcctcctgaggctcattcccgagctagtgcaatagcgcgttcttgctgctttgctggtggaatctcgcgacgagatcctctgtatccgtagagttaggtcactaacgtgtgaatccggcctttttgtttgtcaactgaaatcgaaaaaggttatgggtt

SEQ ID NO: 3548 - DNA, 1131 bp, Zea mays
  Clone ID: 700282485_FLI
caggaagccggaagcaggaagcaggggctaacctccgagcggcgaggatgaggggcggcggcgggatgattgacgatgaagagcgggtgggccacgcggagatcccgaccagcttcggccccgagctgcgcgcctgcctccgatgccgcctcgtcaagacctacgaccaggaacccttctccgctggcgccgctcccctcccccctcctcacgcctaggcctgcggtctaggttcaccagcctcccgttgaagggagggttcgaggactgggggtttcgtttctcctggtgcggtccgttctcggcggcggctaaggtaggttcattccgggttgctacacacttgctgtttcggaggaacttcaagaagagtatcaggtgaaaactacgtacctccattttagaaacgacgatgactaatatacaagcagctattatgtgtaagcgtgcaagtagatctcattccgttagatatagatctaaccatatgtcatatttagcatttaaatcctctcactgccgccttactttataaaaaagctcctaacaaatcacgattacacatacggttggatcttagatctaacggacaaagagagctacttgcacggcttgcatatttgtcactgcctttagaaacactcactatgatttaatgcactactcgagacacgtcgttgttcatcactgcaggggagccaagacaacaacatgtagtatgtgccacccaagcgatgtctagagctcctgaagcagtatgaataatttagcttatataaaaaagtccatgtgcttgttgccaagcgaactgccctgcattgttgtatctgagtgctaatcaggacccctaattaaccctttcgagctaacattagcacaaatgtcagacacatgaccaagacaagttcataggccagcaattctgttcaacaaacaccttgtcttcgtcgtacacggatgtggataccaatttgcagattgccgagccacgagcccatctaccagtagcctccgtgctaccgcaggcagtggcccataattctttctgtacggagtataagtacaatagtagttctaaatgcagacatgcagttgcttaacaagccggtgaaaatccaggttgttctctcc

SEQ ID NO: 3549 - DNA, 1476 bp, Zea mays
  Clone ID: 700282526_FLI
ctcccgaactccgaactacaagtttcgcttctcgtcgcgacgactgggcgagaccgccgccgccgccgccgcctgagttctttagaaatggctgatggtgaggacatccagcctcttgtctgcgacaatggcactggaatggtcaaggctggttttgctggcgacgatgcaccaagggctgttttccctagtattgttggccgtcctcgccacactggtgttatggtagggatgggacagaaggatgcgtatgttggcgacgaggcacagtccaagagaggtattctcacgctcaagtatccgatcgagcatggtattgtgagcaactgggatgacatggagaaaatctggcatcacactttctacaacgagcttcgtgttgccccagaggagcaccctgtgttgctcactgaggctcctttgaacccaaaggccaacagggagaagatgacccagattatgttcgagactttcaatgttcctgccatgtacgttgcaattcaagcagtgctgtcactctatgccagtggacgtactactggtattgttctcgactctggtgatggtgtgagtcacactgtgcccatttatgaaggatatgcccttccccatgccattcttcgtctggatcttgctggtcgggacctcacagactccctcatgaaaattctcactgagaggggttattccttcacaacctctgccgagcgagaaattgtgagggacatcaaggagaagcttgcatatatagctcttgactatgagcaagagttggagactgccaagaacagctcctcagttgaaaagagctatgagctgcctgatggccaagtaatcaccatcggcgcagagagattcaggtgccccgaggtcctcttccagccatccatgattggtatggaggctgctggaatccatgagacaacatacaattcaatcatgaagtgtgatgtggatatcaggaaggacctctacggcaacattgtgctcagtggaggttcgactatgttccccggtatcgctgatcggatgagcaaggagatcacttcccttgcaccaagcagcatgaagatcaaggtcgtcgcgccacctgagaggaagtacagtgtctggataggagggtcgatcctagcctcgctcagcactttccaacagatgtggatatcaaaggaggagtacgatgagtctggcccggcaattgttcacaggaagtgcttctaggtttctgccaagttcgtcaagtgcttttagggttcgccatgttcatcatcgctacctagtcttaagttatgcccccttcatttgctgagatatgtgtggcagatttgcatcgttttggtatttcgtggctccatgtgtgagcatgctgtgtcctataacctggtttatgagatgagttgttaaacttgcttggcttgattggttttacctgtaagagctgatagttatataaattgcttgtacttgtttgcatcc

SEQ ID NO: 3550 - DNA, 1131 bp, Zea mays
  Clone ID: 700282564_FLI
ccctcatcctccgctccagacttccagcatctccgctccggctgcgctctgccttgctttcctgctacctgctctagcgcgagcgagagaggtacggcggccgatctggcggcgcaggcggagggctcggccggggccggcaagtcggcgccgaacatggggaggggccgggtcgagctcaagcggatcgagaacaagatcaaccgccaggtcaccttcgccaagcgccgcaacggcctgctcaagaaggcgtacgagctctcggtgctctgcgacgccgaggtcgcgctcatcatcttctccaaccgcggcaagctctacgagttctccagcacgcagagcatgccaaaaacacttgaaaagtaccaaaaatgcagttttgcagggcctgaaacagcactccagaatagagagaatgagcaactgaaaagtagccgcaatgagtacctcaaactgaaggcacgtgttgataatttacagcggactcaaaggaacttgcttggtgaagatcttgagtcattaggcataaaagagctggagcacctggagaagcagctcgattcgtccttgaagcacataagatctacaaggacacaacacatggttgatcaactgacagaacttcagaaaaaggaacaaatgttttgtgaagcaaataagtgtcttcgaagaagactggaggagagcaaccaggttatatggcagcatgcgtgggagcaaagcgagcggcattctgaagtgcagccgcagcagctcaatggcaataacttcttccatcccctcgatggtgctggtgaacccacccttcagatagggtatccttcagaggcactgactagctcatgcatgaccaccttcctgcccccgtggttgccatgagatcgaactactgcgcaattccgaattaataagcatggccgcatgcagctgcctgtgctatacgttgtgcttggagtgtacttcaaggttcttgcatgacaagtatgtgtgtaacatttgtgatgaacatggaaactatccacttaattctcgaataatcaatgaactgggtaagattgtaacatagtgctttatgcctaaaacattaatttaggctgcgtgtgaatgatggaggttgtgttccgcgtgttc

SEQ ID NO: 3551 - DNA, 1743 bp, Zea mays
  Clone ID: 700321625_FLI
atccgtccatcgtggcccaggctgtcgttccgttctataaagggcgtcgagaggaaaccggtggaaccctacactgagaaccgcagagacaggcgtcttcgtactcgcctatctccgcgactcaaagctttccccaattcccccccttctcccatttctcaccaccgccgccgctccccccgttcaacaacaccatgagggagtgcatctcgatccacatcggccaggctggtatccaggtcggaaacgcgtgctgggagctgtactgcctcgagcatggcattcaggctgatggccagatgcccggtgacaagaccattgggggaggtgatgatgctttcaacaccttcttcagtgagactggcgctgggaagcacgtcccccgtgctgtttttgttgaccttgagcccactgtcatcgatgaggtgaggactggcacctaccgccagctcttccatcctgagcagctcatcagtggcaaggaggatgcagccaacaacttcgctcgtggtcactacaccattggcaaggagattgttgacctgtgccttgaccgcatcaggaagcttgcagataattgcactggtctccagggcttcctcgtcttcaacgctgttggtggaggaacgggctctgggcttggttctctcctcctggagcgcctgtctgttgactatggcaagaagtccaagctcggtttcaccgtgtacccatccccccaggtgtccacatccgtggttgagccatacaacagtgtcctgtccacccactctctcctcgagcacactgatgttgctgtcctgctcgacaatgaggccatctatgacatctgccgccgctcccttgacattgagcgcccaacctacaccaacctcaacaggcttgtctcccaggtcatctcatccctgacggcttccctgaggttcgatggtgctctgaacgttgatgtgaacgagttccagaccaacctggtgccctacccgaggatccacttcatgctttcgtcctacgctccagtcatttctgctgagaaggcctaccacgagcagctgtccgtggctgaaatcaccaacagcgccttcgagccatcctccatgatggccaagtgcgacccccgccatggcaagtacatggcatgctgcctcatgtaccgtggtgatgtggttcccaaggacgtgaacgctgctgtggccacaatcaagaccaagcgcaccatccagttcgtggactggtgcccgactggcttcaagtgcggaatcaactaccagcctcccagcgtcgtcccaggcggtgatctggccaaggtgcagcgtgccgtgtgtatgatctccaactccaccagtgttgtggaggtcttctcccgcattgaccacaagttcgacctcatgtacgccaagcgcgccttcgtgcactggtacgtcggtgagggtatggaggagggcgagttctccgaggctcgtgaggatctggcggcgcttgagaaggactacgaggaggtcggtgctgagtttgacgagggtgaggacggcgacgagggtgacgagtactagacgctctactggcgcggcgtcgtcgggcttgtgtgccactgctatcctgtgatctgccctgagtggctcctatcgtgttatgtttctgtcggttcttatctatctgtcgttgtgtggtttacaacttacgttgtaagactttattcccccgctttgctactgggttattaagtttggcgttattgttttcttg

SEQ ID NO: 3552 - DNA, 3312 bp, Zea mays
  Clone ID: 700321631_FLI
tcagcgactacttttttaacagttgttcatcgcattgaggaagggaggccggctggtgctactgcttttctagtacctgcccacctgcacttgcatctcctgcttccctgagcggcctcccggctgcgaatccaccagcatttcccgaggcccagcgccgcgtgtgcctgtggggcggagtcaggaaatgctcggagctccattccacggctgaaacttctgggaaggtttaagccaaaccttgttgcagtttagggagaccggcagcactaaagaaactagcctgagcctctctttcagcctctcacccactatcgtgagggcattttgtaccttccaagaaagagagtaaggagaacttgacctcagcgctagagaagaatatggcagccactgaagctgccacggacacaggcagttcaaggaggtcacaagatgacactacaacattagtcccacacagtgggaatttgggagaaccaatccagaagggcgtgaagaccaccagattcaaagatgatgacgaggttgtggaaatcaccattgtacagcgcgattcagtggcaatcgaagatgtcagggtagtcgatgatggtggctcagggcatagtaatgggtttgatggcctgtcacttgtgtcaccttcctcatcaaggagcggcaagctatcatcaaagattaggcaagtgaaaaatggactaaagatgaagaactcaagcactaaggcgccacagacacagttgggaaagaacatgaggaagagattggacagaagcaagagcggggctgctgtagcgctcaagggcttgcagtttgtgactgcaaaagttggtcatgatggctgggctgtagtggagaaacggttcaacgagctacaggttgatggtgtgctgctacgttcaagatttgggaaatgcattgggatggatggatctgatgagtttgcagtgcaattgtttgattcattagcaagaaagagagggataacaaagcaggtgctgactaaagatgagctcaaagatttctgggagcaactcagtgatcagggttttgacaaccgtttacagatattctttgacatggttgataagaatgccgatggaagaatcacagaagaggaggttaaggagattattaccctcagtgcatcagcaaacaaactttccaagctcaaggaacgagctgatgagtacacggcactcataatggaagaacttgaccgtgacagccttggatacattgagcttgaggatctgaaggcacttttgctgcaatcaccttctcaagttgttgcaagatcaacaacgcatagctcgaaacttagcaaagctcttagcatgaagcttgcatcaaacaaggacacaggtccattttaccactactggcaagagttcatgtacttccttgaggagaactggaagcgcatttgggttatgactctctggctctcaatctgcattggcctctttatttggaagttcatccaataccgtaatcgagcagtatttcacatcatgggttattgtgtgaccactgcaaaaggtgctgcagagaccctcaaattcaatatggccctggttctttttcctgtttgccgaaatacaatcacatggattcgatcaaagacaaagatcggtgctgttgtgcccttcaatgacaacataaacttccataaggtaatagcagcaggtgttgcagttggtgttgttttgcatgcaggtgctcacctgacatgtgattttcctctgctgctgcatgcaagtgatgctgcctatgaaccaatgaagcctttctttggagacaaaaggccaccaaattactggtggtttgtaaagggaactgaagggtggacaggtgtggtcatggttgtacttatgactatagctttcgtattggcccagccatggtttcggcgtaataagctcaaggattctaatcccctcaagaaaatgactggcttcaatgccttttggtttactcaccacttatttgttattgtgtatgcactgctcattgtccatgggacctgtttatatctaagcaggaaatggtacaagaaaacgacatggatgtaccttgctgtccctgtgctcttgtatgtaagtgagcgcattcttcggctatttaggagccatgatgctgttaggattcagaaggttgcagtatatccagggaatgttttggctctctatatgtccaagccacctggattcaggtatcggagtgggcagtatatcttcataaaatgcagtgatgtctctccatacgaatggcacccattttcgattacatcagcaccaggagatgattatcttagtgtccacattcgcacaaggggtgattggacttcacgtcttaggactgtcttctctgaggcatgccgccctccatctgatggagaaagtggactccttagagctgacccttccaaggggatcaccgagaccaacgcgaggttcccgaaactcttgattgatggaccatacggtgctccagcgcaagactatcaggaatatgatgtgctcctgctcattggactgggcattggagccacaccattgattagcattgtgaaggatgtacttaaccacatccagcttggaggatctgttgcaggcacggagcctgagggcagtggcaaggccaagaagaggccattcatgacaaagagggcctacttctactgggtgaccagggaagaggggtcctttgaatggttccgaggggtcatgaatgaggtggctgagaaggacaaggatggagtcattgaactccacaaccactgctcgagtgtgcaccaggaaggggatgtacgttctgccctcattgtcatgctccaggagctccagcacgcgaagaagggagtcgacatcttgtctggaactagtgtcaagacgcattttgcacggccgaattggcgaagcgtcttcaaacatgttgcagtgaaccacgagaaccaacgcatcggagttttctactgtggtgagcccgtccttgtgccacagctacggcagctgtcagcggacttcacccacaagacaaatactaagttcgagttccacaaggagaacttctaatggaggaactggagaaaagctctaggcgtggccctctaatggtttcagaatatgtgaattacgatggttgtaacatatatacgagtagaagaataagacgatgggagttgttttgttgtacatgtcaagagtagatgaattgtctttgcaagcatacaaccttaaaagttgtaacacatgtcagctggttttgacaggtctgtttgttttgtctgctcctgttggagtgttgggc

SEQ ID NO: 3553 - DNA, 1455 bp, Zea mays
  Clone ID: 700321640_FLI
atttattagttacagaacaagcagagaactcactgtacacggtctcttcttgtactgaactggtattcagcttcattcaaagagttttggtaaagtataaactgtgctagaacttttgagctccttaattttcatgtagtatttttgttacttgatttttcgcctatcttgcaatagcaactttaacactgaaaaagattgcttatggccactggcaagtatgaattgatcaaattctcaaaacatatcatttgctgatttgatgaagcacgattcttaccttatttgtatctaatttgttacattcactgtttacagcttctcttgtaacattggatataatgacgctgctacatgactattattttgacatcataacctacatataaagattagagactaatctgtttttttctgaactaaggtgttaacacatttccaaatatcgaacatctatcttttagtatgcaagcattttagtttctcagaggtatactgttccccatctctgtattttatttcatccactgcccttgctaatttgtaggaaatgaacttccatcagacttgatagacacactactaaagtggatcccaagcaatgatgaggagcttaggcttcgactgtcctcccgtagcaccgccacaccgcacgcgtccgtggcggcgtccgcctcggcgccggtctcgcacaccgctccctggctggggaagttcatcgcctccgagcccttcaacgtggggggattcgactgggcgatctacttctaccccgatgggaagagcggcgaggatggtatgttgaagtgacatgctctgaactgctcttggcttcaggtatgcttatccatggtggaaagaaaaagtgattgactcagacttgaaaagaaaagatggcctttgcccattgacgcctgaggtaagccatcaagttttctattgtatcattttggctggcgtgcaggcagtcaggcgggataacaagcagaggtttagtctgttggaggaagatggcgagctgttgatccgggcgaaccagggacacacagtaatactaaaaaatatagtctggaggtgacctcaatcttattggacagaatactctcttatgagacaaagttgcataagcccatcaaattttgcagtaatcagttccttgagttcatgtgcaggtttgaaacttttaactgctggtcagcaagtgcattgtgatgctgttaagtggggtctagatttagatacttctgtttcaaatgtactggttaaaatgtatggggaatgtggagctatgtcagattactggaaggttttcaactcaatggctgaacacgatgaagtttcttggaacactatgatgggtgtcatggccagttcacaaacacctatttctgaaattgtcaaagttttcaacaatatgatgaggggtggtttgataccaaataaagtaacatttat

SEQ ID NO: 3554 - DNA, 2826 bp, Zea mays
  Clone ID: 700321661_FLI
ggagaatggctacaaaagcgactaacatctcttctgctgttggtacttcgatgactgctggttctgatgaggttgaaacaaaaaggtcttcaactgggaaaaagattaagaaagaaaagaatgatcttgcctctgagctcagagatctaggctggtcagatgcagaccttcgtgatgaaacaaaggctgcccctatgagtctggagggagagttgacacagattcttagagaggtggcccctaaaccattggagggcaagagaacaggtggtatcgataaatctcaggttaatgctctgaagaggcaagctttactgctaaagcgggaaggtaggcttgctgaagcaaaggaagagctcaagaaggctaaaattttggaaaaacaacttgaggaacaggagattctaggtgaagcagaaaactcagatgatgatttggctgctattattcggaacatggacgacgataagaatgatgacatatttatagatgattcaaagttcccagctttcaactttgaacaaattatggttgcctctaatgatcttgccactgatggtcactttgacgttacagatgatgacatgaatgacccagatatggctgctgctctaaaatcatttggctggagtgaggaggatgacaaacagttggaaaatctcgaacctgtttcttcaaatcaagaggggctaaaggagcaagtactttctctaaaaagagaggctgttgcaaacagaaggtctggtaatgttgtagaagccatgtcattgcttaaaaaggcaaagctactagagaaggatctcaaaactgaagagccagactcaaaggttccttctctagaaaggcagaaaactacacatgcagaagatgccacttatgcagggacgaatgtccgacctataccaacaccaaaaagtaagcttgcaattcagcgagaactgttggctctgaagaagaaggcactagctttgaggagggaagggaaggtggatgagtctgaggaagagctgagaaagggtagtgttcttgaaaagcagcttgaagagcttgaaaattcttccaaaccacctgtagcaaaggaaaccaggagctttccatctaatcccccgtacaaagttgaacccccaaatatcaatcttgctgatgaggtatatgaacctgaggttacagacaaggatatgcaggatccagcattgctgtcggtgctgaaaaatatgggatgggaagatgctggttcagattctgtggaaacaactgacaaagcatcattttctgcacatgtagttcatcataaatcatcaaaaactaagggccagcttcagaaggaattgcttggtataaaaaggaaggctcttgccctcagaaggggagggaaaaacactgaagctgaggaggaacttgagaaggctaaggtgttggagcagcaacttgcagagatggaagaatcaaataacttgagtgctagtcaaggtgttactactgctggcggggacgaaatattgctagtgcatgcatctgaatctggtacgccagtggttactctgtgtggttctccaagtaaaccgcagattgagacaaccaatcctaatcaaggtgatgtgggagaagaaagtagagctggaaggtctccagccttgtcgcagccagcttttactgatccgttgggatctgaaaaagggtcacattcaccttctgtagtacatgatcgtaatgagcatcagaaaacacaaggagatgatactcttaaagatgagatattacttcataagagaaaagcagttgcctttaagagagaagggaagatggcagaagctagagaagaattgaaactggcaaaacaattagaaaagcaccttgaaggtgctcaacaagacaccatggatggtgtgggtgactccattactcctgctgtggaacagaacagtttggtccaacaacctgctagctccagcaatcacactgacgacataacttctccccctcctacacaagcgagcaagcggacgcaacctcagaaagcaatgtccagccgggatcgtctcaaaatccagcgtgaatccctggctcataagcgcaacgccctcaagttgcggagagaaggaaagactgcagaagcagatgcagaatttgaactggccaaggagctagagagccaactggaagagtcagacaaccaaagctcgagctccgggggaaagtcaagtgaaccaaacgacacgagcgtcgagaatctccttgatcctcagatcatgtctgccctaagatccattggttggagtgacatggatttatccatgcaatcctctagtgcacaacctctgaaacctgtgcagtcctcaagttctcaacctccgcaaaaagtggaagccaagtcatctgttgccgcgaccagcaaacctcagagcgagagaagtcaacttgaagaacagatcaaggcggagaaactgaaagcgcttaacttgaagcgggaagggaaacaagcagaggccctggaggcccttcgctcggcaaagcgactggagaagaagttgaactcagcttaagccaatcacaccctcccagattgctcttgttcttttgtcaattgttcgttttggttacctgacatcccaagcgttccagctagaacagagaatcatatcgagtcctatggccctgattggcacagcttgtgagctttgagcaccataaacttatgtcctgtttgtgttcgagctatgagcagtccctttcatgtatgtataaataaaatctgatggacggagattattttcacgaattcgtgtatacacaatgttaggggaatgtcaattaagttggaatctg

SEQ ID NO: 3555 - DNA, 481 bp, Zea mays
  Clone ID: 700321669_FLI
gcctcgtcatcaagtcgtgggcgccgcaggtggacgtgctcagcaaccccgctgttggcgcgtttgtcacccactgcgggtggaactcgtcgcttgaggccatcacagcgggtgtgccgatgctgtgctggccacagggcgcagagcagaagatcaacaaggtacttatgaccgaggccatgggcatcgggctggagctggaggggtacaacacaggtttcatcaaggctgaggagatagagacgaaggtgaggcttgtgctggagtccgaggaggggagggagattaggacacgggcggcagaggtgaagaaagaagcacacgcggcgttggaggacgggggatcatcgaaggcagcatttctccaattcttgtcagatgtcaagaatattaattaggtcgggaagtgatcaatctttaaccgcccgatacaacgtaacacaaactattcaataaaatattagtatacatattgcttagg

SEQ ID NO: 3556 - DNA, 1011 bp, Zea mays
  Clone ID: 700321676_FLI
cgtttgcccatcctcgtgacggctcctcgccagtcgcctcgtctctccctgccgcgtcgcctccagttccgcctccgccgcgcctcccgcctccgccgcgcctgacgaacgcagtataggactgtgcaggtagagaggaggagggtccggcgagatggggatgcgagataagaagcggaaccagaagcgagtgctcgcgcgccgtaccgcggcaccgcgcccaggcgagggcaaggatttcctgccgctggaaggaggccccggtaagaagcatctgaaggtgcagcagcctgaagagcccgaaaacacagccacaatcgtctacattgggcatatcccccatggtttctacgaggacgagatgaaagggttctttaagcagtttggggatattaagaggcttaggatcgctcgtaaccgcaagacaggaaagtccaagcactatggattcattgagtttgagaaccctgctgtggcaaaggtcgtagcagatgagatgaataactatctcttgtttgagcgcaccttgcaagttgcacttgttgagccagagaaagttcatcctaaattatggaaaggggtgcgaaggggatttatacctgttgatcgagtagcaattgaacggaagagacacaacaaggataagactgtagcagagcacaaaaagatggttgaaggaattgtaaagcgggatggaaagcgtcgcaaaagaatcaaggcagctggtattgactatgagtgtccagctcttatagggagcattcaaccatcagcgaaaaagatcaagttcgatgaggcatagtattttattctaatgggctgttggatccttagtagacgaggcggtggaatggttgagcaatatattcaccttttgaggagacggcagacaactatgtatttcacttttgaatttctctatgttttatgaatgacaccgacacagatgttacaacttaagtatgaaaatgcaatgggcgatgtgttcttaatttgcccttggaaggttcc

SEQ ID NO: 3557 - DNA, 1229 bp, Zea mays
  Clone ID: 700321690_FLI
cctctctctctctctctcccgcggtctcggctcgtcttcctcctcctcttttattggccgcatctttttctccggttgttgaacgcggcggttcttgctccaaatccaggcggcggggagggggtgaggcggcgccctgagccgtaaaggagccggctttcgtagctcttcctgggagtgaccttctccgacgaaacgaaatggcccatcaaggaccaggagtgcctaagtttggaagttgggaggatgagggcgatcacccctacacacagtacttcgaaaacgctcgtaagggcaaatctccaggcagatctgctactcagaacgagcacagaactggagatccggaagcgctcttcaaagaagacacgacgccatctgctaaagcttctcccctgcggactgggtcggaggatcctgtggcgccaaagcccaaggacgcggcctttgctcgaggcaagccgtatgctgagccagcaacccataaacacggtgctaataccagctatgaaagaaaaaccggcatggagagatcgcctctgcatcctcaccaccaagcaaggctcgtaaacagaggaggtgtttcgtctccttcatgggaacgcaggggttcgtccgaaggaaaccgtggagctgcgcccaccacacctgggaggtcgtccaagatgaggccaggcggccgtggagacgagacgcctgagagaggatctgccgtgcccaagtttggagaatgggacgagaaagatccctccacaggtgaaggcttcaccgacatatttaacaaggtgagggaggagaagcagtccggcgatgctcctgtcatcaccagcggcaacgcaggtggtggttatagccgctccaaccaaggccgcaaatacgaatcttcagcttgctcatgcttcagttggttcaggaactgatgcttccttgcatggttgctgatgcttctgctggttcagcagctgataggtgccgttgaagatttggatgaaccagtgccgatcgtatcattttcacatgagctgtagtcccatcgtgttctccctgttgtgatgctgtgtggtagcaggacgtgccagaacttgactttgagaagctgaggttcagtagtttgagctgtttttgcaacatgcggtttgtttctccatagaatagaatccttaaatcaacatcctccctcacaagaatcctgaaatcgctgggatttttattttattttattacgagct

SEQ ID NO: 3558 - DNA, 1091 bp, Zea mays
  Clone ID: 700321691_FLI
cgatcggcaagatgatcaccggcacggacttctaccacgtcatgacggccatggtgccgttgtacgttgccatgatcctggcgtacggatccgtcaggtggtggcgcatcttcacgccggaccagtgctcggggatcaaccgcttcgtggcgctcttcgccgtgccgctgctgtccttccacttcatctccaccaacaacccctacaccatgaacatccggttcatcgccgccgacacgctgcagaagctgatcgtcctggcgctgctcactgcatggagctacctctcccgccggggctgcctcgagtggaccatcacgctcttctccctgtcgacgctgcccaacacgctggtgatgggcatcccgctgctcaagggcatgtacggcgacttctccggcagcctcatggtgcagatcgtggtgctccagtgcatcatctggtacacgctgatgctgttcatgttcgagtaccgcggcgccaggatcctcatcaccgagcagttccccgacacggcgggcgccatcgcctccatcgtggtggaccccgacgtggtgtcgctggacgggcgcaacgacgccatcgagacggaggccgaggtgaaggaggacggcaagatacacgtcaccgtgcggcgctccaacgcgtcgcgctcggacatctactcccggcggtccatggggttctccagcaccacgccgcggcccagcaacctgaccaacgccgagatctactcgctgcagtcgtcgaggaaccccacgccgcggggctccagcttcaaccacaccgacttctactccatggtcggccgcagctccaacttcgccgccggggacgcgttcggcctgcgcacgggcgccacgcccaggccgtccaactacgaggaggacccgcagggcaaggcgaacaagtacggccagtacccggcgcccaacccggccatggcggcgcagcccgccaagggcctcaagaaggcggccaatgggcaggccaagggcgaggacggcaaggacctacacatgttcgtgtggagctccagcgcgtcgcccgtgtccgacgtgttcggcaatggcgccgccgagtacaacgac

SEQ ID NO: 3559 - DNA, 591 bp, Zea mays
  Clone ID: 700321746_FLI
gaacgagaaggtgttcctggccggcgccgacaacgtgctgcagaagctcgaccgggtcgccaaggcgctgtcattcgcctccaaggcggaggaggtggacgaggtgctcggctcgcggcgcgagaaggggttccttcctggccccaaggagagcggcggccacgaggagcgggagcaagaggaggaggaggaacgcgaagaacgccacggcggccgtggggagagggaacgccacggacgtgaggagcgggagaaagaggaggaggaacgcgaaggacgccacggccgcgggcgccgcgaggaggtggcggagacgctcatgaggatggttaccgccaggatgtgaggccgccgcgctcgccaaaacgagcaagaagcaacaagagggtggcgcgcgaccgacgtgcgtacgtagcatgagcctgagtggagacgttggacgtgtatgtatatacctctctgcgtgttaactatgtacgtaagcggcaggcagtgcaataagtgtggctctgtagtatgtacgtgcggatacgatgctgtatgctactgaggcaagtcccataaataaataatgacacgtgcgtgttctat

SEQ ID NO: 3560 - DNA, 591 bp, Zea mays; identical to SEQ ID NO: 3559
  Clone ID: 700321755_FLI

SEQ ID NO: 3561 - DNA, 376 bp, Zea mays
  Clone ID: 700321767_FLI
gaagcaaccgctgtctgctggggctcgcaggccatcttatgtttcttccaacaagttcttcgacgacttgtttgagaggaactcggatggtagcctgaaagtaggcagcacaaggcacggtgatgtctatggaaaataaatgtcgttctcttgtcctgcttgcgtttgatgttatcagctgcctgcatattagaacgatttagttgatgcttctggcgaacttgctggccttttcataaataattttgccaaaccaaactatgtggaagcttcagcctatgagctgtccactgtccagacattttgaatggcaaaaggcgattcttcctaaattgtgtaatgaaacgggtttgcttctatatatagtgttctttag

SEQ ID NO: 3562 - DNA, 621 bp, Zea mays
  Clone ID: 700331857_FLI
attgggcacaattattatgataagtctctttgggagggcctatcaagatctataccgtcacttcagaagggtccgggcaaagatgatgaaaatgaaactggatttgctgttgatgcttcagagatggggaactttgcaaaatttatcaatcacaattgcaccccaaacatatatgcacaaaacgtcctttatgatcacgaagatatcagtgtgcctcatatcatgttctttgcttgcgatgatattcgacccaatcaagaactagcataccactacaattataaaatagatcaggttcatgatgccaatgggaacatcaagaagaagaaatgcctttgtggctcggttgagtgtgatggctggctgtattgattttttaaaaacttgctgtattacgtttagaatctgcagtttttttaagcataactgaacttgaacttgtttcattttgccttcatctagatcatgttgtgacaaaatgtaaaataagacatcagtgtttttagttgccaatgggggtcaagttttttcctttctcattctattcgttattttatatgtctagctttcaatatgtagaataatgtgtgaatatacatggcaataagttcaagtgaattt

SEQ ID NO: 3563 - DNA, 890 bp, Zea mays
  Clone ID: 700331867_FLI
tgggcgccgccggcaagcctcctcccctcgtctgcttcaaatggccgtggggccctaatcctatcccatcggcgagctccagccccagcccctgcggcgacctcgagctcccctggctcttcaagtccatccgcaccctcgcgcagggcctcctcatcgccggcgacatcccctcccccgcctcttctcccagcggaggagtaaggggcgttcagaggcgcacgggtgccgcggtggtggaggtggaccgcggggacgctgaacagcgcgccctggcggcatcgctcgcgagcgggaggcccgccacggtgctggagttctactccccgcgctgccgcctgtgcgcctctttgcagggcctcgttcgcgagctccaagacggtgccagtggctccgccagtttcgtgctcgctgacgccgaggacgaccggtggctccccgagcttctgcattatgatatcagatacgtcccttgcttcgtgctcctggacaagcacggtagagctctagcgaagactggagtaccaaccagccggcagcacgttgtcgccggtctccatcacctcctgaggatgcagcagccatccggactggaaggaaaccagaatgcgcctccgtcatgaagcccaaatacctgagcaaggcctgtattgacaaagaaaaattttcagaatgtgccttttgtttttgcaagcatgaacaatgggcaaacattgatgcgttaattctttagctggtaagtacagattgaagttggtgcaaaagcaaaaggcaggtggtattttttttatgatatccgccttgaaataaccttggaatttgtctcatagatcttctaggataattttttttcttgttcattcatcagcagtcattcatattcttggtcc

SEQ ID NO: 3564 - DNA, 1306 bp, Zea mays
  Clone ID: 700331881_FLI
atcatgacaaacatgtgcacgtatgttggcaggaaggaagcagcacttaaacagagggaggctgcgctaaaagctgcaagagaatcaaaggatggcagagatggggaagtaacaacactaaggcaagaacttgagtctgccaaagaagaggttgcatcagcaatggaccagctaaaggaggcagagtctgaaacgaaggctctccgatctatgactcagagaacggtcttaactcaagaagaaatggaggaggttgtcctaaaaagatgctggcttgcacgctattggggcttagcagttcaatatggtgtgtatcccgaaattgcggtatcaaagcatgaacattggtcatcattggctcctcttcctcttgaggttgttctttccgccggtcaaaaagctaaggaggaacctcgaaaacaaggtgacaatgttcaagggagaaataaacttgcacgagaaatgagtgatgtaatgggagaaggcaatatagagagcatgctttcagttgaaatgggccttagagagctttcttcattgaaggtggaagatgctgttgtagttgcagttggccaacatcgcagacctagcatagttcgtcagttcacatcagatttcaaatcacctggtgaacctaaatacttggaggcatttgatcttagcccagaagaggctgaagatgttagctttaagcaggcatggcttatatacttctggagaagagccaaaactcatggtgttgaggaagatattgctgatgaccggcttcagctttggattggtcgcaacgcacaagctccaaattctcatgacgctatagatgtggagagaggtctaacagagctgaggaaattgggcatagagcagcaactgtgggagggctcgcgagcagatatagatcaagcttctttggcgatggagaattagtaagaattttccacggctgtctatgcttcgtgtatcatcccagttttggagaaacgggaactccatttcccagcaggtctcggccctttgcatcatcaggtatcacagtcacaggattgtgctccgatcttggggtgtatcatcccagttttggagaaacgggaactccatttcccagcaggtctcggccctttgcatcatcaggtatcacagtcacaggattgtgctccgatcttggggtgtgaccgatggacatccgatgagtttgtgtagtgcatgtgcaagccattcatctgttgttattaaaatagctttgtgaaatgtgtaatagctctgctttggcaagagaaacgatggcaacgacggccccacttccagc

SEQ ID NO: 3565 - DNA, 812 bp, Zea mays
  Clone ID: 700331888_FLI
cacctgaaggagagcagcccggaggagggggagcaagcagcagccgtcggtggaagatgtcgtacctgctgccgcatctgcactcggggtgggcggtggaccaggccatcctcgccgaggaggagcgcctcgtcatcatccgcttcggccatgactgggacgagacctgcatgcagatggatgaagtgctagcagcagtagctgagaccataaagaactttgcggtcatctaccttgttgacatcacagaggtccctgatttcaacaccatgtatgagctgtacgacccttcgacagtgatgttcttcttccggaacaagcacatcatgattgatctcgggactggaaacaacaacaagatcaactgggccctgaaggacaagcaagagttcatcgacattgtggagaccgtatacaggggcgcccggaaaggccgtggtctggtgattgctccaaaggactactccaccaagtaccgttactaagaaggcaggcattccccttatgcaatctattggggatgtttacacggacagttagtccgacaggtgatccctaactgtatcttggcataccctagtaattcaagttgctggctggagtgatgcttatccatgtcttggcatgccatagtgaacatgtaaacctgtgatttgaggtgattattcgagtgtaaagaaaccaggattgcgttcgcctatgactatgtgtctagttgtctacttaataagaaacagttattggtttggaatatcggaactgagacaatggtttcctttcggtatttctattatcaactaccctgctttgct

SEQ ID NO: 3566 - DNA, 892 bp, Zea mays
  Clone ID: 700331895_FLI
gaattcggctcgaagaacggcaagcatcgggcgtccaagccaacgaagggctcgcagcgcgtgttagtgggcatggaaggcggagtgaaggaggaggagaagctcaacggcgggctgcagttcgaggtgtacaaccagggcatgctgaagacagagctctgcaacaagtgggaggagaccggcacgtgcccgtacggtaatcagtgccagttcgcgcacggcatcgccgagctccgccctgttatccgccatccgcgctacaagaccgaggtctgccgcatggttctcgctggcgttgtctgcccctatggccaccgctgccacttccgccactccatcacccctgccgatctcttcctcccgcgcccttgaagatgtcagtccaccacccactgccactctctcgtccgcttccaccctctccagctctacttcattgtgcggttataccatcgtcagtcttcagaacccaaaaaatgtctgattagttgtgattcagaaaatgatagccgtaaataagctatagatagatacacgagatagaaaacaaaaattgttctacgtaattagcacacaggcaagatgtgaatatgtagttctagacacccaaggtattcatatggggttgatcagggcaatcaaactcaaatatgagttatgttgggattattgtattcgtcgtatcgtttatatacacagtttaggttatgatgttctgcctagttacatttttgggcaaattggatgacaaactggtgagttcatgtaagtaaactaaggctgttatctgaatatctctgatgtgttgaacacttggcaaaaacaagcaccttctccgttgtattgtttcggaacaattgaagcaatgaattatggaggtgtttagttgagg

SEQ ID NO: 3567 - DNA, 262 bp, Zea mays
  Clone ID: 700331905_FLI
ggtaaaattagctacgaagaatttgtagcgatgatgaagactggaacagattggaggaaggcgtcgcggcattattcaagagggcgcttcaatagccttagcataaagcttataaaagatgggtctgtaaaactgggtagcgagtgaggttgtagcttgctgccgatgctcttctcctccacgcattgtagtctgcctctcgggcccgctaagcagaaacccccttccgtttgctaatgattattttgtctgggatttaggt

SEQ ID NO: 3568 - DNA, 1374 bp, Zea mays
  Clone ID: 700331916_FLI
atataataataagctaatagcagcgccacgcaccgacaccaatacgccatgggttccatcatggagcaacgctgcaacaacgatccgcaggcgctgctcgacgctcagctcgagctctggcacagcacgttcgcgttcatcaagtccatggcgttcaagtcggcgctggagctcggcatcgccgacgccatccactgccacggcggcaccgccacgctcacccagatagccaccaaggccgcgctccacccgtccaagacaccgtgcctgcgcaggctcatgcgcgcgctcacagtcgccggcatcttcagcgtcgccaagaactcgtccgacgatgacagcgatcagcacgtctacggcctcactccggcctcccgacttcttgtcggctcgtcacagaacttggctccaacactgagcctcatccttaacaacgtcttcgtggccccgttccttgacctcggcacgtggttcgagagcgcgctggcagctacagacctgccgctcttcgagctgtcccaccggaagaacgtgtgggacgtcgtcggccacgacccgtccgtgagccagctcttcaacgccgggatggtcgcggatacccgcttcctcatggacatcgccgtcagggagtgcggcgacgtgtttcaggggatacgctccctggtcgacgttggcggcggccatggcgcggcggcgcaggccatctctgcggcgttccctgccatacagtgcaccgtgctggaccttgcacacgtggtcgccaccgctcccgcttgcgccgggctcagcttcgttgctggcgacatgtttgaggccattccgccagcgaatgctgtcttcctcaagtggatcatgcacgactggggtgacactgagtgtgtcacgatactaaagaactgcaagaaagctatacctccacgagatgcaggcggcaaggtgataatagtagataccgtggttggtgcagggcctccaaaccttaagaacaaagagacacaggtcatgtctgatctcttttttatgatcgtcaacggccttgagagagatgagcaggaatggaggaacatcatctttgaagctggtttcagtgactacataatcataccagttttaggtgttcgatcaatcatcgagctatacccctgaaatataatccagcttcctcagccggcggcctcatcacctacatgttgaatgctttggcgtgtggatctgtgtgtgtgttttttcctttaagaacagtgtgcatgtgtgtttaataaattggtatatatagttatatactcactaaaaggatggtttatgtatgcatgtatgcaagtgtttcaaccattattatgtctccaaagtgaagaagttgcgtttttcaattct

SEQ ID NO: 3569 - DNA, 2429 bp, Zea mays
  Clone ID: 700331934_FLI
gcaggcactgcacggtctggttcttgttcctgagcagttgagctgcgcacaccgacttcttttgcacaaggtacagcagcgcaggcgcagcggcagcccgccgctggatctctcccgaggctccggcgatggagcggtcctgctacttcccgctgcggtgggagagcacgggcgaccagtggtggtacgcgtcgccgatagactgggcggcggccgacggccactacgacatcgtccgccagctgctgcacctcgaccccaacctgctcatcaagctcacctccctccgccggatccgccgcctcgaggcgctgtgggacgacgacgcccgcttcgccgacgcggcccggaaccgcgcgtccgtcgctcgcagcctgctgctggagtgcgagtgcaggaaccaccgccccgccgcccccggcgccggggagaacacgctgctccgggccgggtacggcggctgggtgctctacgcggcggcgtcggccggggacgccgcgttcgtgcgggagctgctggagagggacccgctgctcgtgttcggcgagggcgagtacggcgtcacggacatgttctacgcggcagccaggggcgggagcgcggacgtgttcaggctgctgctcgaccacgccatgtcgccgaggtgctcgacgagttgccggaacggcgaagccagcgccaggcgcagctccgtgttccggcttgagatgatgagccgggccgtccacgccgcggcgaggggcgggagcgtggagatgctcagggagctgctcgaggagtccagcgtgtcgacgtatctcgacatccgtggatccaccgtgctgcatgccgccgctgggagagggcagctgcaggttgtcaagtaccttgtggcctctttcgacataatcaattcgactgataatcacgggaacacagcgctgcatgtagcggcctaccgagggcaccaacctgtcgtggaagccttggttgctgcgtctccatcaaccttgtcagttgtcaacaacgccggtgacacgtttctccactcggcagttacaggattcaggaccccaggattccgacggctcgaccgccagttggagctgatgaggtacctcatacgcgagagaaccgcggatatccagaagatcatcaacctgagaaacgacgcgggccttacagctcttcacctggctgtggttggctgcgcacacccggatctcgtcgagctactgatggccaccccgtccatcgacctgaacgctgaagacgctaatggcatgaccgcgctggcgctgctgaagcagcagctgcgctcagcgacgtccgaccggctcatcaagcagatcgtctctgccggaggggtcttgaactccagcatcctgagaacccggtcagccatcgcttctcagatcaagatgcagggcgggatcgcgagcagccccggcaccactttcaaggtatcggatgcggagatattcctgttctccggcatgggagcggcggagtctctgaggccaagctcctgctccagcaacgggaaggatgatgaccctactcacgcagacgcagactgcgccgagaaccgtggatcgtcggagaagaggctgagctccgcgagccgggccaaagaccgcctcaagatgatgctgagatggcctcgccacaaggacaagacgcccaagaagtcagaggacagcagcccgctggggtcgatcagcaggctgaacgagcacggggccgagacccctgctccgctgaggcagaagtttaccaagacgacggcgctcaacggcaagcggaccctagcggtgaagagctccaccccgagctcctcatccaccaagaagaagctcaacacgaagctcatccacggcatcatggaggccatgccacagctggcgccatctacggcgcggtccgcgtccccgacggacactttcctgaggtcctcggtatcgtccacgccgcagccgctggcgaagctgaaggacatctgcctcgacgacgagatctccatggtgacgccgcccgccggcaggctgaaggatagtgacgacgccatggaggacccctcgtgctccaacaactcgtccatggacgacggctgtggcgccgggacggcagagagcgcggcccggaagcacgggtgcggcaacgggaggctcatcaacatctgctttggcgcgcagggcctcaccgtggaggactcggcgagcgggcagcagacgagcaagatgttcaagcagcagtgcctcagggtgtcctgattgacggcgtggtgtctcgactacaacagcgtggtgtgattggtttggtgtctcgcgtgcagctatgtgtgcttgtttgctttgctccttgcacagccagcggtgaactggtgatccaatgaacttgtgcttgtgttaactgtgacgttgacgaatccacagctctttaacttcctc

SEQ ID NO: 3570 - DNA, 1218 bp, Zea mays
  Clone ID: 700331948_FLI
gcttcatcatcactccactagccagtcagctactggcctacagctagccgcctcctctcctctcatcccatcccatctcatctccgacaagcgaagcagagcactggcatgagcatggaccgcatggcgcggcgttccgtgtccttgctcctcgctctggctctcctggccgccgcggcgtcggcggactcgtggctgtacgagaagttcacgacggagggcaacgtgcgcgcggactacaacgcgcaggggcagcaggtgacgtctctgatcctgacgcagcagtccggcggcgccttcagctcgcggcagaagtacctgtacggggagttcagcatccagatgaggctgatcccgggcaactccgcgggcaccgtgacctccttctacctgtcgtcgggcgacgggcccgggcacgacgagatcgacatggagttcatgggcaacgccagcgggcagcccgtggtgctgaacaccaacgtgtgggccaacggcgacggcaagaaggagcaccagttctacctgtggttcgacccggccgccgacttccacacctacaccatcatctggaacgacaagaacgtcatcttcaaggtggacgacctcttcgtgcggtgcttcaagcggtacccggacctggcgtacccgggcgggaagcccatgtcggtgcacgccacgctgtgggacggcagctactgggccacgcagcaggggaaggtgaaggtggactggtccgccgcgcccttcgccgtctcctaccgcggctactccgccgacgcctgcgtgcccgacggcgacggccgcccgctctcctgccccgccggcaccgaccgctggatgagccgccagctcgacgccgccgagtggggcaccgtcgcctgggccaggcagaactacatgcactacaactactgcgacgacggctggcgcttcccgcagggcttccccgccgagtgctcccgcaactgattcattggtttgtttgttatccccgatccgttcgcgcggtcgccgtccgtcccacacagtgccctgccctgcccccccgacgatttcttgcttcctgttcctcatctaattaatcatcaatggtgtttgttcgtcaccgctgttcttgatggatggatgcacaggacagggcaggacagatgttgttgccttccattccatgtacattttgccgcacatttatacactactagtgcccttgaatgtttt

SEQ ID NO: 3571 - DNA, 1189 bp, Zea mays
  Clone ID: 700331949_FLI
ataatttccaagtcacttttctttgtgggagaggtcggtggaaatgattacaaccatttaatcgttagggataaatctgttgatgagctacatgaagttgttcctaatgttgttggtgccataagctcggccatcacggatcttataaatcttggagcaaagaagttagttgttccagggaacttcccaatagggtgcgtcccattatatcttgcaatctttcagagccaaaaagaggattactatgaggaacaaacaggctgcattaagtggctcaatgattttgctgagtaccataataagatgcttcaggaggagttggagaaactcaggaatcttcaccctgatgtgaccatcatttatgctgattactatggtgctgcattgaacatattccgtgccccactccagtttggtttcacagtcccattgaatgcgtgttgtggaagtgatgccccatacaactgttccccttcaatattgtgcgggcgtcctggatctacagtgtgccctgacccatcaaaatacatctcatgggacggcctacacttcactgaggcgagttacaaagttgtcattcaaggagtactaggggggtatgccaagcctcccctttcagaaacctgcaagggtgcggaattcaaagtttctcagcttcaccaatgtacagataatccaacaaacactgtatcatacgatgctttgagctcttttatttgatctgctcgtaaaagaagtgcatttagagttacagtgggcagcatagatgatgttgcaggaccgaacatcttggacactttctcaaagccgagaagagatccatcgatgtagggtcattcagttctacaatctacaatccacttggctgctgggaggaggagaaaaaatgggaggggagtttgtagtgcagaaatttgcgattgcttagtgcactactttgctctgctatgtttttcttagcagcttactgctgcaggctgtagaagggacaacgaaagttgacagtctctgcaggtggtcatactactatataggaacctagatcttttaaatcagctcctgagggaaatgtatgcagtacttgatatggtctcaattgccttttaacggatacaagcatatatacattgtagcttcattgattcaaattgtctcgcttgatttataatgtaaaagtattgttcgaaat

SEQ ID NO: 3572 - DNA, 1613 bp, Zea mays
  Clone ID: 700331973_FLI
cgcctcctcccacttctctctgccgccccccacaccccagccgcgccattgcccactgcattgcagactgtaagccgggaatccacttggattggatcgatccatcggaaggcgccagatgaacgcccggctgtcggcagagtaccagggcctggaggtgaaggtgcccagcctcttccggtgccctatctcgctggacgtgatgcgctcgcccgtgagcctctgcaccggcgtcacctacgagcgcgcctccatccagcgctggctcgactccggcaacaccacgtgcccggccaccatgctctcgctcccctccaccgacctcgtccccaacctcaccctgcgccgcctcatcgcgctctgggcgtccacggccgcgccctcctctccctcctcctcctcatcgcccgccgtcggccccacgccggccgccgcggcggccgagctcctccgccgggtcgctgaccccgccgcggacccctgccccccgctccggaagctcgcggctttcctctccgacgacgacgtggacgagttcgacaagaacgcgctggctcgggccggcggggccgccgagaccatggcgtccgtgctgcggcgagcgggcagggaggccgcggaggccgccgtgcgggtgctagcggccatcgcggcgtccgactgcatcgaggaggagagcaagaggcgcgtggccgcggcgctggccgccgacgcgccgtccacggccgcggccctggcgcgcgtgctgcggagcgccacctcgctcgaggcgcgggtggacgcggcgaggctggcggagtcgctgctccgcaatgcggcgccggccgcgcgggcgacggtggcggactccgaggagctgctcggcgagctcatccgcctcgtgggccccgcggacgacaagggcggcctcgacaggcaggccgtggcggcggggctgtcgtgcctggcggccatcgcggcgacgcgtcgggcccgtgccgagatggtccgcctgggcgccgtgcccgccgcggtgcgcatcctggaggccgacgccggttcccagagccaggcgctccgcgtgctggaggcggcggtcgggtgcgccgagggccgcgccgcggtttgcgagtccgcggggtcggcggtgcccgtggtggtgtccaagatgatgaagggcgggatggccggcgcggaggcggcggtgtcggtgctgtgggcggtgtgccaccggtaccgtgaccggcgcgcggtggcggcggcggcggcgtgtgagagcgggctcaccaagctgctgctgctcatgcagagcggctgctcgccggcggtgcggcagatgacgtcggagctgctcaagatcttcagggtgaacggcaagagctgcgtcgcagggtacgactccaagaccagccacatcatgcccttctgattctcaccgccatcggtgatacaacagtggaaccagcatttgtctgttacccttttccagtttcgatttttttttgttttgattcgttggaagtgcatacagtaggaaaaaatacagaatgagttctcttggagcaacacaaaacttgtatatgagtagaggattttggtagaaagaaatcaatggatgaaacaaattcagcttc

SEQ ID NO: 3573 - DNA, 663 bp, Zea mays
  Clone ID: 700331994_FLI
cggccgccgacggggcgctgggcgccgatgcgcgagtcctggggctccgtctggcgcatggacaccaaccaccgcatgcagccgcccttctccatccgcatccgcaacgagtccggcaagacgctcgtcgccaggaacgtcatcccggccaactggaggcccaacaccttctaccgctccttcgtccagtacagctagctagctagctggtttgcgcccctagttcaccacccaccactactaccaccgccacccactagactactgcttctgctaccaaatactacggcggaacggaacggctggttgccgccgccgccgtcgtccttggaaaggttgaggcgtctcttggtcatccgtatcgttaccgttgtcatggtcctttgagtcgttgcaaccctgattgcaagccggcaagggggaaaaaaccaacaaagccgtgtgggaaaatggaggaggcaggcgtacaatgtacgctctcccgcccactgttgctttataatctctatatcatcatcatcttcttcttctccattccgatcggtgattaatcgaaaagtatattgtaatgtataaacaccatttcctgtttcccggagctgagctaccctgttcacacccctgtgcagggttgaggctccgcatgttaattgttctttcgtc

SEQ ID NO: 3574 - DNA, 1731 bp, Zea mays
  Clone ID: 700332031_FLI
aaaaaatcaaacgagaaggaagccaccgctccccaatcgcctgtttgccttcccatcctcctcgtagatctccggcaccgggcaccatgagctcctactccggcgaccgctcctcctcctccttgcgccccaccaacacctctttcgactcctacaagttcgacttcggcatcaactcctcccgctcctccggctctcgccccctccgcgaccagcggccgggcgcggctaccaaccctccaacgaggcccaccaccggcgccacgtggatgcaccagcccgccagcgccaagccgtcgtggacccaccagccttcccccgccgcggcgtcggcgcccaccatggcggggcccggatccgggccaacctccatggtcggcgacatctttggccggagctggtcctccgccgcgccctcctctgggctcggcatccctcaggccaacaaccccggcctcttcagcgatctcctcggctccgcgctcggctcctcccgctcccagtccaacgcgccgctcagatccgccgccgcgccgcaggcatccaggccagccggtgagaagcccaatgtcaacgctagcagctctcccttctcgatgggcggcatggcgggcgcgctcccgaaaactacgggagcaccgatgggctccggtggatacggcgttggtggccggccgatgaaacccgtgggcatggctgcgacgcagccgatggggcagcagagggatccatttggctcaatagacccctttgccgcaaagcctgggtccatgaacgcggtgaagcaagccaattcggtcaagccggatcagggatttggagctttccagggtgtgaattccagtgtcgctgctggatttgggagcttccagagtactgatgctggatctggtggtttccaaagcgctggcacgaccacaccttctaactttacaccaccgccagcaccagcttcaatgcctactcctgtggctgcagcagttaactcaagcatggatcctctggataatctttttgcttcaaccacaagtgcaccgactgcagctgccgctagtaatggtgacagtggcggtgacatgtttggtgagatggatggttgggtcgatgtggaggcagagtttgctggtggtgatagtggtggcacaaccacagagctggatggcctgccaccgccaccatccggattgacaatatcagctgccaaggccaaagggatggatagctacaagggagggcagtatgctgatgctatcaagtggttgtcatgggctgttgttctaattgagaaatcagggaaagatgctgacattgttgaggtgttgtcttcaagagcttcttcatataaggaggttggtgagtacaagaaggccatcactgactgctcgaaggtgctggatcaagataaggataatgtctcagtgctagtgcagcgtgctctcctttatgaaagcacagagaaatataggcttggtgccgaggacctgcgtttggttctgaagattgatcctacaaataggcttgccaggagtacaattcaccgcctgaacaagttggctgactagggatgtctttctagcgccctgatgtaatattgtactaccactgtactgcatccttctcacatgagatctgtgagttatttgaactctttagtctttattactatacttgtggctttgggggaatagtttgcaattgtgttgttataaagtatgaaatacgaatttacat

SEQ ID NO: 3575 - DNA, 662 bp, Zea mays
  Clone ID: 700332036_FLI
gagaagaaacctccaaacacctacctctctacgaactacctgccgccggaaaaccctagagcgctcgaccatggatccgcagcagccggagcctgtcagttacctctgcggagattgcggagctgagaacaccctgaagcccggagatgtcatccagtgccgtgaatgtggctaccgcatcctctacaagaagcggacccgccggaacgtttaatcgacgttccaagttactagtgggccggccttcctgggctttcgcttccaaagccgcccagcccagccgtcagccagtgtcctcactcctcagccgtcgtcgctgcgtcctcactcggtcactcctcagccgtcagccagtgctgaaggtctcccggtcagccgcccagttgcgcctgcaacagttgtccaatatgaagcgcgctgaagagtgaagacaagggaaaacactgaagatggttgatctattactcgccacattacctatgtaaacagtcttctgggggaaatgaaaatgtcagacttaacgtttgtatgtcgtgtgcctcctttgaacctgagctgtataatttgtaacgcttgaactggggactgatttgagaactgagacactgcagcaatatgttgatgggtcctaagtggcgaatctaatgcatgcgtgttatgcc

SEQ ID NO: 3576 - DNA, 827 bp, Zea mays
  Clone ID: 700332080_FLI
aagaacacgaaccggcagttcagcttcctgtccgagacctcggggaggcctgccctctcggctctcgcgttaccgatcgaggcgtggagagaaatggcggcggcagcagcaacaagagcaggagcgtggggcgtggcgtggctcctggcggccaccgtggcggcggcgctgctggcctcggcgtcggcgcagtccgggtgcacgaccacgctgatcagcctgtacccgtgcctcaactacatcagcggcaacgtgtcggcgccgccgtcctcgtgctgctcgcagctcgccagcgtcgtgcagaccaacccgcagtgcctctgcgccgcgctcagcggcgactcctcgtccctcggcggcgtcaccgtcgacaagacgcgcgcgctccagctcccccaggcgtgcaacgtcaagaccccgccggcgagcaagtgcaactctgctggcggcggcagcgctccgggcgccgcgacgccggccacgccgtcggccggcgtaccatcgaccgcaggaaccggcactggatcgaaggcgacgccgacggccccgttcctgacgtccggcgccgcgtcgacccggggggcggtgagcctggtgctggcattcgcgactgttgccgtctacggcatctcggccgcgtgacaatcttggctcatctagctctgttgcccacggcgtttggggatacagacattcgacattcaggatttgtggtgtcactgttccgcattggttgagcattgtcgagtatagataattgggcgtcgcatttgtattattgcttgtatttggctgtcacaataaagaacaccgttttttccttgttc

SEQ ID NO: 3577 - DNA, 1548 bp, Zea mays
  Clone ID: 700332110_FLI
ctgcattttatccttcctggtgctctgtccacctctctcgctctgggccgccgccgccgccctaagccacgtgctgaggctttcgttggtctcttcgccggcgacgagcacccagttctgtagaaatggctgatggtgaggacatccagcctcttgtctgcgacaatggcactggaatggtcaaggctggttttgctggcgatgatgcaccaagggcggttttccctagcattgttggccgtcctcgccacactggtgtcatggtagggatgggacagaaggacgcatatgttggcgatgaggcacagtccaagagaggtattcttacgctcaagtacccgattgagcacggtattgtgagcaactgggatgacatggagaaaatctggcatcatactttctacaacgagcttcgtgttgccccagaggagcaccctgtgttgctcaccgaggctcctttgaacccaaaggccaacagggagaagatgacccaaattatgtttgagactttcaatgttcctgccatgtatgttgcaatccaagcggtgctctcactctatgctagtgggcgtactactggtattgtactcgactctggtgatggtgtgagccacactgtgcccatttacgaaggatatgcccttcctcatgccattcttcgtttggatcttgctggtcgggacctcacagactccctcatgaaaattctcactgagaggggttactccttcacaacctcagccgagcgagaaattgtaagggacatcaaggagaagctagcatatatagcccttgactatgagcaagagttggaaactgccaagaacagctcttcagttgaaaagagctatgagctacctgatggacaagtaatcaccattggtgcagagagattcaggtgccctgaggtcctcttccagccgtcgatgattggtatggaggctgctggaatccatgagacaacatacaattcaatcatgaagtgtgacgtggatatcaggaaggacctctatggtaacattgtgctcagtggtggttcgactatgttcccgggtatcgctgatcgtatgagcaaggagatcacttcccttgcaccaagcagcatgaagatcaaggtcgttgcaccgcctgagaggaagtacagtgtctggataggagggtcgatcctagcctcgctcagcactttccaacagatgtggatatcgaaggaggagtacgacgagtctggcccggcaattgttcaccggaagtgcttctagggtttcacaagttcctcgtcgttacctagtctcaaattatgtcccctccatttctcgagatatgtgtggcagatttgcatgatacgtttgtttgtttccatcggacctgaagtcttcttggggataggctcccccctttgtatgttgtggctccaatccatgtgcgagcacgctgtgtctgtcgtgacacctggttcgtgagatgggttgtcaaacttgattggtttgttgtgcgtggctggaagagctgatagttatatatttggcttggactgtgccgcttgtatgt

SEQ ID NO: 3578 - DNA, 414 bp, Zea mays
  Clone ID: 700332153_FLI
atctgtaccggcagatcctcgacgagatcgaggccaacgactacgacaacttcacccggagggcctacgttccgaagacgaagaagctgatggcgctgcccaaggcgtacctgagatcactggtggtgccctcctcctcttctcaggctgagagccggagacgctattccaccctaacatagaccggtctctctctcactgtcggtacatagcagcagcagcagtgaatgatcgatatgatgtacaaatttctggccaggccacatgcatgagtagtacgtacatggttggcaattggcatgtggtggtggtcgatcggtgttacatacttgttgtactcctctgtactatacaaaacatgccggagactcgcgcgtaagtgagaagcgataaatggagatagatgtttgtctc

SEQ ID NO: 3579 - DNA, 2358 bp, Zea mays
  Clone ID: 700332166_FLI
gctggagattgcagttcatgtgtgggagtcatgttagagcttgcacggggagtggcccagtgggcacatgggtttaagagtggtatcttgtttttatttaatactggagaagaagagggtcttgatggcgcccatagttttataactcagcaccactggagaaattcagtaatatttgcggttgatctggaagctatgggtatcagtgggaaatccacactcttccagggtactgaccattgggcattggaaagctttgcagctgtagccaaatacccatctgctcagatagcttcacaggatgtttttagttctggcgcaataaaatctgctactgattttcaaatatatgaggaagttggccgtcttcctggacttgattttgcatataccgatacaacatctgtgtatcatacgaagaatgacaagatggcgcttctgaaaccagggtctcttcagcatattggagataacatgcttgctttcctactccattctgcagcatctccaaaatttttgaaagatgcacaacaaaggaagcaaggaaagacagagcaggatagagctgtttacttcgatatcctgggaaagtacatggtggtctatccgctgcgacttgctaccatgtttcacaactcaatcatattgcagtcacttctaatatggggaacatcattgcttatgggtggacaccctgcactggtgtcctttgcaatatcatgtttgagcatcattctaatgtggatattttctatctgcttaccagttgtggtagcatttgctctgccctatatgtgtccgtttcctattccatatgttgcaaatccatggttaactattggcttatttggttcacctgcactgcttggagcatttattggtcagcatattggatttattctcctgaagaggcatcttcgacgcgtgcattccaaagcaaaaacaggcataactcctagcatgatagaaaatgttactgacctggaagctgagaggtggatttttaaatctggttttgtccagtggttaatagctctgatactaggaacatatttcaaggttggatcatcgtatatagcactcatctggcttgtttctcctgcttttgcatatggttttttggaagctactctctcccctgttcggctacctaaacagcttaaggttgtcacgttggttgtgggtttggttgcaccagttgtgtcttctgctggtttggctgttcgtatggcggatgtaattgttggaagtatagtacgtattgacaggaatcctggcggactaccagactggcttggaaatgtaatagtttcggttgccattgctgttgtcgtttgttccacgtttgtgtatctgctttcatacattcatatctcaggtgataaaagaattctgggtttgctattatccttatcctttggtctttcaattgctttggcatcaagtggcattgtgccagcatttacggaggatgtcgctcgatctgtaaacgttgtacatgtcgtcgataccacaggagtacatggcgggcatatagaaccagtatcctatatctctttgttttccaatacacctggaaagctgacgaatgaattagtggaccttggaggcgaagaattttcttgcggaaggaacatgactactgacttggtaacatttacagtgaagtatggctgttggagttacaaagagagcagtaccggatggagcaggtctgaggttcctgtgctccttgtagaaagtgattcggttataggtggtgctcgacagacagtagtatcagtggataccaagtcatcgacgcgttggacgcttggaatcaacaaagatggaatcgatgacttcacagttcaagtggattcggagaagatagtcctacctggtgataagagcgagatagatgggtggcatacaatccagtttgcagggggcaagaactcgccgacgaagttccagctgacgctatactggtcgtctagcaaaccatctgagagagaagctaaacaagcagcggacgctcctttgctggtgaaactaagaacagatgtgaatagagtcacaccgcaggtggcaagggtggtggagaagctgccacggtggtgcacgcccttcggcaagtccacctctccgtacacgctagctttcttgacggccctccgtgtcgatatttagtcagtcagcagcatttgtttcccatacataggcgtccagtccagcacctttcgttttgaactgtattttagtttgatagtagcaagttataggcccatagaattgtacacaaaagctgccaagggcggtctggtgtaaacgtgctttgcacttgctctaatttgtcctgtatcaaagtttcagatt

SEQ ID NO: 3580 - DNA, 1933 bp, Zea mays
  Clone ID: 700332174_FLI
cgccagaaaagaccctgacagtccgacacccgcaagccacaaagtgcagcctcgttgctacaggaatgctgagaaatgtctgaccttgccggaaagcgcaacctgcgcagtggccgcaactgccaccgcaagcacgtcgaggacgggtaggttcatcggtctcgtcgccgggttttcaggtaaagtcaggtcaggccaactctgtcgaagaaggaacatcgaagaaaggaaggaggtgggcggcaatggaggatgcgatggcggcggacgggaagagcgtgctgcaggggcggtacgagctggggcgggtgctggggcacggcaacttcgggcgggtgcacgcggcgcgggacctgcgcacgggccgcagcgtcgcggtcaaggtggtggccaaggacaagctggagcgcgcgggcatggcggagcagatcaagcgggagatcgccgtcatgaagatggtgtcccaccccaacatcgtggagctgcacgaggtgatggccacccgctccaagatctacctcgcgctcgagctcgtccgcggcggggagctcttctcccgcatcgcgcgcgcggggcgggtccgggaggacgtggcgcgctgttacttccggcagctcgtcgccgcggtcgacttctgccacggccgcggggtgttccaccgagacctgaagctcgagaacctgctcctcgacgaggtaggcaacctcaaagtggcggactttgggctcagcgcgctcgccgggcacgcgcgctccgacgggctgctccataccgcctgtggcacgccgtcatacgtcgcccccgaggtgctcggcgggaagggctacgacggcgccaaggcggacctctggtcctgtggcgtcatcctctacgtgctcctcgttggcagcttgccattccacgaggacaacctcatggtcatgtaccggaagatgcagcgcggcgagttcctctgcccgccgtgggtctcagcggacgcccggaagctcatcggcgagctgctcgaccccgacccgagcacgcgcatcaccgtcgctcgcctcgtcgagacgccgtggtaccggaagccgttgcccgtcctgccgccgctcaacctcaaggagccaaccccggacgcgcgccgcgccacctctgacaaggaagagcccgaggtgctgaacgcgttccacctcatctctttctcggagggcttcgacctgtccccgctcttcgaccagggccgtggcggcggcgtagggaggtctagcgcgggcggcatccgtttcgtgacgcgcgaggccgccagcagcgtggtctcccgtctggagtcgctggtcaccggccgcggagccaacatgcgcgtgacaaagagcggctcgcggggcgttcgtttggaggccgtgtcgcgcgggcgctcgggggcgcggctggcagtggccgcggagatcttcagcgtggcgccgtcggtgctcctggtggacgtgaagaaggacggcggcgacacgatggagtaccggtcgttctgtagcgaggagctccggccggcgctcaaggacatcgtctgggcctccagccaggacacaccgggcgccgcttgatgtcgtcgctgtcgctcctgccaccattattgtccttgcccatcaattgctgttggtgtccgtgtagggggggtcgtgctcgtgcattattgtttggtgacgaagtgatgtttgtttgtcgtttgccactctcgtagttggtttctgctgtggtgcagcggctgctggcagttgcagttgggctgttgcccgcggggcgcgagcaaagcagaatcagcgggaactagcattcgtatcctgcatgcacgcccataccgtgtcagctctgaagtgggaagaactgtaacaagtagtagtacgaatgtaccagggtgatgtgctttcgagtcacttgtgtatatattcatttttttatc

SEQ ID NO: 3581 - DNA, 1191 bp, Zea mays
  Clone ID: 700332178_FLI
ggacctgatcgcgctggtgcagacagggtccgggaagacgggcacattcatgctgcccattctgcagaagttgctgagcaaccgccaggccgagcagtctttcttcgcttgcgtgctctcgctaatgagagagctggttattcagatcgtggagcagtttgaggcgctcggatcaactattggtttgtgttactcagtgttgtactttatctatgttattgatgcggcatgggcgacgaggagaacattggggagatcgaaggagcgattgggattgagaatgggaacacaggggaagcgaggaagtggtgcggtgttgtcaccagcagttatggcaggatcgccggtcaccaccgtctaagggaaactcatctacttgggagatttattctcgatgcttgttttcggcaaggtcttgaatcggtgtgcaatacatcaaaaggttgctgagggttcaaaagatgttggtgcttctcgaattattggcattgacatcaacaataaaaagtttgacgttgcgacatcaaatgttcctgcaatagtggcatggacgaccagttcctgggtgaagctgtttcgagcaacaacggcatcgaaggtggcaaaaggttttggtgtattagatgctgggaaagctatgctgggaaagctatgccatgaaagatatttgtagcagtgttacatgatggcatcaagtgctgggcaaatatttattagtttgtggtttcacttctatggaatataggagtcatgattttatgcatttgatcggagaccacattaactagaggggttgtgatcctgtagatgaattcccgtacatgaacttgcctcaagactaccttcaacattttgagttgtacgattctgttagtgtcgagcaagccaatatctttgatgtgggtctgaagatggtagatcgagtggtgactgttagccgcggctacttgtgggagctgaagacagtggaaagtggtcggggcctccacgacatcattcgttctaacgactggaagattaatggcattgtgaacgacatcaatgcactcgactctaactatttttgtatcagttagcttcctcatagcctgaaatagtagttgcagagattttgagtgtcaatgtttaaccaccacctttatgacctgttgattggattggtgaactgagtgcaaatggtgtcaattcacc

SEQ ID NO: 3582 - DNA, 1376 bp, Zea mays
  Clone ID: 700332204_FLI
cggcgcgcccacaaaaacaccacacgtacacgggcgcggcgcggagaccgaccaccacctcttcctccggttgcctccgccctcgggcctcgccttcgctccatcgtccccgtctccatcctccaggaccggcaaccccacgtagcgcgacagctcgtcgccgtagtccatggcggctacggaggtgtactcgccgaccacggcggcggcagcgcagcagcagcgggggaaggcggcatcgcaggcgtggcgagcggtggtagggtggatcggcttcttcctccaagtcctgcttcagatcctccggggcacgccctcctgcgcacagctcctgtccttcgttggtttccgctatccgctcctctccggacctgcggcctcggagccgttgccggaggtggccttcatgccgctccactccgagatccctgctgacgcggcgcctgccccgaaacctgcgtctgagcccctgggccgcctcacggtagtgcttgacttggatgagactttagtttctgcatatgaatcatctagtcttcctgccattgtgcgcacacaagctgttgaagcaggattacattgctttgatatggaatgtatatcgtctgataaggatgttgaaggcaaacaaaaggtcaatcatgtgactgtttttgagcgccctggtttgcatgagttcttgcggaaaactagtgaatttgcagaccttatcctttttacagcaggtttagaaggttatgctagacctttagttgaccgaatagatgttcacaatagattcagacttcgtctctatcgcccatcaactgttaccacggaatatagagaacatgtgaaagatcttactcgcgtgtcaaaagattttggcaggattgtcattgtcgacaacaatccgttcagtttcattcttcagcctttgaatggaataccttgtgttccattttcagctggacaacattctgatgatcagctcatgacggttatatttccactcctgaagcatctttccctccagaaagacgtcagacccgtattgcgtgaaagatttcatatgccagaatggttccaaaaccatgggatcccccaagttagtcaggctgtgtaagttttgctgccgcacaatggaattgttttgatgaaggctggagtgcctactatgctataagcccttaaggccatgttcgttcaatccctatggattagcacaaaacgaacagggcctaagggagagcacttgtacattattatcaatattcacttagggttcttgataaaaccgagtcgctgttcatatggagttgtcacacccgaagataagaagattgtaatctagcatgacctcagatttaaatctgtgtagtggagcattttatatc

SEQ ID NO: 3583 - DNA, 1195 bp, Zea mays
  Clone ID: 700332215_FLI
gcgttattttgccggtaattgattgatagatggcgtcggagaagagcaagatcctggtggtcggcggcacggggtacctgggcaggcacgtcgtggcggcgagcgcgcggctgggccaccccacctcggcgctcgtcagggacacggcgccgtccgacccggccaaagcggcgctgctcaagaccttccaggacgccggtgtgacgctcctcaagggcgacctgtacgaccaggctagcctggtgagcgcggtgaagggcgcggacgtggtcatctccgtgctcggatcgatgcagatcgccgaccagagccggctcgtcgacgccatcaaggaggccggcaacgtcaagaggttcttcccgtcggagttcggcctggacgtggaccgcacgggcatcgtggagccggccaagtccatcctaggcgccaaggtgggcatccgccgcgccaccgaggccgcgggcataccctacacctacgccgtggccggcttcttcgcgggcttcgcgctccccaacatcgggcagctcctcgcccccggcccgcccgcggacaaggcggtcgtcctcggcgacggcgacaccaaggcggtgttcgtggaggagggcgacatcgccacgtacacggtgctggcggccgacgacccgcgcgcggagaacaaggtgctgtacatcaagccgccggccaacacgctgtcgcacaacgagctgctgtcgctgtgggagaagaagaccggcaagacgttccagcgggagtacgtgccggaggaagccgtgctcaagcagatccaagagtcgccgatccctctgaacatcatcctggcgatcgggcacgcggcgttcgtgcgtggggagcagacgggcttcgagatcgacccggccaagggggtggacgccagcgaactgtacccggatgtcaagtacaccaccgtcgacgagtacctcaaccgcttcctctgagcctgaggtctcaacaaacaggacgtcacgtacggccttggcgcgcggggccatgatgtgtggagtgtggacgtcttcatcgtcagctgctagtcgctagcgacgacgtgccaacctaaacatcactagcagcataccgtagtgtacgctacggtagaaatggaaagacaatatgttttctaaataataagatagattaaggttcatggcaaaagagatttatgatgagttatatc

SEQ ID NO: 3584 - DNA, 1577 bp, Zea mays
  Clone ID: 700332227_FLI
cgaagagtgcctatgctccgtatctggaggagtcactgaagattttgatccggcacagtggttatttccatgaagatgtcaggctgcaggcagtcatatctttgaaacatattctaactgcagttagggcaatacctcctgcacatgctgatgtactagagaaacagaaggatgtccttgatactgttctgaacatctacatcaagactatgacagaggatgacgataaagaggtagttgcacaagcttgcatgagtgtagcagacattgtgaaggactgtggttttgctgcaattgagccttacatgctgaggcttgctgaggtaacactggtccttttacgccaagaatcaagctgtcagcaagtagagtcagatggtgaggatgatggcgacattgaccatgatgaagtcctcatggatgcagtttcagatcttttgcctgcttttgcaaaagtgatgggatcttattttgatcccatatttgcaaaattatttgatccgttgatgaaatttgctaaatctccccatcctccccaagataagactatggttgttgcaaccttagctgaggttgctcaggaaatgggtgctccaatatctgcttatgttgataagataatgcctttggtgttgaaagagcttgcatcatctgatgctactaataggagaaatgctgctttctgtgctggcgagatatgcaagaatgggggtgctgcagcactgaaatactatggtgatatacttcgttctctgcataatttgtttagtaactcagaatcagatgatgcagtaagagataacgctgctggtgctattgctaggatgataatggtgcagcctcagtcgattcctctcaaccaggttcttccagtttttatcaaagctttgccactaaaagaagatcatgaagaatcaatgactgtctatggttgcgtctgcggtttattattatcatcacatccccagatcctccctctggtgcctgacgtcatacatgtctttgcccaagtggtggtatccccagatgagagcgatgaagtgaaaacaaatattggcaaggctatttctcacttgatatctgtctatggccagcaaatgcagccaatactgagtgcccttccaccagcccatgcaaacgcgctggcttcatttgcgagtagaagatgacctcggaggaccagcttttctttggttccttgttctgcttgagtttgttttggttttgtcgacgattgccattttctgaggatctggtcacatggatcaggccagatggagtgcttgcattgcacattggcaagggcgagcggagttgtcaggttggcgcatgattgattatatggtgagcttggtttctctttgagatacacagttgtgcttgctttggagccctgtacggttaaaggcagaccttagtcgacagcgcatctgtgagtgcctgcctgtattcaggttccggatttggttatttatgctcttgttttttatttttttgcctgtatttgcaattcattgattgctgttgtatatagaagagagttttaaatagagagaatgtacgactctgcaactggc

SEQ ID NO: 3585 - DNA, 1177 bp, Zea mays
  Clone ID: 700332259_FLI
agctgatgaacgttaaggatctcacattggctcatgttaagagccacttgcagatgtatcgaacagtgaagggaacgacggcagacagatcatgtgctgcaggccatgtccagatgagagacatgggctttctgcacaggggttgtgaactgaatggcttcgaagcgtttagcaacggtacttctaatgctaccgccaataatagaatgcaggcagctgccgggtcgccggcagggaagcatgctgaggtagcctggttcttgcggccacccttggcacaccagagtagtggtggtggtggtggtggtggtggggcggtgccgcttccgctgccgctgccctgcccctacctcatgtctgcccaccacaaccgctacttgctctcacagaatcagggatggaggaccagaggcgcgcatcagcaagacgctgccgcccccccgccgctcgtcctaggccagcaggacagtgcgcggcgtctgcatccaggcttccccgacacggccatcagcagcagcagaccgtcatcctggagcgcaggtgtggcaagccgctggtcgtcgacggcggcggcggcgccttcgccgtcaagtggcaggagtagcatcagcagcggcacggaacagccagcagcatgcagctggacgatgatgacgacgaacaagcagaagcagcagcagcagccgccgtcgacgtcatcatcatcaagggtcgtcgcggtaccgaacctggagatgagcctggggaggcaggggtggcaacacgacctgcaggatcaccatccgcagcagcagcagcagcagcgcagcggggagtccacggcgccaaaagagctgaccctcctcaagtgcttgtgaaataataatgatagctaatacttgatcggctaataatcacttatataattccaccgtcgagatgagcttgcgagaggtgttcaaggcttggaagcaaattatcgaccgcgacgttagctagagacgacgttgtactcgtttggtgctaccggcttcacgtacgtagttgttttctactcctcccatctatatccattattagctatatatttagcttcattttctggtatatgcatgtaatttgagctgatgtggagacgacgactgttagaaataaacgagctacctttctcaatatatatacggtgactaattttttt

SEQ ID NO: 3586 - DNA, 846 bp, Zea mays
  Clone ID: 700332274_FLI
gcaccatccgaggctcaagcagggaagtgatcatcatcatcatcagaagaagatgtgcccaaccaagaaggggatgaccggagagccgagctcgccatgcagctcggcatcagcctcgaccttaccggagcaccaccagacggtgtggacgtcgccgccgaagcggccagcggggcggaccaagttccgggagacgcggcacccggtgttccgcggcgtccggcgccggggcagcgccgggcggtgggtgtgcgaggtgcgcgtgccggggaggcgcggctgcaggctctggctcggcaccttcgacacggccgaggcggcggcccgcgcgcacgacgccgccatgctcgccctcgccggcgcgggcgcctgctgcctcaacttcgccgactcggcctggctcctcgcggtcccggcctcgtgcgccagcctcgccgaggtccgccacgcggtcgcggacgccgtggacgacttcctgcgccatcagctggtcccggaggacgacgccctcgcggccacgccgtcgtcgccttccagcgaagacggcaacacctctgatggcggggagtcatcctctgattcctctccgcccaccggggcctcgccgttcgaatttgatgtgttcaacgacatgagctgggacctgcactacgcgagcttggcgcagggattgcttgtggagccaccgtccgcggtcacggcgttcatggacgaaggcttcgccgatgtgccgctctggagctactagagactgaaaatttccgtttctttccttggcctctggcgcctaattttggcagtgtaaaacggttacttattttggtaatgagatcgatcaagtttgcg

SEQ ID NO: 3587 - DNA, 1306 bp, Zea mays
  Clone ID: 700332286_FLI
gcagagaactcagagctcttcgtgccctcctgcaagcgccaaggaggaagagaagtgtgcgtagttccatagacccctgacaaatcagcgccatcatacaacaccagcaactgttggtttagttgtaaatctgccttgcagccgtattatctgtatcaccgtttttgtgtcgcgatggctggcctatctttggaacatccttgggcgttcgccttcggtctcctaggcaacgtcatctccttcatgaccttcctggccccgataccgacgttctaccgcatctacaagagcaagtcgacggaaggtttccagtcggttccctacgtggttgcgctgttcagcgccatgctgtggatcttctacgcactgatcaagtccaacgagaccttcctcatcaccatcaacgccgccggctgcgtcatcgagaccatctacatcgtcatgtacttcgtctacgcgcccaagaaagccaagctgttcacggccaagatcatggccctcctcaatggcggcgtctttggggtcatcctcctgctcacccttctcctcttcaagggtagtaagcgcgttgtgctgcttggctggatctgcgtcggcttctccgtcagtgtcttcgtcgcgccactaagcatcatgaggcgcgtgatccagacgaagagcgtagagtacatgcccttctccctctccctctcgctcaccctcagcgccgtcgtctggttcctctacggcctcctcatcaaggacaaatacgtcgcgctaccaaacgtccttgggttcatcttcggcgtggtccagatggtgctctacgtgttctacatgaacaagacgccggtggcggctgccgtgggcaaggatgccggcaagcttccctcagctgcagacgagcacgtcctcgtcaacattgccaagctcaaccccgccctcccggagaggacctccgggatgcacccagtcacccagatggcggccgttcctgccaggagctgcgctgctgaagcaaccgcgccggcgatgctgcccaatagggacgtggtcgacgtcttcgtcagccgacacagccccgctgtccacgtggtctagcctctccatcatcgcaagcaagcatgaatcgagtcgagtccgaacgcataattaagcacccaatctattggatatataaatacgcgcgccccaacatgtgcgccatatagcagtttgttccaacccttagctttgtttaattctcaaatatgcaattcaagtaatgtactttcatgcaaccaggaatttcattttcccctccaaaataaccataagaattttctat

SEQ ID NO: 3588 - DNA, 1161 bp, Zea mays
  Clone ID: 700332440_FLI
aagcaagcagcctaaaaaaaccgtatcgtctcgcctgttcagtttccttctcctcttcccgcagcccggtttgccgaccaggttccaccgttccagagtagccaagcgaatcccgtgtctggttcgcgcgatggcggaggagcagtccaacccccagcaccagcaagcggaggagagggaggttatggtggagcagcagcagccgaggagggccccgaagctgaggtacctggacttcgtccaggtggcggctgcccaggccgcggtgtgcctcgctgggctctacggcctcgccaaggaccacgccggcccgctccgccccagcgttgacgccgtcgagtctgccgtcaagggcgtcgttagccccgtctacgaccgcttcggcggcctgccgctcgacgtcctcgccttcgtcgaccgcaaggtggacgacacggtgcacgaggtggacaagcacctcccgggcgcgctgaaggcggcgtcggcgcatgtctacgcggtggttcggggcgtgccggaggtggcgcgcgagctggcggccgaggcgcagcggtcgggcgtgaggggcgcagcccgtgcggcgctcgcgatgacggagccggtggcgcgggacgtgtacggccgcgtggagcccgtggccaaggacctctacgtgcggtacgagcccgcggcggagcacctggccgtctccgcctggcgctcgctgaacggcctgccggtgttcccgcacgtcgcggagatcgtcgtgcccaccgccgcgcactgggccgacaagtacaacagggcggtcgcagccgccgcggagcacggctacgcgggggccaagtacctccccgccatccccaccgaacgcatcgccaaggtgttttcgtcggcgccagaggccgagccgctggcagagggccagtagtgtgtgtgtgtgtgcgcgcgcgcgcgagctcgtctttgccggtggtgactctggatttggatcaccttccgaactgaactgaaaataaggaagcgtgaatccgggggccagttaaagatggtggtatggtatggtagcggcgttgtactagatgcgtgatgggacgatggttacggaccatgatgatgacgctgtgttccatttagctctctgctgcgtgcttttgtataaaagaagtggttcgatgtcgc

SEQ ID NO: 3589 - DNA, 1814 bp, Zea mays
  Clone ID: 700332483_FLI
aacccccgcacttaccaagagagagaaaaagcgagaggcgactccacgcgtctcgtctcgtctcgtctcgtctccctctctctcgtccggtcctccctccccttcctgaggcgttccctctctctcctcccctttcctctgctggtctctactctcttgtcatcgcacccgtctccccgctctgactccgtcccgagcggccgactccgcccgcgccgccgccgccgccgcctcgtcccgatcgacccccgaatcgccggaaaccgtggacttcgcgaggttgtgtctttacctccgagcggtgtagggaatataacagggtgacagctgaattgcagaaaaaaggaggacatttggttgttgcatgatggtggaaggccccaatttcgctggcctgattggtggtcatgacaatggtgggaatttttgcgacatggcatactaccggaaactcggtgagggctcaaacatgtcgatagatagccttaacagcatgcagaccagcacgcatggcggctccattgcaatgtctgtggacaatagcagtgtagggtcctgcagctcccatactaggatgctcaatcatcctggcctcaagggacctgttgttggcaattactccgtcggtgggcacagtattttccgtcatggacgggtgtctcatgccttgagcgatgatgcgctagcacaggcgttgatggacccaaggtacccgactgagacactcaaagattatgaggagtggacaattgatttagccaagctccacatgggaatgccctttgcacagggcgcctttggaaagctctacaggggtacctacaatggggaagatgttgccattaagcttttggagaggccagaggctgatccagagagagctgggttaatggagcagcagtttgttcaagaagttatgatgcttgcaaccttgaggcaccagaatattgttaaatttattggagcatgcaggaagccagtggtttggtgcattgtgacggagtatgccaagggtggatcagttagacagtttctagcgaagaggcagaataggtcggttccactaaaactggcggttaagcaagcattggatgttgcaagggggatggcctatgttcatggtcttgggttcatccatagggatcttaagtcagataacctcttgatatctggtgataaatctatcaagatagctgactttggagtagctcgcattgaagtaaaaactgaggggatgacacctgaaacgggaacctaccgttggatggcaccagagatgattcagcataggccatatgaccagaaagttgatgtctacagctttggcattgtgctgtgggagctcataactggcatgctcccttttgctaacatgacagcagtgcaagctgcttttgctgtggtgaacaagggtgtccgcccagctataccccaggactgcctgcccaccctcggtgagatcatgaccaggtgctgggatccaaatcctgatgtccgtccgccgttcactgaagttgtgaggatgctggagcatgctgaggtggagatcctgagcactgtccgcaaggcccgatttcggtgttgcatctcccaaccgatgaccaccgactgaatcaaacagaagagagtcgaaaagaactccatgcaagcataattgagtaaatttatcttgtgtccagacttcgctcagctgaagtagaaagcacacctgagtggctgagtgtatggccgtgtgtgtgtatactcaggtgtaagcatattgtctttgaaatattcctgccattagaaatatacctagttcgcggtttcagact

SEQ ID NO: 3590 - DNA, 987 bp, Zea mays
  Clone ID: 700332517_FLI
tggagcaggagctggaccgccgcttccgcctgtaccgcttctgggagacgccccgcgaggagttcctccgcgcgcacgcgggcgccgtgcgcgccgtcgtcggcaacgccagctacggcgccgacgccgcgctcatcgacgcgctcccggcgctcgagatcgttgcctccttctccgtcggcatcgaccgcgtcgacctcgccaagtgccgcgaccgcgggatccgggtcaccaacacccccgacgtcctcaccgacgacgtcgccgacctcgccgtagggctcgccatcgccgtgctccgcaggatcccgcaggccgaccgatacgtccgcgcggggctctggaagtccaggggagactacaccctaaccacgcggttcagcggcaagcgggtgggcatcatcgggctgggcaggatagggcaggcggtggcgaagcgagtggaggcgttcgactgcccggtgagctaccaccagcggacggagcagcgggcgacgtacccgagctacacctactacccgtcggtggtggagctggcggcgaacagcgacgtgctggtggtggcgtgcccgctgaacgcgcagacgcgccacatcgtgagccgcgaggtgatggaagcgctaggccccagcggcgtgctgatcaacgtcggccgtgggccacacgtggacgagcgcgagatggtggcggcgctggcggacgggcggctcggcggcgccgggctggacgtgttcgaggacgagcctaacgtgcccgaggcgcttctggggatggacaacgtcgtgctgctgccccacgtcggcagcggcaccaacgagacgcgcaaggccatggccgacctcgtgctcgggaacctggaggcgcacgtgctcagcaagccgctgctgactccggttgtctgacgtttccttgtttctattacgaaataacaagcgcctgcgcctgacagcgagtggggattaaattcaaaatgttttgttttgattt

SEQ ID NO: 3591 - DNA, 914 bp, Zea mays
  Clone ID: 700332560_FLI
ggaagagctccattgaactgggagacaagagtcaagatatctctggacgtggcccatggaatcgcccaccttcatgccgagggaggagggaagttcatccacggcaacatcaaagcatcgaacgtcctcctatcgcagaacctcgacggctgcgtctccgagttcggcctggcacagatcatgaccaccccacagaccccgccgcggcccgtcgggtaccgggcgcccgaagtcctcgagaacaagaaatcgacccagcagtccgacgtctacagcttcggcgtcctgctcctcgaaatgctcacgggaaaagcccccctcaggtctcccgggcgcgaggacccctccgtcgagcaccttccgaggtgggtgcagtccgtggtccgtgaggagtggaccgccgaggtcttcgacgtggacttgctacggcaccccaacgtcgaggacgagatggtccagatgctccaggtcgcgatggcgtgcgtggccgctcaccccgaggagcggcccaagatggaggaagtgatcaggagggtcacggaggtccggaattcttactcttctgggacgaggacgcccctggaggacaagccatcggagactgcacgagcgccatgagggggtacagcgtagtttagcaggagacggtagctaggttgcatagtggattccttatagagcttcagcaaagttgatagccacctgcatagcgcagtttccctcgcgattcccgatcgtttccagtaaatctgttgtgttgtttcctctctttttttccccctgattctagcggtctggttgtcgatccatgccattgtattgttgttcagttaaatcagcagctcttctggttagtgttgcactgtaatttgacataatctttgcagcgtgattaatgaatttcatttgccttc

SEQ ID NO: 3592 - DNA, 3535 bp, Zea mays
  Clone ID: 700332606_FLI
ggaaaggaaaggggcaaaatatcctagggttctgcctccatggacatcgagacccacgccgccgccctggcccgcgacgagctgcggcggctcctggccgccaccctcagccccgacaaggcgtcggttgacgctgccgcggcggggctcgacgcgctctcttccgacccacgcttccccctcgccatcctcgccgtcgctgcaggggacggtgatcaggggatgagagtcgctgcagcgacatacttgaaaaattttacccgccgcaatttggaaacccgtctgtgttcatctgaggtttacaaggagttccgtgaccaacttgcccaggctttgcttcgagtggagcctgcaattcttcgagtgctgattgaagttttccgccaagttgttgaaaaagattttgtcaaggataacttgtggcctgagcttatccctcagttgaaactagtgatccagagcagcaatctaattagtccaggccagcatcctgagtgcaatactattaatgcactcacagtacttcaatctgttgtaaggcccttccagtatttcttgaatccaaaagttgtgaaagagcctgttccacaacagttggagcaaattgcagcagagattcttgtaccattgcaagtgacattccatcacttctctgacaaggttcttttgtcacctgatgggactaacttggaatatgagcagctcctactcatcacatgcaaatgcatgtatttcactgtgaggtcatacatgccatctagggtgaaacaaattttgccttccttttgcaaagacatgttccgtatactagattctttgaactttaatagtcttattgaagatggatctaccatgaagctcaagattgcaaagagatgtctcattatattttgtgcacttgttacacgtcaccggaaacatacagataaccagatccacatattgtcaactgtgcaatcaaaatatcaaaacaaagcatccatttaagtaaactcgactctctccccaatcggattgtttcattggcatttgatgtgatttctcgagttttggaaacaggaccgggatggcgactagtttcaccacatttttcttcacttcttgattcagcaatttttccagcattagcattgaatgagaaggatatagaagaatgggaggaggatactgatgagtatatgcaaaagaatcttccttctgaacttgatgacatttctggatggactgaggatttgttcactgccagaaaaagtgcaatcaatttacttggtgttatagcgctatcaaagggtccaccagttgcatctgcagcatcgaagcgtaagaaaggtgataaaaataaagggaaatctgaaatgagctcaattggggagttattggtcaccccattcctttcaaagtttcctataccttcccatggtgaagatgcatcatcagtagcagtgcggaattatttcggtgttttgatggcatatggaggcctccaagattttctgactgaaaagaaagatttgacaattacattgatcaggaaccggattctcccattatattctttggatccttgcagcccatatttgatttcaacggctaattgggttattggtcagcttgcgatatgcctaccagaggacatgagttctagtatttatgagtccttaatgaaggcgttgaccatggagtatgtggaggacataacttgttatccggtttgtgcctctgcttctggtgctattgcagaactcattgagaatagttatgttccacctgactggctcattcttctgcaagtggttctgaaaagaataagtactggagatgaaaatgagtctgctcttctgttcaagcttctgggcacaatagttgagggtggacaggaaaaagttctgtctcatattcctgaaattgtatccaacattgccagtactgtaatggagctcctaccccctgtcccagatccttggcctcaggttgttgaacagggtttcgcagccctcgtagcaatggtgcaagcttgggagagctctgcaccagatgaaaacaagacacctgaaaagaggttctggcagtcaggccagtctgcaattgcccaaacaatttcattactgttacaaaaagcttggttgttgcaagctgacaatatggagggctctgcattaccacctccgtcatgcgtaaacgatgcttctgtgctacttgagtttgtcatgagttctgtcacttgcatggaagaaacggcaaatctgaaggtctttgaactggtagctacatgggctgacgctattgccaactgggactcctgggaggagatggaggatcagggtgttttcaacacaattaaagaagctgtcaatttccaccagagatttgacctcgacggtctcttcctgaaaacgcttccgtcgcagtctgaaaatggttcacagagttcagtcatcggccgtgtctctaattttgtgactagggcaattgcagcttacccatccgcaacgtggagggcatgctcgtgcgtccatacactgctgcacgctccaaaattctcccttggagcacaagacactagaaagactatttccgaatcctttgcacaagcagcgttttcccgcttcaaatctgtatccgacagtcctgctgggctatggaaaccactgctgttggcgatatcctcgtgctacatctgctatcccgatgccatcgaacaagtcctgaacaacgttgatggtaacggttttgcgatctgggcgtctgcattggcacaagtctcaagcagcttgttcaatcctggcctgtcatctgaatccgagatcaagttagctgtgctgacgctatctactgtgatcaaccatctcgtgtccctttccacgggtggcaccaaattgttgcaagactgctatgcatcactgatggagtcttgcattcagctgaaggaagttcaggacgatggggacaatgacgatgatgatgatggtgctgaagatgttgatgacaacgatgaagaggaagacaccgaagatgatgatgaggattcggacgacgacgacgatgcgagagaagaaacagaagaggaatttctggaaagatatgcactagcggcggctgcgggcgagtcagtcgaggaaggagacattgatgaagagacccaagacatcgaattgggctctctggatgacgtggacatacagcaggtggttattcccctgatgcagaaacttcctgctctgcagcccgccggagcgtttccggacagcctggttgaaagaattgcagaaacattcccggaatacgaacagtttttgcaagcccttcgacgagcttagagtataggaaacatgtgcagatttttctctttttgttatatgtttatatttttttgtgtcatttttggtttgcttctaccttgagcgttgttccgagatgtgtttctttttgtcagatatggtgtttattttcccttgatgtgggtggcaagatatgggtgatgatgtacgtacgatggttacaagtatgttgtgagcataattgttatggcaacact

SEQ ID NO: 3593 - DNA, 829 bp, Zea mays
  Clone ID: 700332641_FLI
ctcatgcaagtgaaaacgcgaaacttggtgaagatggcacggagctgcaactgccaccaccttcaatggtagacatatctagggagcaactcagccaggaagtggaggttgcaagctctgggccttcaggaactgatgaaactgctgagatgaaacggctaaacactgaacattcacctggtgatgaaacttcaaaacttgttggaactgatctaggactgcaattgtcaccttctggtgatgccatggtagatatatctaataagccacccagctgccaagacgtaaaggaggccccgagcagtgacattttgggaaatgatgaaaattcagacaccgagaagactcctgctgccttgcatggacggctgaacaccgaacttgctcctagtggcagaaatacagaatttagtgaagctgacactggaaaacaagagacacccgtgtctgctgaggctatggtagaatcatcgagcgagcctcgcagccatgaggcaaaggaagctccaacccctgacctgtctggggatgatgaaaaagcgaagtcagcaagggctgctgttgttgcggaactttttggagatgcaacagaaggtggttcggatcagccattgccgtctcctagagaacaaggcaaggaagcagaggccgatggaggcttttagagtaaagttgcaaatattgtatcaagagatactagaatccgtgtaagtaagaactgctaatagtgcttttagttgtaactggtgtaagcttctactcagaatcaaaagcgacgtgctgagattacagcaacagtggcctacggcagtttactactgttttgtgc

SEQ ID NO: 3594 - DNA, 1340 bp, Zea mays
  Clone ID: 700332708_FLI
caagcacaagcgcactctagcaatggcttctgaggttgtccgccctagcgacgccgagctactaaaggcacaagccgacatatggcggctcagcctctcctacctcacgcccctgtcactgaggtgcgccgtggagcttggcatccccacggcgatctaccgccatggcggggctgcctcagccgctgagctggtcacggcgctgtctctcccctccactaagctgccgttcctccgccgcctgctgcggctcctcgccgcgtcgggcgtgttcaccgtcgacaagcagagcacggaggaggagcggtaccgcatcagccccgtgtcctacctcctggtggacggcatccctcacgaggaccacatgaaccacaccgctctggtgctcacctgcacctcgacgcgctacatcgaggcggggatagggctggcggagtggttcaagagggacgtggtcacgtcaccgttcgaggagctgcacggggcgactctgttccacgagagcatggggagcctcgacgcagatttccacgacatggcgagcgaggccttggacgcccacgacaacttcggcatcgagatagctatgcgggagttcagggacttgttcgaggggatccagtccatgacctactgctgcggtaacttcggtgatgacaagggtgccagggccattgtcaaagccttcccacacataaaatgcactgtgctggcccctcccaagatcattgccaccaaaccggccgatggagcgaagataaactatgtcgaaggtgacatgttcagtttcattccacctgctcaaactgtcgtgctaaagcttgtgctgcaccacctgaccgatgaggagtgcgtcaagctcctggctcaatgccggaaggcgattcctccacggaaggacggcgggaaagttataatcggtgatattatgattgaccactctgggcttatgctggaaactcacctcctgatggacatcggcatgatgaccatgacaaaaggacggcagagagatgaaaaagaatggagcgagctcttcaccaaagcagggttcagcgaatacaagatcctgaaggaatttggagctcgtgttgccttcgaagtctatccgtgagatatatatatatatttacatacatatatgtatgtgtgtgggtgccttgcgtggcttggcgtgatgatgtcataaataaagagggtgggtgtgcttgcggtattcatggatggccatggatctgagcacatgacgttggatgctttcttaaggctctcgtggatcttctatatttggaagaagctgtaaaataatatatcgccatctagtgttggcgctggcttgt

SEQ ID NO: 3595 - DNA, 2116 bp, Zea mays
  Clone ID: 700332711_FLI
cgctacctttccgtcgctcctccccaacccacgaaccctgccggaagggcaaaaaggggttcgaaattggtcctgatccaggagccaatcctacagacttcacctcccaaattcttttcccgatccgatctgcaagttctccttggatcctgcatcctccagccgattcctgggaagatctgaatcctcctctcgaccatggatccacgcgccaggtatccttcgggcatgggcaacggccgcggtgggaacctcaactactacggccgcggcccaccgccgcaacagccgcatcagcaccacaaccaccagcagacgtcgggggcgcaccaccaccagcagacgtcgggggcgcaccaccaccagcagtacgcgcagaggcagcaccagcaccagcaccagcaccacggccacaatcgccatcagcaacagcagcagcaccacatttaccagcagcaacagcagcagtggctgcggcggagccagattgcccgcgagacctcgggcgcagccgtgaccagcgagccgaagtccctggcgccatccacggccgccgatggcgtcgattcgagttcacaagattggaaggcccaattgaagctgccgcctccagatacacgctacaggacagaggatgttacagctaccaagggaaatgagtttgaagactattttctcaagcgtgaactcctaatgggtatatacgagaagggatttgaaagaccgtctcctatccaagaggaaagcattcctattgctttaactggtagtgacattcttgcaagagcgaagaacggaactggcaagactgctgcattttgtattcctgcactggaaaagattgatcaagaaaaaaatgctattcaagttgttatattggttcccacaagggaattggctctgcaaacatcacaagtttgcaaggagcttggtaagcatttgaagatccaggttatggtcaccactggtggaaccagtttgaaggatgatattgttcgtctgtaccaacctgtgcacttactcgttggaacacctgggcgtattttggatcttacaaagaaaggtgtttgcattttgaacgactgttcaatgcttattatggatgaggcagacaagcttctctctcctgagtttcaaccttccatagaacagttgattcgctacctccctgctagtcgacagattttgatgttttcagcgacattccctgtgactgttaaggagtttaaggacaaatatctgcctaaaccttatgtgattaaccttatggacgaacttacactgaagggaattacacagttctatgcttttgtggaagaaagacagaaagttcactgtctcaacactctcttttccaagcttcaaatcaaccagtcaataatattttgtaactctgtaaatcgtgttgaactattggcgaaaaagatcacagagcttggctattcttgcttctatattcatgcaaagatgctacaggaccaccgtaatagagttttccatgatttccgtaatggagcatgcaggaaccttgtttgcactgatctttttacaaggggaatagatattcaagctgtgaatgttgttatcaattttgatttccccaagaactctgaaacatatctccacagggttggtagatctgggagatttggtcaccttggtctggccgttaatttgatcacctatgaggatcggtttaacttgtataggattgaacaagagcttgggactgaaataaaatcaattcctcctcagatagaccaggctatatactgccaataatctgaccgttttcatatgctttcatttctccgcgaataatgagaacttttgtaaataccagctcatcaggttttatggtgttgatctcgtttgttgcatcagagacaattctatgttggtggataacattagatgaggcacccaacttattttattacaccttgtcatgctgacactgttatggctatatgagggcaaatgtcctgccacattaggcacaaagtagtgtatattctaggtgcctattcctaggccctgtcctgcttttagtttctttttctcttattttcatcctattgtgtcattagctgtttcacacaggacattttaaccc

SEQ ID NO: 3596 - DNA, 2481 bp, Zea mays
  Clone ID: 700332725_FLI
agacgacccccatctcaaggtcgaggtcgagggctcctctctctctaccatctccgttcgatcccatcgccccgccgccgccatggcgtttctcgcgcgggcgctgcggcagtccaactggcgcctgtcgtcgcgctgccccgccgtggccgcctcctgccgttggatctccccgaccgccgccgcgggatcgccggaggccggcgcggcggtggcgtctgccgacccggagctgcctccgccgcgggagcccgttggcggcgcccgcgtggagcttcctcataacccggaggacgcgctcgaggtattcgtggatggccatgcggtgcggatccccaaggggttcaccgtgctccaggcctgcgaggtcgccggcgtcgacatcccgcgcttctgctaccatagccgactctccatcgctggaaactgccgcatgtgtctcgtcgaggtcgagaagtcgcccaagcccgtcgcttcctgtgccatgcccgcgctcccagggatgaagattaagacaaacaccccagtggcaaagaaggcaagggagggtgtcatggagttcttgctgatgaaccatccactcgactgcccaatctgtgatcagggcggcgagtgcgacctccaggatcagtctatggcatttggtgctgaccgcggccggttcactgagatgaagcgttcagttgtggacaagaatttgggtcccttggttaagacagtgatgactcgttgcatccaatgtacaaggtgtgtcaggtttgctactgaggttgctggagttcaagaccttggtatgttaggtcgtggcagtggtgaagaaattggaacatatgttgagaaacttatgacaagtgagctatctggaaatgtcattgatatctgccctgttggtgctcttacatccaagccatttgcatttaaagctcggaactgggaacttaagggcacagagactattgatgttactgatgcagtgggatccaacataagaattgacagcagaggacctgaagttatgcgtgttgttccacgtctcaatgaggacattaatgaggaatggatatcggataaaacacggttttgttatgatggtttgaagaggcaaagactaaatgaccctatgatccgtggtcctgatggcaggtttaaggctgtgacgtggcgtgatgctcttgcagttgttgctgaggttttgcatcaagttaagccggaagaaataactggagttgctggaaaactttctgatgcagaatccatgatggcactgaaagattttgttaacagaatgggttctgataaggttctctgtgagggaaatggtcccaatcctccagcagatctgcgatctaactacctaatgaatacgagcattgctgggcttgaaaaggctgatgtgttccttttggttggcactcagccaagagtggaagctgctatggttaatgccaggattcggaagactgttaaagcaacacaagcaaaggtgggctacattggtcctccagctgacttcaactatgatcatgagcatcttggcacaggaccgcagacccttgttgagattgcagaaggtagtcaccctttctgctcagtattgcaatccgctaagaaccctgtcatcattgctggagctggattatttgaacgagaagaccaagttgccctattctcaacgattgagactgtagccaagaagttcaatgtgatgagaccagactggaatggccttaatgtcttgttgctccatgctgcacaggcggcagctcttgatcttgggcttgttgctaatcctgccgagagcatcaagtcagcgaagttcctgtatctgatgggagctgatgatataagcctggaaaagcttccagatgacgcatttgttgtttatcaaggacaccatggtgacaagggtgtctatagggccaatgttatcctgccatcttcagcattcagtgagaaggaaggcacctatgagaatactgaaggatgcacccagtggaccatcccagctgttccgacggttggtgatgctagggatgactggaagatcatccgcgctctttctgaggttgctggggctcagctgccttatgacagcctctcagctgtgagggaccggatcagtacggttgcaccaaatctagtacatgtagacgagagggagacacccacaatctctgcggaggttaagccgcctgtgaagcaacaagtcagctcgacaccattcaaagctgttgtggagaacttctacatgactgatgcaatcacccgagcttcaaagatcatggcccagtgcagtgcaaccttgctgaagaagtgaggttttgcacaccatcaagctaatcttctgcaaacagcttcttagtccccttttttcctttgctgagtttcagtgtttcaccacccgttgcatgttttcttgagtggtttgtgtataatttggactgcctctagatttccagagcagcaaaacttgttcagtat

SEQ ID NO: 3597 - DNA, 1677 bp, Zea mays
  Clone ID: 700332786_FLI
cagaaattactcaactgcccagcgcatctcacgacccggcctcgcagctccggcgacgatccctccaatggcctacgccgccgccgttactctccggcgcgtggtgcttgtgtccgctgcgctgcggctcgcactagtggtgttcggggagtggcaggatgcccaccttgaggtgcgctataccgatgtcgactacctcgtcttctccgacgccgctgcctctctggccacaggcggttccccgttcgcccgcgcaacctaccgctactctccaatcctggccttcctgcttgtcccgaactcactcctccatgctgcctggggcaagctcctcttctctgccgcagatttgctcgtagggttgttcataaacaccattctggaactaagaggaattcctgagaaaatgcggatgtggtctgtggtagcttggctgttcaatcccttcacattcaccattggtacaagaggaaactgtgaaccaatagtctgcgcagtcatactctggattctcatatgtttgatgaagggtacccaatgccagaggctgcaaaacaagtcgggtctggggaagggataagctgatgcaagcctttccccgcaaatgcggagaagccgcttcgaacccgcaacctggtagagtgttgcaggcagctttctggtatgggtttattgtgcacttcagaatatacccaatcatatatgcaattccttttgtaatagttcttggcaagggctatgctggtcctgttggtaggcctactcttacgatgtggaggtccaaacaacagttgcaagatgataaagtcagtcaaatagaagaaccaacatcatttctggccactgtatggggttttctttcaaacttcataagcagaaatgggatcctgtttggattactctctggatccatgttctttgcctggaccggtgttttcttctatctgtatgggtgggacttcctaaatgaagcattactttatcaccttactcgtaccgacccaaggcacaatttctcgatatatttctaccacatatatctacaccatcagcaagggttctcaagtattcagaggctcgcttcgtttcttcctcaactgatcgtgcaactggcactcattctacgcttctctagggatcttccattctgcatgtttctccagacggttgcatttgttgcttttaacaaggtgatgacagcacagtacttcgtgtggttcttctgcttgttgcccctcattctcccttggagcagcatgaaacttaagtggaagggtctggcctgcgcggtagtgtggatggggtcccaactgcattggctcatgtgggcttacctgctggaattcgagggccgaaacgtttttgtgcagctctgggttgcaggcctcatgtttctggctgcgaacacctttgttatgctcatggtgatgaagcaccacaagtacactctgctcttctcaacgccgctgaagtctggcaacaaggttgctaccaagaaggaagaatagcagcgtttgggctctttccattttgccgactgatgtatgattaggacatggatcatgtttgtttctctttttttttgtgtttctgtcagatcacatgtgacttgaatcattgtagtttttcccgtacataatgtggtgacattgcatgagaatattttttggttaccag

SEQ ID NO: 3598 - DNA, 842 bp, Zea mays
  Clone ID: 700332793_FLI
gcggaatctcccacccctatcagctggacagcggctgaacattgcgattgatattgcccgctgtctagattacctgcacaacgagcgggtgattccacatggcaacatcaagtcgtctaacgtcctgattcagaactccactccatctgctctggtgactgactacagccttcacaggctgatgactccaatcggcatggcggagcaggtcctaaacgccggcgcgctaggatattcccctcctgagttttcaagcaccagcaagccatgcccatctctgaagagcgacgtgtatgccttcggtgtcatcctgctggagttgctgacagggaagattgccggtgagatcatctgcatgaacgatggcgtggtcgacctgaccgactgggtgaggatgctggatctggaggagcgtgtcgcggagtgctacgacaggcacatcacgggtgttgagagctcggaaggcgccccacaggcactggatggcatactgcgcatcgcgctccggtgtatccggtcagcatcggagaggccggaggtccggacggtgtttgaggatctcttgtccttatcgtcgtgaccgtagttattggtagtgtacatctcgtacttgcatcagcttgtggaaacttggagggtatactaacaattgctaggatttcggggtgatcaggtgatgtgtgtggtctccttgagcattcattgtttgggtcgctctttctgggaatagttgattcgtttttagttagtccacaattttagcactagatgattgtgagaataatttttgtgcattgtgatttcagacactagaaaggaaaataaagatagtcttattgatt

SEQ ID NO: 3599 - DNA, 847 bp, Zea mays
  Clone ID: 700332801_FLI
cttgctgccaagttccgtaacagtggacagacatgtgtttgtgcaaacaggatattggtgcaagaaggtatctacgaaaagtttgcaaaagcattcatccaggctgttcagagtttgaaggtcggtaacggtctagaagagagtacatctcagggtcctctgattaacgaagctgctgttcaaaaggtggagaagttcataaatgacgcaacttcaaagggagcaaatgtcatgctaggtggtaaaagacacagcctgggaatgtcattttatgagccaactgtagtagggaatgtcagcaacgatatgcttcttttcagagaagaagtttttggtccagttgcaccccttataccgttcaaaactgaggaagaagcagtccatatggccaacgatacaaacacaggcttagctgcatacatttttaccaagagcatacctcgttcatggcgtgtatctgaatctcttgagtacggcttagttggggtaaacgaggggattatttcaacggaggtggcgccatttggcggagtaaagcagtctggtctagggagagaaggatcgaagtacggcattgacgagtacttggagctcaagtacatctgcatgggcaacttgggttgagtcctgaagtcggcctctagctcgaaacactcggcagatgatgaacggagaaaccaggcgtgcttagaagggcgtgagttgcgtttagctgcaagatcggtcatgatggctgtgggagagcagttttagaataaatcgaataagccgcggagcattaaataaaagaagtggaaatgagatgtaaatggcgtggaactataaagtatggcttcaccttcgaacc

SEQ ID NO: 3600 - DNA, 748 bp, Zea mays
  Clone ID: 700332815_FLI
cagcagtctgcgcgcactccgcagtcggtcgtggagctctcgagcaaaagcgcgcgacatcgtcggagctagctacgcgtgcgcgctccggccggcggatcggatcgggtcggatggcgtcgtcgaaggcgctcctcctgttggctgccgccgccgtcgctgcggcgtgcctggtcggcgccgcggacgccaagttcggccggctgggccggctcgtcatcaccggcgtcgtgccctgcaacaccggcagcctcatcgacatcgccagctcccccgccttcccgaacgcggacgtggagctgcggtgcgcgggcagggtggtggcgggcgcgacgaccaacaccaacggcaccttctccatggagctggacatgaccaacgcgctggccgcgttcatcggcggctgcacgctggtggtggacacgccgctcgtcaagtgcaacgccgacctcaccgacgtcggcagcctcgtctcctacctgcagggcccgctcacgcgcctgctcggcggcatcttccacctcttccccgccggcttctccttccacgcccgacgagcctgacgtcgtatctagctagagctttgtacgtacgtactactggacaacacaatcaaactttaaacatgctgctgagagctatatatatatatatagctacaactacaaatgtaaaatgtttctagacatgtgtaatgctacgtacaaactgaaacgaagttgaaccaaaataaacagttgggaggcac

SEQ ID NO: 3601 - DNA, 2049 bp, Zea mays
  Clone ID: 700332854_FLI
cagtcacttgcctgggaagccagatattattgcagcctcatacaccgcccttccctactgcttcctgagattcgagagctcgggcgccagatctgaaacctcttgtgttgtgcctttggtagtttggtgtagcattgagctagtagaggtgctgttctagttccaggatgagcaaggaggatgtcctcaagacattgatgctgagagtgaacatacactgtgacgggtgcgagaagaaggtcaagaagaccctccacaagatcgacggtgtctaccagagcagcatcgacgcggaacagggcaaggtgacggtgtccggtttgctggatccggataccatcatcaggaagctcaacaaggccggcaagccggctcagctgtggggttccaagcccggcatcactcagaacgcctaccatggcggcggcaaggcccattccaaggacgctggcggcggcaagagccattccaaggactccggaggtggcaagggccattccaaggatgccggcggcggcaaggcccagaagggcggtgcgggtggcggcggtcacaagggccctggcggtggcggtggcggaggcggtggcgtgggcaatcctaagatggtgatgccgcagccgacgccgcagcagctccagcagctgcagcagcagctgcagatgaaggggctgaagcttccgccgcacctcttgggcggcaatatgccggcgttccccgcggctgcgccgatgaaggaccccaagtccgtcaagtttgccctcccggaggacaacttcgacgactacggcagcgagttcgacgatgacttcgacgacggcttcgacgacgacgaggacgactacgacgacgacggcctggacgacgacgtctacggcgaccccaagatgatgatgaagcccatggctgtgccgccgccggccggcgggggcgacaagaagggcggtggcggcaagaagggtggtggtggggggaacgagatcccggtgcagatcaagggaaacaaccacggcggtgccggtgggcagccgcacaatgcaaagggaggcgccccgggaggcggggcccacctgggccaggggaagaagggcggcggcagcgccgccgccgtcggcgtcggtggcccgatgggcggaatgctgcctcaacaaggcatgatgaggcctcctaacattcttggtggtgctggtgccggcttccccagcacggcccagatgggcggcggacctatgggcatgccggttggccacccgcacatgggtattatgcagcagggcggcggtggcggtggtggtggcatgccgggcctggggttccacccgggattgggcggcggcggaatgcattctggggcggatatgcttcaggccgccgcggcatccgggaaccccgtggcgcagcagcagtacatggccttgatgcagcagcagcagcagcagatgatgatgatgcagcagcagcaacagcagcacgggaacggcggtttaggatacccggcggcaatgggctacggctatggccggccaccgatgcattacccaatgggctacccagtgctgcccccgcactcgcatgctgagccttacaacatcttcagcgacgagaacgccaacagctgctcactgatgtgatcagcaattccgcatggaatggccctgttccaagtaaaccatctcaaggagctcaatgtcaccgctgatcaccgacagacatcgccatggttgaagcgccgtgaatcaatcaacaatcagtatgcttggggatgagtcctagctagaaccctgtccctttcctgctccttccccccctttctctagcttattttcgccttgctttaaaaaaaaaggaacttccttgaatgcgaagttaggtatagtaattatgaggtttccataagggaggggaggagagaggagacgatagggacttcgtacggggtcgttcgcttgtgggttcttccctcctggcttcattaaggtggactaatggtagaacaatgttgtcaatctcagtcgtaaatcagtgtgaatatgtcgtgatttctcttct

SEQ ID NO: 3602 - DNA, 1151 bp, Zea mays
  Clone ID: 700332858_FLI
gcgagagccatggcagggattcgatggccgccagaggacccggagatcttcccttccaggatggtcagcggcggggcttgggtccccgtcgcgcccccaggagagatggcgtcggacgacgaccggtcggtggccgcggactcgtggtcgatcaagagcgactacggcagcaccctcgacgacgatcagcgttactccgacaccgccgaggtcctcctagcctcctcctccgcctcctctgttgccgcgccctccacgacggttgccgtccacccctcctccgacttcagcttcgacaaggatgtccatgactccagctacgttgagcctcccttgctgggcttgcagaattttcaggatggtgcttacgctgaggatcttgcaaatttccatgaacgcagccacgctgatgactggtttggcactgatatcatggatatccgcgtaggttggaccaaaaatttgtgctcaagtagagatttacccagctgcagcgtacttgacattgggactgggagtggcagactcttgcagcagcttgcgaagcaggggttttctgatctgactgggattgactatagtgaaagtgcaattgagcttgctcgtagccttgcaatcggtgatgggtttgagcacattaatttcttggttgatgatgttttggagtcgaagttggagagaagatttgaacttgtcatggatgaagggactcttgatgcgattgggctccatcctgatggacctgtgaagagaatgatgtattggcagtccgttgatagcttggtttcccgtggtggtatattggtcatcacatcatgcagcagaaccaaggatgagttggtgcaggaggtagagaacttcaaccaaaggaagcttggtgctgtgggctcaggctcagaaggattgccggctagtgaagctgcggtgttcagctacctggaccacgtccaaagttaccctagtgtggatagttcttgcataacgaccgttgctttacttcataagtgaaaaacataattgtattgtatgcttggtttattggccctagaaagttaccgtatacctgctacgatattaactatgtacccagtcacttgtgtatctggacaatattctactagtattttaccttgtcgggttggtattgctgg

SEQ ID NO: 3603 - DNA, 1357 bp, Zea mays
  Clone ID: 700332871_FLI
ggttggcatggggcagaaggatgcgtatgttggtgacgaggcccagtccaagaggggtatcctgactttgaagtaccccatcgaacatggtattgttagcaattgggatgacatggagaagatctggcaccacaccttctataatgaactccgtgtggcgcctgaagagcaccctgtgctgctgacggaagccccactcaaccccaaagctaacagggagaagatgacccaaatcatgtttgagaccttcaatgttcctgccatgtatgtcgccatccaggctgtgctttccctgtacgccagtgggcgtacaactggtattgtgttggactctggtgatggtgtcagccacaccgtgccaatctacgaaggttatgcccttcctcatgccatcctgcgtcttgaccttgctgggcgtgacctgactgacagcctgatgaagatcctcaccgagagaggttactccttcaccaccacggccgaacgggaaatcgtacgggacatcaaggaaaagcttgcatacgtggctcttgactatgatcaggagctggagaacgccaagagcagctcatctgtggagaagagctacgagctgcctgatggccaggtgatcaccattggggcggagaggttccgatgccccgaggtcctcttccagccttccttcattggtatggaagctcctggcatccatgagaccacctacaactccatcatgaaatgcgacgtggatatcaggaaggacttgtatggtaacattgttctcagtggtggcacaaccatgttccctggcatcgctgaccgtatgagcaaggagatcaccgcccttgccccgagcagcatgaaaatcaaggtggtggctccacccgagaggaaatacagtgtctggataggagggtccatccttgcctccctgagcaccttccaacagatgtggatctcaaaggctgagtacgatgagtcaggaccagcgattgttcaccggaagtgcttctaagctcaagggcccccttcgtccccattctatgtattcctttccttgagtgcttttcttataagctactatgtttgagattgccggcctttgagcaggcaatgttgttggatctgtatcttgtggatcactacaatgcatgcgttgctccatcttcttttcatgccaagtttgctgtcatacttgctagtggggaaaacaacaatgacaacagtggtgagaacagcaaccacaaaaaaagagaggatggaaattattgaagttcctaggatcgtattgtaactgtacttgtgcgagtaacattattggttctctttgtatatccatctctgagacatgcaattctttttgattggtttgctg

SEQ ID NO: 3604 - DNA, 1806 bp, Zea mays
  Clone ID: 700332881_FLI
tgcacttgcaactacctttaaagaagctcagaagtattctccttgtataatacttcttcgccactttgatgcaattgggaatgcatcctcaaacgaaggtccacagtctgagcaatctgggattgcatcgaacattgaatctgtcattaagcagtacattggacaacgttgggttgctaaggattcgctgccaggaaaagatgtaaatgggagctcatacctcgtggagcctgaatgtgtaagctctcttcaaatcatactagttgcaactgcggacagttctgaaggaatgcaacagtcaattagaagatgcttccgctatgagatcgacatgaagactatgaatgaagaacagagaaacaaactgatatctgagacgcttcaaggcattcctaaagttgctgatgagagtatttgcgacaagttcttaaaagatttagcagcacaaacatcaggtttcatgcccagggacatacttgcattggtcgcagatgctggtgtgtcttttgcgcataaaattgcagcagggaatgatagcaaagcaatcagtaagcatacggaggtccttccagaaagctcttctgccactcaaaatgaggaacaccatttcagcaaagaagatattatgtcttccttggaacgagccaagaaacggaatcgtgctgcactgggcacacccaaagttcctaatgtcaaatgggaggatgttggtgggctagaggatgtgaaaaaggttattctagatactattcagttgcctctgatgtacaagcacctgttttcttctaaattgcacaagcgatcaggtgtcctgctatatggacctccaggaacagggaagagaaaaatgttcgggatatttttgagaaggctaggtctgcacgcccatgtgtcattttctttgatgagcttgattccctcgctcctgcacgaggatcctcagcagattctggcggtgtcatggacagggttgtttcccagttacttgtggagatcgatgggttgagtgacaacagccaggaccttttcattattggggctaccaataggcctgaccttcttgattctgcccttcttcgccctggtcggttcgacaagcttctttatgtcggtgtaaatactgaggcatcatacagggaaaggatccttaaagcacagacgcgcaagtataagctgcacaagaacgtttctctcttgtcagttgcgcagcgttgtccaccaaacttcactggtgctgatatttacgcgctgtgtgcggatgcatggtttcatgcagcaaagcgatcagttgaaacattcgaaaccgatccttcaagaagtaatgacgccagtgccgaagaagtcatcgtcgagatcgacgattttatcacagtgttaggagatatcgcaccgtcgctctctctggacgagctacaaaactacgaacagttgaggcagaagatcgaaggaccttctagatgaagttgggtttccactccctgctgacattcttaaactgttaacacaccaaaacattccctgtcttacattttcgttcgcacacaagttttcctccctgaaaacttgggcacttctatatccattcctgatttatacaatcacattcttgtagcagcatctgtattgacatcagaatgacattttctctgaagagaaacatcctgtcattctttgttagcagctctgcaactattttgaagccttttttttgcagatgatgcgaatcaactttgtatagttagtttcgttgatgtacgcctgtatcatgttgtagtaaatgataaagagaataggagtcctcggatc

SEQ ID NO: 3605 - DNA, 1316 bp, Zea mays
  Clone ID: 700332891_FLI
atcactacaccacaagtccacaagtccacaacaccaccaggcaccagcctcgtcacagccgcttcagcataccacaccgcacgcaaacccaccgcgcgctacgaccaccaccgtcaccatggccgccgcgcgctacgacgtggagaagggcgggaggaataacggggatgggaagccttcgccgccgccgccgggccacctgtacccgcagcgcgacggggagagggagtgggtgccgtggttggtgccgctcgtcgtggccgtcaacatcgtgctcttcgccgtggcgatgtacgtcaacaactgcccggcccacgccgcctcgtctcgccgcggtggcgccggatcatgcgtcgcccgcgggttcctccaccgcttctcgttccagccgctcagcgagaacccgctcctcgggccctcgtcggccacgctgcagaagctgggagcgcttgtatgggacaaagttgtgcgggagcaccaggggtggaggctcgtcacctgcatctggctgcacgccggtgttgcccaccttctggccaacatgatcagcctcgtgctcatcggactcagactggagcaacagtttggatacgtgagagttggcatcatctaccttgtctctggcgtcggaggcagcgtgctttcgtctctgttcatccggaacaacatctctgtcggcgcttccggagctctgttcgggctccttggggccatgctgtcggagctcttcaccaactggaccatctacgcaaacaaggctgcagccctggtgaccctgctggtcgtcatcgccatcaacctcgccatcggcatcctcccgcacgtcgacaacttcgcgcacatcggagggttcctcaccggcttcctcctcgggttcgtcttcctgatgcgcccgcactacggctggatgcagcgctacgccctgccctccgacgtcaagtacaccaccaagaagtacctggtctaccagtgggctctgctggccgtggcctcggtcctcgctgtcatcgggttcgccattgggctggggatgcttttcagaggagtgaacgcgaatgatcactgcggctggtgccactacctcagctgcgttccgacctccagatggagctgtgggaagtgaagatcggcgtgctgacaaaatggactgaagccaggagagagcccatggccgcccatggggccttttcgagcaagcatttccatgaatagatagatatatagctcgcacagtcttactgtacataatgtcaccaggatgtggtttatatatgacattattttgttatctgattgatcgatgattcattctattt

SEQ ID NO: 3606 - DNA, 962 bp, Zea mays
  Clone ID: 700332924_FLI
ggcgtcacttctccgccctctcgtcctcgtgctcctgatcgcctcctgcacagcgcagcagtcaccgccggcgcagcccccgccaacgccgaacgcgccaccggccaactcgccgccccaggcgcctccagccggcaacccgccgccggcaggcaacccgccacccgcgcccaccgccactccacctccggccccgaccactccgcccccggccccgaccactcctcccccggctcccacaacgccgcccccggcgccgacaactccacctccggcccccaccacgccgcctccgtccccaccagcgtcgccaccgcccgctcccaccactccgccaccgtctcccccggcaagcccgccgcccgctcccgccaccccgccaccgtctccgcccatggcgccacctcccgccacgccccctccacccgccaccccgccgccaccggccgcgcccacgccggccccgagcgtggccccgactcccccgcccgtggcgacaccggctgcgtcccccaagagccccaagacgccgagccccgccgccgcgacgtccccggcgccctcgctctcgcccgcgggcacgccgacgaacgaggactcgggtgcaagcgcgcgcgcggtcggcttcgccacggtggtggcgttggcgggcgcgggcctcgccgttctgctttgagtagtagactccgactcttcctcctgtcctcacgccgatgtcgtcacctcctccccgtgcctcgacgttgctgctcgctccatttcagtttcatcttttttttttcctttggtgttgttatttaattttaccggccctacgatcgattcttgatgtacacgatgatgatgatgatgcattggttgctttggatccgcgggcgggtggtggttagtgttctgcccgcgggtgtcgccatgtacttttaccgcactacattttggttctatagagagaggatttgtgt

SEQ ID NO: 3607 - DNA, 2656 bp, Zea mays
  Clone ID: 700332927_FLI
gggtagaggaaaggcaagaaaatgatgcggttatctactcccgctcgcacatgcttcccctccacgttgccgcctccgcaactaccgcctccgcaactaccgtctcggtcaccccacctcctcgcgtccgccctcgctccccgctcggcggcgtggcgccgcgggctccctccccctcctccgcccgtggtctccgccatgcgccggcgcggtcgccgcagggccgcgccccctccggccgctgccggcggcggcggcggcggggagctcgctgcctccgattcccaggagaagagagctggtacagacctcaagacactatctacaagattttggaaagtcgctgccccctactggtggtcagaggataaaactcaagcaaggctgaggcttgctgctgtgtttgctctcacattaggaaccacagggattagtgttggatttaacttcctcggccgtgacttctacaatgctcttgctgataaggatcaagagaagtttaccacacaactgctctactatctgggtgcctttgctggaggaattccgttctttgtcttgagagactatgcaagagaaactctttctttgagatggcgatcttggatgacaagttattatatgaagcgttactttaaaaacagaactttttacaagattcaatctcaatcaataattgacaatccagaccaaaggataaatgatgatctcagcgcattcactggaacggcacttgcattctcgctcacacttttcaatgctgctgtggacttggtatcattcagcaacatcctctatggaatctatccaccattgtttattgttcttgttgtgtactctcttgggggtactgctattagtgtcttccttggtaagaatttggtcaacttgaacttcatgcaagagaagaaagaagccgattttcgttacggacttgtccgtgttagagaaaatgcggaatcgattgctttttatggtggtgaggaaaatgagttacaacttttattggatcggttcaggagggcttttgagaacctaagtgaattgctgatagcttctcggaatctggagtttttcaccaatggttatcgatatttgattcagattctgccagctgcagttgttgctccaatgtacttctcagggaaaattgagtttggagtaataaaccaatcggtgtctgctttcaatcatattcttagtgatttctctctcattgttttccaatttcagtcaattagtgcattctcagcagttatcgatcgtctaggtgagtttgatgatctattggatggaaacgagtcctctctatcatctcaacgtgatagcattgatgggatcaacattgttttcaaaagcagcggtccttgtgttcctagttctaatggatcgctaacacagtctgatccatgcatggttctggaaattcataacttgacattgttaacaccaagaagtggaaatgttcttattactggcctcactatggaactaaaagacaaggaccacctactggtgatgggacctagtggaagtgggaagacgtcgctgttacgtgctttggccggcctctggactagtggaactggggagatcatataccacgtgagaggttctacgcagcttcaaaaaccaaatccaagttctgataaaccatccagcatgaatttaaagggcgaagaagaatcgttgcaaagttccaagcaaagaagagataatggcatattcttcgtcccacaaaggccgtatatggttctggggacacttcgtcaacagttgctctatcctacgtggactgaagaggttcaacactcaccagataatgatgataaaaactcagatcctcttccttttctgtccgaagtctccacatcagatctggtcggtgccaaatccgaggtgccctcgacagctgaactgatcgaagtccttgaggacgtcaagctgggttacatattgcctcgtttcaacggcttggactctacccatgactgggccagtgttctttcgctgggggagcagcagcgtctcgcgttcgcccggctattacttgctacacccactttggtcctgctggacgagtcgacaagcgcactcgatgaagcaaacgaggctcatctatacagtcagattgaagctgccggcattacctacgtaagcatcggccaccggaaaacacttcacaagttccacaacaaggcgctgtacatttccatgtctgattcgacggacaccaatccacgcaactgggagctaaagcccgcggacaagcttccagctgaggagccatcgcagttcccttcatgataatctcagcatttgtacccctggttgctgcttcctcatttttcgtccgttatttggcccccaatcagaagtatggctcaactgtaatgtaccgccatagtgctgcaagctgaagttggactgtttcaggatgatcgtcaaggttgctgccatgcatgctacgacgacccgggccgccggacatgatagctctcatgtgcactcagaccttagagaacagaacagtatagaatgtacataactcggatgcaagtacttatggtcttggtgttggtaatcgttgatctgtactacgctcttaatgctctgattcttttgttggatgatgaagtgctaggaatttcagttc

SEQ ID NO: 3608 - DNA, 1390 bp, Zea mays
  Clone ID: 700332930_FLI
ggaacatccgtgtcctttaccgggttcccccctatagaaaattcgagtattagactctacatgtcaagaaagtatggcgccaggaagcaaggcggagcggaaagcagcactagatgctggcgcatggatgttcaatgtcgtcacatctgttggtatcatcatggtcaacaaagccttaatggcgactcatggctttagttttgctacaacactgactggacttcattttgcaatgacaaccttgatgacgttagtaatgaaatggctgggatatattcagccatcttatttaccattaccagaactagtaaagtttgccttttttgcaaacctgtcgatcgtcggaatgaatgttagtttgatgtggaactctgttggattctatcagatcgcgaagttgtgtatcattccagtcttatgcattctggaaatcatattcgacaaagttcgttactcaagagatacaaagctcagtatagtgcttgtcttcataggtgttgctgtgtgtactgtgactgatgttagcgtgaactctcaagggctattagctgcagtaatagctgtttggagcacagcactacaacaacattatgttcaccaccttcaatggaagtactcgcttggctcattcaatctcttaggccatactgctccagcgcaggcagcatcattgttaatagtggggccttttgtggacttctggctgactaacaaaagagttgatgcttttaactacacatcaatagttacgttctttatcgtgttgtcgtgcataattgccgttgggacgaatctaagccaattcatatgcatcggaagattcacagccgtctcgttccaagtcctaggccacatgaagacagttctggtgttgaccttggggttccttttctttgggaaagaggggctcaacttccatgtcgcccttggcatgcttctggctgtgatcggcatgatctggtacgggaacgcgtcgtcgaaatctggaggcaaagagcgccaggtctaccccacaccgagcgagaagactcagaagcatggggcgctgtcatcgcagtccgagctcgatcagaaggtctaaacgagacacacaaaggcatccgatgcttgttgagcaccggtcgacctggctttattttttagtacttatttttgagggatgagatgtttctataggattgtaggtggggccatagcagaaagagggtgcctgggtaaaatgcccacgagtttacttttgcagtgagtatgtcaatctaagctggcagatacttgatttgtaatagtctttgtgtgtgtttcgctcttcatgtggcatgttcagtttgatctatagttgtatctttcactttcacactgaaattgaaaagtaaagcgcaaatttccttgt

SEQ ID NO: 3609 - DNA, 1507 bp, Zea mays
  Clone ID: 700332962_FLI
cgcctttgttgatggatctcaggcgtgtttcttgatggatctcaggcatttgatgagagaaactggggttgtcagtgtcctgccgtgcacgatgttgatgtcgtcaatggttgagatccatcaagaaacacgcctttgttgcatctccctatcctgtcatcataacacttgaagaccacctcccctctcaactccaggagaaagttgccaagatggttgttgaagtatttggcaacatactgtactacccgccagacgacacccatgagctcaaagaattaccatcacctgaacaactcaaaggacgtgtcctcctctcaacaaagccccccaaggagtacctcgaaaccaagcttagtgactccacgaaggagggtgatgctgacctccatcttggcaaaggaaccggtgatgacgcggtgtggggaaaagaagtaccagattttcggaccgagatccagtctgctgaaaaggacgacgagaacgacgacgttgatgatgaggaagaacaaaaactgcagccccatatagctccacagtataaacaccttattactatcagagcagggaagccaaaagactctctagctgatgccttgaagagtgatccagaaaaagttcggcgtctcagtttgagcgagcaacaacttgccaaagcggcaaaggatcatgccacggaaattgtgaggttcacacagagaaacatactgaggatataccccaagggcactcgagtcacttcatcgaactacaatccgttcgttggttgggtgcatggtgctcaaatggtggcattcaatatgcagggatacgggagagcgctgtggctaatgcacggattttacaaagcgaatggcgggtgcggttatgtgaagaaaccagatttcttgatgcagacagaaccacaagtcttcgacccaagagaaccccagcctgtgaagaaaacgttgaaggtgaaggtgtacatgggcgatgggtggcgaatggacttcaagcagacacacttcgatcagtactctcctccagatttctacacacgggttgggattgctggagtcccagcagactcggtgatgaagaagaccaacgcgatcgaggacaactggaccccggtgtgggagaaggagttcagcttcccgctgactgtcccggagctcgctctgctgcgggtggaggtgcacgagtacgacatgtcggagaaggacgacttcggtggccagacagtgctgccggtgtcggagctgcggcccgggatccgggcggtagcgctcttcgaccgcaaagggatgaagtacaaccatgtgaagcttctcatgcgtttcgagtttgcctagcctgaccctgaccatgcatgccccccccccccccccctcctgttgtgtgaatggatattgcagtctcagtgtgcttcctttgtacatagattgcttggcttggatgatatgtgcaacagacaattccttcagttgttatgatcaaataataaagaggcagcgtccttatgaac

SEQ ID NO: 3610 - DNA, 2496 bp, Zea mays
  Clone ID: 700332963_FLI
gacccggaggagcctccgcacccccgccgcgccagatctggccccgcccgcagcccccatgctccagatccgcctggcctagccacgaccggccgtccgctccccgcgcccccgcgtgccatggacgacgtgtccaggtacgcgcacagcccggcgcacctggccgtcctgcggcgcgaccacgcggcgctgcggcggctggtcgccgcgctcccgcgcctgccgcgcgccggggaggtggcgaccgaggaggagtccatcgcgggggaggccgtggcggacgccgtctcggccgtcgtcgaccgccgcgacgtgccgcggagggagaccccgctacacctcgccgtgcgcctccgggaccccgtcgccgccgacgtcctcatgtccgccggcgccgactggtcgctgcagaacgccgacggctggtccgcgctccaggaggccgtctgcacccgcgaggaggccatcgccaccatcatcgcgcgccactaccagccgctcgcctgggccaagtggtgccgccgcctcccgcgcatcctcgcctccatctcccgcatccgcgacttctacatggagatcaccttccacttcgagtcctccgtcatccccttcatcagccgcatcgcgccctccgacacctaccgcatctggaagcgcggcgccgcgctccgggccgacatgacactcgcggggttcgacggcttccgcatccagcgctccgaccagacgttcctcttcctcggggacggcgccaggcctgaggacgccgggggcaaggagctgcacccgggctcgctcatagtgctggcgcacaaggacaaggagatcacggatgcgctggagggggcgggcgtgcagcccaccgagtccgaggtggcgcatgaggtggcgttgatgtccaagaccaacatgtaccgtccggggattgacgtcacgcaggcggagctcgtgccacacttgaattggcgccgccaggagagggcagaagccgttgggcaatggaaagccaaggtgtatgacatgttgaatgtcctcgtcacagtgaagtctcggcgcgtacctggggcgatgacggacgaggagctgtttgccatggatggggaggagaagaacgggaggggcgcggagcttgatgctgagttagacgaagtgttgacagccgaggagaggaagcagcttgattctgcgcttaggatggggaacaatgaagaggaatctgagcagaggtgcgacgaaggtgacactggtgctggtcatatggatgagcatgccgccgccaaagataagaagggatggttcggttggggtggcaagaaaggtgccaagggcgatgacaagccatcaaagatggggagtaaggatgaaacgagtgacccagggaagcaaaaggagaagggcagcgggaagaagaagaagggtggctcacctgctgagtctctaaaacatgaaagcgagtacaagaaggggttaagaccagtgttgtggctgacaccggatttccctctgaagacagatgaactcatccctctgcttgatgtcctagcaaacaaagtcaaggctgtaaggaggcttagggaactcttgacaaccaaacttcctacaggcacatttccagtcaagattgccatccctattgttccaacgatacgagtcatcgtcacattcacaaagttcgaagaactacagcctctagatgagtttgccaccccaccttccagcccgacacagtttcaagatgcgaaaaccaaagaatcagaaggatcaggctcatggtattcatgggtaaagggtgggcgaggcacacagtccagcgacagcggtgatagccggagctggaaagatgaggtggatccgttccacataccgtcggattacacctgggttgatgccaccgagaagaagcggaggatgaaggcaaagaaagccaagagcaggcggggcccagcccgaaaacagtcctcgaagaacactgcggaaggagcccaccgcccaatgatggatggcttcgaggagtaaaccacgctctcaccggcgttgtaagttgcctctgcattcattcttaagatgttagttgttgatggcagcttcacgcccgaggcagattgaaagttgtgccttggagcaccccccgtggtgttggtgtggcaatggatcggagtcgaatctcattgagaacgtacagatggcttataccccactaatctgtaattcagtcagcgctatttttgtccccacctccgattttcatcttgctggatgtatgcttgacagatgatgatacggccctgttgttgttgttgttgttgaaaaagatgtgttgagggtactgtagtgttcctctcccccctgttgtatggaagattaccaatatgcagcgattttctcgcaaagaggaagctcaatgcacatgcttgtttgttcacattcctttttctgctctgagtttctgctgatgcatgtgtaacgacagtgtaatttgatgtttgtccacgcttt

SEQ ID NO: 3611 - DNA, 607 bp, Zea mays
  Clone ID: 700332980_FLI
gttataatgctgtacaaggggtctcatgtgcatgcaccggctaaagattgttcaccgggacctcaagagtgcaaattgcctcgttaacaaatactggacagtcaagatatgtgattttgggctctctcgagtaatgtcaaattctgcaatgaatgacaactcatctgcgggaactccagagtggatggctcctgagctcattcgcaacgagccattcacagaaaaatgtgatatcttcagcttcggggtcatcatgtgggagctttgcactctttgtagaccttgggaaggaattccacctgttcagatcgtttactctgttgcgaatgatggggcaagactggaaataccagatgggcctcttggaagcttgatagcagattgctgggcagaaccggagaggcgtccatgctgccaggagatcctgacccgccttcttgattgcgagtataccttgtgctgaggctttgcttctagtctgtatagcggttataggggcatcagacggtctggcttatatatacatcacttaattttccatttcacatacatcattgagggtgtaaattaccatgtattaataagcaaactttttctaaacctcttt

SEQ ID NO: 3612 - DNA, 791 bp, Zea mays
  Clone ID: 700333020_FLI
gcgaaccgctgccagtccaaaccctacggccgccgccagcatcaagctccccgaccaaaccctactcgtaccccgccgccgccgcagccgcagccgcggccacaccagcaagcagaactagcagccatgccgcccaaattggacccctctcaggtggtggaggtcttcgtccgcgtgacgggaggcgaggtcggcgcggcgtcgtcgctggcccccaagatcggcccgctcggtctctccccgaagaagatcggcgaggacatcgccaaggagaccgccaaggactggaagggcctccgcgtcaccgtcaagctcaccgtgcagaaccggcaggccaaggtctccgtcgtcccctccgccgcggcgctcgtcatcaaggcgctcaaggaacccgagagggacaggaagaaggtcaagaacatcaagcacagcggcaacatcagcctcgacgacgtcatcgagatcgccaagaccatgcggaacaggtccatggccaaggagttggccgggaccgtcaaggagatcctggggacctgcgtcagcgtcgggtgcaccgtcgatgggaaggaccccaaggacttgcagcaggagatcgatgatggtgaggtcgagatcccctcagcttaaaggctatacaactagaaatcatcggacactattaaagtgtggtgttttgttccaagtgcagttcctgcacctcaatcgcctattattgtctgctttagttccttcaagtcttgtgagagacctaatcagtaccttgtgccttataaaattacatcttccgattc

SEQ ID NO: 3613 - DNA, 1405 bp, Zea mays
  Clone ID: 700333069_FLI
agcccatcctgccctttgaggtgttatctgctcgccttgggcgtagaccagaggacataatcaagttggatgcaaatgagaatccatatggtccacccccggaggtcgctgcagcactaggtagtctcaagttcccctatgtgtaccctgatcctgaaagccgccaattgcgtgctgcccttgctgaagattctggacttgaatctgattacatacttgctggatgtggcgcagatgaactaattgatttaattatgagatgtgtgcttgaaccaggcgacaaaattgttgattgccctccaacattcacaatgtatgagttcgacgcttcagtcaatggtgcacttgttatcaaggttccaagactgcccgattttttccctagatgttgatctcattgtcgaagtggttgaacaggaaatgccaaaatgcatatttctgacatccccaaataatccagatggcagtgtaatcaatgatgaggatcttttaaagatacttgatctcccaatacttgtagtgctggatgaagcttatattgagttttcaagccttcagtcaagaatggcatgggttaagaagcatgataatttgattgttctccgaacatttagcaaacgggcaggtttagctggtcttcgtgtgggttatggtgcatttcctctgagcattatcgagtatttgtggcgggccaagcagccctataatgtttctgtggccgcagaagtttcagcatgtgcagctttacagaatccaacttatctggagaatgtgaaaaatttactggtaaaagaaagggagaggttgtttaatcttctcaagggaataccattcctgaagccatttcccagtcattctaacttcattctctgcgaggtcacgtcaggaaaggatgcaaagaaaataaaggaagaccttgcgaagatgggagtgatgatccgccactatgacaagaaggaactgaaaggctatattcgtatctcggttgggaaacccgagcacactgatgcactaatgaagggcctgaatgcacttcgattgtgagagcttttgcacacgatcaagcttttgcacactatcaagcttttgcacaccatcacatcaatgtaaacagtgtattcctttgcggatatatatccgtcaggctggatgcagtctataagaggagattgcatcactccaacgcatgtgaagcccaaacagacaagggtcatgtgggtttcactatccttttgtttagcaagttgaagtctgtttttgttattcagtggcataacagctattcacaagattatcttgttcagaacaagtgtagcagttgaattcctggtaggtggtttctgatgttgggttgagacttgagagaactgaacattgtgtaggtataaataaaggccaacatagc

SEQ ID NO: 3614 - DNA, 1509 bp, Zea mays
  Clone ID: 700333144_FLI
cagaaacagaaaggtagtagatcaaggaacgccagtgcggcgacaatgaccggcagtggaagcacgggcgccaatggcaagagccagagctccagggccaaggcaatgctgctcgccttgggcaagagctttcctgaccaagttctgcctcaggagaaggttgtggagagctacctccaagaaagcagctgcgacgatcccgccaccagggccaagcttcagcgcctttgcacgactacaacagtgaagacaaggtacactgttatgtccaaggagctattggataagcacccagagctgaagatggagggtactccgacactgacaccccgccttgacatctgcaatgccgcggtgatcgaccttggtgctgccgcagctcgcgctgcccttgacgaatggggtcgccctgcagctgatattacccacctcatctacatctcatcaagtgaccttcgtctcccagggggcgaccttcacctggctgctcgccttggccttagcccaaacaccgtgcgcacttcccttctcttccttggctgctccggtggtgctgctgccctccgcactgccaaggacattgctgagaacaatccagggagccgtgtcctagtaacagctgctgagaccactgtgctaggcttccggccaccaagttatgaccgtccttatgaccttgttggtgctgcgctgtttggtgatggtgcatcagccgtgattataggagcaggtcccatgacaccagcagaaaatcctttcttggagcttgagttctccacgcaggagttcctacctgggactgataaggtaattgatggcaaaatctcagaggaaggaattaattttaaactagggcgtgatttgcctgagaagattgaaagccgcatagaaggtttctgcaggactctcatgaacaaggtagggataaaggatttcaacgatatattttgggctgtgcatcctggtggaccagcaatattgaacaggcttgagttctgccttaaacttcagccagagaagctcaagattagcagaaaagccttaatgaactatggaaatgtgagcagcaatacaatcttctatgtgctggagtacttgagggacgagttaaagaaaggggcaataagtgaagagtggggattgatcttggcttttggcccaggcatcacctttgaaggactgctagttcgaggtgtaaagaaaaccttcacaagctaatataatggtgggtacatggcaagcataaagattaattatatatacagaaacatcacataaagagcatagatgtctcggtggaagctgagcaccacatagcacatcgctaatattttactgtatttgtgttcttcatctatcaaacagtgtaaggtacttgagtttgcttcctagacattgtagaaataaggcactatacagcctgttgtagtgttgttccactgtactatgcaatgattgcaggattactttaatactgcttgtatggatgagtgaactgattacagtgcc

SEQ ID NO: 3615 - DNA, 1686 bp, Zea mays
  Clone ID: 700333146_FLI
gagaggtaggtggccggacggtggtggcatcgccaattcaactccgcatctgaatcggcactcggcagcgcgccagctccatagtgtaggaggaggagatggcgctcacaagaatcggtcttgctggccttgcggtcatggggcagaaccttgccctcaacattgcagagaaagggttccccatctctgtgtacaacaggacaacctccaaggtggacgagaccgtgcagcgtgccaaggcagaaggaaaccttcccgtctacggcttccatgaccccgcgtcctttgtgaactccattcagaagccacgggtggtgatcatgctcgtcaaggccggcgcgccagttgaccagaccatcgcgacgctcgcagctcacttggagcagggcgactgcatcatcgatggggggaacgagtggtacgagaacacggagaggagggagaaggccatggaggagcgcggcctcttgtatcttggcatgggtgtctctggaggagaggagggtgcccgcaacggcccgtccttgatgcccggaggctcgttcgacgcttacaagtacgtcgaagacattgttctcaaggtggctgctcaggtccctgacagtggcccgtgtgtcacgtacattggcaaaggtggatcgggcaactttgtcaagatggttcacaacggaatcgagtatggcgatatgcagctgatttccgaggcttacgacgttctcaagtcggtcggtaagctcaccaacagtgagctgcaccaggtgttctccgagtggaacaagggcgagctcctgagcttcttgatcgagatcacggccgacatctttggcatcaaggacgagcatggcgatggctacctagtggacaaggtccttgacaagaccgggatgaaagggacagggaagtggacggtgcagcaggccgccgagctgtcggtggccgctcctacgatcgaggcgtccttggactcgaggttcctgagcgggctgaaggacgagcgggtggaggcctccaagatcttccagggtgactactactccaccggctcgccggtggacaaggcgcagctggtggaggacgtgaggcaggccctgtacgcgtccaagatctgcagctacgcgcagggcatgaacatcatcaaggccaagagcgcggagaaaggctgggggctcaacctcggcgagctggccaggatctggaagggcgggtgcatcatccgcgccatcttcctggaccgcatcaagaaggcctacgacaggaacccgggcctcgccagcctgctcgtagaccccgagttcgcgcaggagatcatggacaggcaggcggcgtggcgcagggtggtgtgcctcgccatcaacaacggcgtcagcaccccgggaatgtccgctagcctggcctacttcgactcctaccgcagggacaggctgcctgccaacctggtgcaggcccagagggactacttcggggctcacacctacgagagggtcgacatgcctggctctttccacaccgagtggttcaagattgcgcgcaacatctccaacaactgatgagctgctcaacggatggcatgcccggtgttgactactccagtcggtaatgagatttcctgcaggaacttgtctattgatctttgtaagttaattatttatatgaataaaataagagcaaacatgcttgtgtttgggc

SEQ ID NO: 3616 - DNA, 2541 bp, Zea mays
  Clone ID: 700333159_FLI
caacgccaacggcacggcaagccaagcgaagcggagcaagggtttgctcgccccacacccgtcccgcggccgaggctctgcttctcatcgtgacaagcctggcgaactgccatggacctggtgggatccttgctcctgagcatggcacgtctgcttgacccatccggtctccacttcgtgggctggctcgtcaccgcgggctccattggtcttgccgcactcatctacgctctcctcaggctgcagcgtgaggcggcgttgtactggaccaaggcgaccagggagaagcgtgccgcatggaggagattgcggtgccctagctcctgccactcgtggtctgaggactacttccacggtggccagccatcgacatgctgcgtttgcctgtcgtcccttggctccacgcagggcgtcgacatggttcaccgctgctctgtttgcggcgtggctgcacactcaaactgctctccccgtgcagagaaggattgcaagtgcgttgcacaggctggcgcttcgcccttgctgcatcactggtctgagaggtgggtggagctggatgacaacccggagatatcctcctcctgttactactgtgatgagccgtgcggtgtgcctttccttggagtctctcctatatggcgttgcctgtggtgccagcggcagatccatgttgattgccatgcaaaactgttgaaggaaaccggaaacacttgtgatcttggccttctcaggaggcttatagttcctccccaatcagtgaaagaaattggtcaaggttcaggaattagtggaatgctgaactcaatcaaggacgggtttgccaattcaacagttgggaaccgtaggaggtcacgcaacaagaagcgcatgaataaccatcctggtggcaagataaattccattcccacaaaattctcagtcattgattcagtgcttgaaggatttgctagattgaagggcctggatgggaagtatgcactagcaaagcctttatctcaacattctgtaaagcaaacatatcgatctgttattcctaatggacgagtcagaaagtatgaacttgttgatttgccacaagattcaagaccactgctggtattcatcaatggcaagagtggaggtcgaaatggaccttctcttagaagaaggctgaacatgttgttgaatccaatgcagatatttgagctaagtgcttctcaggcacctgaagttggattacaactattccacaatgtgaaacacttcagaatccttgtttgtggtggggatggaactgtagcatgggttcttgatgctattgaaaagcagaactacgaatctcctccccctgtcgccattcttcctctcggaactggaaatgacctatcacgtgttatgcgctggggagggggtttatcttctgttgaacgacaaggaggcatatatgcacttttaaatgatgttgaccatgcagctgttacagtgcttgatcgctggaatgtaaccatcaaagagaagaatggaacagaaggtgaatgcaccaagcaaataaaatttatgactaattatttaggtattggatgtgatgcaaaggttgcttatgacttccacaccactagggaggaaaaaccagataaattttgcagtcagtttgtcaacaagcttatatatgctagagagggtgcaaaggatatgatggataggtcatgttctgatttaccgtggcatgttagccttgaggttgatgggaaaaacattgaaattccggaggatgcagaaggtgtgattgtaatgaatatccctagctacatgggtggtgtggatctgtggcaaaacgacaatgaccataatgatgatttcagattgcaatcaatccatgacaaaatacttgaggtggtttgtatatccgggacatggcatctaggcaaactgcaggtcggactttcaagggcacaccggttagcccaaggaaaagttataagattacacctccacagttcattccctgtgcaggttgatggtgaaccatggatccagccacctgggtgccttgagatatctcatcgtggacagatgttcatgctaaggaggacatctgaagagcctactggacatgctgccgcaatcatgagtgaggtgctcgtgaatgcagagtgcaatggtgtgattgacgcctctcagaagagattgcttctccacgagatagcactccgtttatcctcctgagactatccagtccagcaaccctcacctcacaaggctaactcattctgtaccctttgatgccaaacctatcgtctctgttgagaaatccctttgcacagacgtaaactgctatggtagagttggtgtatacaatacaaagagatagaaggtgtatacaatatgaggaaatagaagtttccttttgtatttggctgtaccttttgagataggtcatctacttctttgtggctggtttcatcagaacagctgttgaagaattttgtagcgcagagccactataaccgcaactagggctcaatgaaatgtaactagagtggatgtgaatgttttgtttgc

SEQ ID NO: 3617 - DNA, 1035 bp, Zea mays
  Clone ID: 700333173_FLI
tgcggcctctcgaatctgacccatttccacggttcgcgtgcgccgttgccgcggatctgcgtgcttgtggcatcgggttccgtggatctagttgcggtggctttgtttctagtgttattgttaatcatctgcgcactgtgagtggatccataggctgaaccctttgctttcgtttacatctcagcggagatggggctcacgttcacgaagctgttcaggcggctattcgccaagaaggagatgaggattctcatggtcggtctcgatgcagctggtaagaccaccatcctctacaagctcaagctcggcgagatcgtcaccaccatccccaccattggatttaacgttgaaactgtcgagtacaagaacattagtttcactgtttgggatgtcggtggtcaggacaagatccggcccctgtggaggcactacttccagaacacccagggcctcatttttgttgtagacagcaacgacagagagcgtgttgttgaggccagagatgagctccaccggatgctgaatgaggacgagctccgtgatgctgtgcttttggtgtttgcaaacaagcaagatctgcctaatgccatgaacgctgctgaaatcaccgataagcttggcctgcactccctgcgccagcggcactggtacatccagagcacatgtgctacctctggtgagggtttgtacgaggggcttgactggctttcgaacaacatcgccaacaaggctcgaagcatctaggcaaggcttcaatcagtggaagcaaactgcctctaccattacagctatgaagtatatagtcgtgattgtgtcagacgtggtgtgtttttgggagataaaaggctcttttggtcgaggagctaggtatcagatgttttttatggtacctgtaattttccgtgcttctgttttggttttgtgcaaggtataccatgtctgactgtgtgctcgccactgtctgagtcgttgtactatcccgggccggcctgtccggctgtctcttggcatagcaaaatgatcgcctaatttgtt

SEQ ID NO: 3618 - DNA, 2068 bp, Zea mays
  Clone ID: 700333206_FLI
cgccgcagcagcaaggccagggcggccctggcagcggcgggtggactcccgagcagttctggtcgctgctggacaaggcggaccgccggttcgcccgggtgcgagacctgccctccttcggccgccaggagcccgacgagttcgccaaggccttccgcgcctacacccagctctggcggatgcagcaggagcaccgtcaccgtcttctcgacgcgggcctccgccgctggcaggtcggcgagatcgccgcccgcatcgcccacctctactacgcccagtaccagcgcaccgccgacaccgcgcttctctccgaggcgttcgtcttctaccacgccgtcctcgaccgcgcctacttccaggacgccgaccaccacctcgcccccgccaaacacctccgcttcctcgccaggttcctcctcgtcgcactcctgctcggcaggcgttcgcacaccgtcccgcgtctcgcctcggacatacgcacgctcttagatgactccaaaaagtccttccaggatgccgaatacaaggagtggaagcatgtcgtgcaagagatcgcgaggttcctgcgagctgactcaccatttatgaacatgaggccgctcaggtacagctatgcattcgatccgcccccggacacgcttcgtactgtgccaactactgtcaagaagcgaggtctcgtcttaagtgacaccatactttgcagctactatcctaacgaggtcaaatttacagacctctccatagatgtattcagaatggttcagtgcctcgaatgggaaccatgtggttcatttgcgctaaacgatggttacagcgcccatgatgaaagtggacaaaatcaacccaatctattgaaagatttaagagatgctgcactgcccccgaatccacttaagacaattctctatcgcccttcggtaacacatttcctaacggtcctttccacaaaatgcgaggagcttccttcaaatggtatcatgttaatatatctttcagctacaggggagatgggaacttctggattttgtcctgatactggtgaaaatgttttgagcaactttaataagtttgacatatccagtcttagtcatactagttcaaaggaaaacaaagaaccttgtctatggttaggctgccgtgaaactgaaggttcaaattgcatataccctggtgatctaatcccatttacaagaagacctctatttttggtgattgacagtagcaccagctatgcattcaaggcagtctattcatggtactgaaaggggggagacttctgccatgctactttcaccaagttcccgatcttccgctgcgggattcagtggcgattctactcggcacagtggtagccaatttactatgttcctcacatctccattgcaagctttctgccttctgcttggcaacaatgggacagatattgacagggtactcatgtttttaatgaatttcttcagacattagagtatatttaaagccttgacatgagttttgtaggatgcatataacaaagctgaggagttattattattgtccctaaatgaatgggctgcgactttagttgcatcatcttcacttcattctatttgggttgaagttttaggcgacccgctcctaagaaggttacttctcaggttcatcttctgccgagcaactcattccctgttcaaaccaacaaaccataagacagagttccttccgacctgcatgcctcctttgcctgagtctgttgatgcagagagcatgctctcccaaagctgtgtgctgcgagtcgcatcattctttggcgctgccagtcagttctcatttgctgaggttaccacatggcctgatgttgactctgaggaggctgttgtcaccagttcatctggcagtgccaacaaaggtgtgcctgagacagccagagattcagacatttcaaactcatcatcatctttttgatgcgaccatggcgctaccttcgtccgcttgtgttatttacttatctgcatatgcggatccatttgtaattactggtgctcctttatgcttgatttacacatcatgcagaactgccttgcctttt

SEQ ID NO: 3619 - DNA, 1444 bp, Zea mays
  Clone ID: 700333232_FLI
gttcgatctgtgcagcagatctgaggtcccgggcgaccgtgaagcagcttcaatcgtcggcatggcgctcgtattgcatagtggggctggaaacaagaatgccttcaaagcacttattgctgcagaatacagtgggatcaaggttgagttgaccaaggattttgagatgggtgtctccaacaagacccctgagtttcttaagatgaacccccttgggaaggttcctgttctggagactcctgatggccctgtttttgagagtaatgctatcgcacgctatgttgctcgcttgaaggatgacaaccctctttttgggtcttcccgtattgaacaagcccacgttgagcaatggatggattttgccgcaacagaagttgatcctggtgttgcatggtacttgtatccaaggcttgggtacctcccttatgttagcacaactgaggaaacagctatttcttcattgaagaggtcgcttggtgctctgaacacacaccttgcttcaaacacataccttgttgggcatgctgttactctagctgacattgtaatgacatgcaacctctaccatggaattgcacggatcttgaccaagaccttcacgtctgatttccctcatgtcgagaggtatttctggaccatggttaaccagcctaacttcaagaaggtcattggtgaggtcaagcaggcagagtctgcacctcctattccgaaaaaggctgctccttctaaggagccaaaggcaaaggatgtcaagaaggaggctccaaaggaggcccccaagccaaaggtggttgaggcaccagcagaagaggaagcaccaaagccaaagccaaagaatcctcttgacttgctgccaccaagcaagatggtccttgatgactggaagaggctatactcaaacacaaagactaacttccgggaggttgccatcaaaggtttctgggacatgtacgacccagagggctactctttgtggttctgtgactacaagtacaatgatgagaacaccgtctcctttgtgaccctgaacaaggttggtggattcctgcagcggatggacctgtgccgcaagtacgcctttgggaagatgctcgtgataggctctgagccacccttcaagctgaagggcctttggctcttccgtggccaggatgttcccaagtttgtaatggacgaggtctatgacatggagctctacgagtggaccaaggtggacatctctgatgaggcccagaaggagcgtgtcaatgcgatgattgaggaccaggagccctttgagggcgaggccttgcttgacgcgaaatgcttcaagtgagtgtgcttgcctggagacagaactgtttagcccttgaatttgcctatggaagagtttgcccttttactagtgtcgatgttgatctggtataccttgctatgaactggttaaagtttgtgctggtttggg

SEQ ID NO: 3620 - DNA, 497 bp, Zea mays
  Clone ID: 700333235_FLI
gacgacaaagacgaccgggcactcactgatatcgaagacggagatgaaccatggtctggccagagagtgcaaggaaggaatggaaccgtcctcacaaaaagaccaataaccccctcgcaagaggaggaaaaactaaaccagaggtgcagaagcgcaaagcttagagtcattcagaagacctgaataatttcggataaattttgaaggattcctgggcacatcggcgtgtagttttttatagccagagaaatgtgaatgggattctcacttgcgtgcacagccagctgcagtctggatcaccagaaattttacatcagccggatgtggtggtgctatttatcctcgacaagaaatatagaggcttaggttagtcgaaaaaaaactcactgtatctgcatcagtttctgaacttcgttcatgtatatcgcctcatgaactctgtaaaccattcacttgcaagacacgataatcagtttagggttttcgagccctccttc

SEQ ID NO: 3621 - DNA, 1646 bp, Zea mays
  Clone ID: 700333239_FLI
ctcccgagtcccgatcgcaaccgccccccacattccccagagttagcccgatcagatcgtttttccctcgaggtgagagtaagatgagggagatcctgcatatccagggagggcagtgcgggaaccagatcggctccaagttctgggaggtggtgtgcgatgagcacggcatcgacccgacggggcggtacatggggacgtcggacgtgcagctggagcgcgtcaacgtctactacaacgaggcttcatgtggtaggttcgtgccgcgcgcggtgctcatggaccttgagcccggcaccatggacgccgtccgcacgggcccctacggccagatcttccgcccagacaacttcgtcttcggccagtccggcgccggcaacaactgggccaaggggcactacaccgagggggcggagctcatcgactccgtccttgacgtcgtccgtaaggaggccgagaactgcgactgcctccagggttttcaggtttgccactcgctcggcggtggcacggggtctggcatgggtaccctgctcatttctaagattagagaggagtacccggatcgaatgatgatgacgttctccgtcttcccatcccccaaggtgtcggacacggtggtcgaaccctataacgccacgctctctgtccaccagctcgtggagaacgccgacgagtgcatggtgctggacaatgaggcactatacgacatctgcttccgcacgctgaagctgactactcccagctttggtgatctgaaccacttgatcagtgccaccatgagtggtgtcacttgctgccttcgcttcccagggcagctgaactctgacctccgcaagcttgctgtgaacctgattcccttcccacgcctgcactttttcatggttggctttgcaccgctgacctcgcgtggctcccagcagtaccgctccctgacggtccctgagctgacccagcagatgtgggactccaagaacatgatgtgtgccgcagacccacgtcatggccgctacctgacggcctctgccatgttccgtggcaagatgagcaccaaggaggtagacgagcaaatgataaatgtgcagaacaagaactcgtcctactttgtggagtggattcctaacaacgtcaaatcgagcgtttgtgacatcccccctcgtggcctctccatgtcttccaccttcgtgggtaactccacctcgattcaggatatgttccggcgtgtaagtgagcagtttacggccatgttcaggaggaaggccttcttgcactggtacacaggcgagggcatggatgagatggagttcactgaggctgagagcaacatgaacgacctcgtctccgagtatcagcagtatcaggatgctacagccgatgaggaggccgactatgaggaagaggaggcggcggcggagtgaggccttctgccatcagttggtgcggggttggctttgtggttttctttgcacttgatgctacctcaacgtatgcaatatctcctgcttgatatatctgctgcttgtgtacgctaccgcgtacgttctgcactcttaataaatatatatgttagttccgtaccagttcctgcgctagtggattggaattctgattaaaatgtttgctgagaagtgtcgtggtgttcttgg

SEQ ID NO: 3622 - DNA, 1582 bp, Zea mays
  Clone ID: 700333259_FLI
atccatccccacacggccctcgccaaatctactcctccagtcggcaggaaaggaacccctctctacctcggaggctcggacagagtgaacgcgccacccgccccggcgagcattgtccgctgccgcgcgccaccttccgctcacgggtgcatttgatccgtcccggccgcctacacgatgtccaagtcgggagcgctggatcttgcttctggcctcggagggaagatcaacaaggtggaagtcaagtcggccgtcgatgagtatgagaaatatcatggatactatggagggaaggaggaagcaaggaagtccaactatactgatatggttaataaatactatgatcttgccactagcttctatgagtatggttggggtgaatccttccactttgctcacagatggaatggagaatccttacgtgaaagcatcaagcgacatgagcattttcttgccctgcaacttggtttgaaaccaggaatgaaggttttagatgtgggctgtggaataggtggaccactgagagaaattgcaagatttagctcaacttcagttaccggattgaataacaacgaataccagataaccaggggaaaggagctcaaccgtttagcaggaattagtggaacatgtgattttgtcaaggcggacttcatgaagatgccgttcgatgacaacacttttgatgctgtttacgccattgaggcaacatgtcatgcacctgatccagttggttgctacaaggagatatatcgtgtgttgaagcctggccagtgctttgccgtgtacgagtggtgcattacggatcactatgatcctaacaatgcaacccacaaaaggatcaaggatgaaattgagcttggcaatggcctgccagatatcagaagcactcggcaatgtctccaggcagtaaaagacgccgggtttgaggttgtttgggataaggatcttgctgaagattctcccttgccttggtacttgcccttggatccaagccgattctccctgagtagcttccgtttgacctctgtgggacgcatgattacccgcacaatggtcaaggccctggagtacgttggtcttgctccgcagggcagtgagagggtctctaatttcctggagaaggctgcagaagggctggtagagggcggaaagaaggagatcttcacgccaatgtacttctttcttgttcggaagcctcttctggaatgagctcttggatcaccttttcagagagagaaggcaagtggtcatttcgaagaagccgaggagagggaacctggaatcaagaaaaccttcagctctcctgtgtaggaggaaagttaacgaacagtgtagtaactgttcagctttgtgtttattcagttgttttgctgcttgaggttattcgtttctaggtgggggttggaatccttttcgccataaacctctcagtggcataaataagatggtttgcataagagtacttcatggataccgtaagggctactactgaaagagaaatgtttaagcagcatggtatgtgagcaactagtgataattattccatccttttttttaatataaagcaggagttttgtcc

SEQ ID NO: 3623 - DNA, 1325 bp, Zea mays
  Clone ID: 700333260_FLI
cacgctactctctcccttctcactaccccgcccgtcaaagcgagagcgccgtatcaccggtctatccatcccttcaccgctgcctcgatccgcgccgaaagatacctttcccccccttcctctcgcgccgccgttttggtgcgaccatggcggcggagggggaggccaagaacccgtccggcggtggggaagggggtaacccccagcaccagcaggcagtgcaggctgcgccggcggagccgccaacggcacagggggaagcggtgcaggaggctggagcgcaggtgacggaacaagagccggagggggagaaggcgaatcgagatggggagggcggcgcgggggagaaggacgacggcgcgtgcagagatctggttctggttgaggatccggaggtgctcgccgtcgaggatccggaggaagctgcagcaaccgcggcactccatgaagaaatgaaagcgctcgtggcatccgtccctgacggtgctggggcagcattcacagccatgcagcttcaggagctagagcagcagtcccgggtttatcagtacatggctgcccgagtacctgtgcctactcacctcgtcttccccgtatggaagagtgtaaccggtgcatcctctgaaggcgcccagaagtaccctactttgttgggcttagcaacactctgcttggacttcgggaagaaccctgaaccagaaccagggaggtgccggcgaacggatggcaaaaaatggcgatgttggagaaacactattccaaacgagaagtactgcgaacgccacatgcatcgcggtcgcaagcgtcctgtacaggtcgtcgaggaagccgagcctgactctgcttcaggctcaaaatctgctcccagcaaggccaccgaaggcgccaagaaggttgacgacaagagcccaggtagcaagaagcttgccgtggcggcggcagctgcagctgctgtgcagtctacgtaattgatgcagcattttagtagtcgcaggaagagcatggcggcgctggcaactagcgccttcttttcattgcatgtgatctttagctataacctcatttagcacactcccagtggtgtccgtgggaggaggaagccgcaagcacttcccccgtagggtgtcgactgaaaaaattcacttgtagctgtatagtttgatctctagctttgtcgtgcctccggccttcaggtaggcgatgcggcatgatgttataaatcctctcccagaactgacaatatcgcattgtaacccaagaagccggtgcaagaacctgtgaaactgcattgatgtgccttttgacgtccacctttattttgggct

SEQ ID NO: 3624 - DNA, 1460 bp, Zea mays
  Clone ID: 700333356_FLI
gaaattgcttggccaaggcacctttgccaaggtttaccatgctcgtaacacggcgacttcggaaagtgtcgcgatcaaagtgattgataaggagaaggttatgaaggttggtctcattgatcaaatccagcgagaaatttctgtgatgaagcttgttaggcatccaaacatcgtacagctctatgaggtcatggccaccaaaaccaaaatatactttgtgctggaacatgttaaaggtggagagctgttcaacaagattcagcgaggaaggctcaaggaagacgcagcgaggaagtacttccaacagctgatctgtgcggtggacttctgtcacagcaggggtgtctatcatcgagatttgaagccagaaaatcttttgctcgatgagaatagcaacctgaaggtatcagattttggtctaagcgcacttgctgaatgccatagacaagacggcctgctccacacgacttgtggcacgcctgcttatgttgccccagaggtgattaacagaaagggttatgatggtgcaaaggctgacatatggtcttgtggggtcatcctatttgtgctattggctggttatcttccgttccatgataagaacttgatggacatgtataagaagattgagaaagctgacttcaaatgtccaagttggttttctaccgatgttcggaggcttttgcaaaggattcttgatcctaaccctagtagaaggatctcggtggaaaaaatcatggagaaccctggtttaggaagggtttaggtgcaaagctacttaggtacgatttacagaataagaatgcccctcatgtggacaagaatgcagattttgattcactgagcaccaacgtaacaactgagagcaagcaacatgaagaaaagaagcctaccaacatgaatgcatttgatataatctctctatcaactggcttggacctctctggtttatttgaagaatctaacaagaagagagaatccaaattcacatctaccaacacaagctcgacaatcatatcgaagatcgaagatattgcaaagaatttgcggttgaatttgacaaaaaaggatggtggcttgttaaagatggaagcttcaaagcccggaaggaaaggggtaatgggtatcgatgccgaagtatttgaggttagccccaacttccatcttgtggagataaagaagacgaatggcgacactctagagtatcaaaaggtcctgaaccaagaaatgaggcccgcactcaaggaaatagtgtgggcttggcaaggtgagcaatcaaagcaaaagcaggaacaacagtcgtgttaaaaacttatgagctagtgcaatgtttttagccaatttccaatctttcgtgtatttgtgtagtttttactcttttattatccatttttgttttcccgtgtaataccaacaaaaacttgtgtagttgtgttattttctgaggacaaatttgtttc

SEQ ID NO: 3625 - DNA, 1694 bp, Zea mays
  Clone ID: 700333366_FLI
gtcttcacaaacgccggcgcaaactctcgcccgagcccgacagatcttcaattccccattccgcccaccgatcgaccttcacgccagtctcggtctcttccgaaggcgtcgcgcgcggttgtttgagaggagaggaggaagatgagggagtgcatctccgtccacatcgggcaggccggcatccaagtcggcaacgcgtgctgggaactttactgcctcgagcacggcatccagcctgatggccaagtgcctggagataagaccgcgggacatcacgatgatgccttcagcaccttcttcagccagactggtgctgggaagcacgttccccgtgcaatcttcgttgatctagaacccactgtgatcgatgaggtgcgcactggcacgtaccgccagctcttccaccctgagcagctcatcagtggcaaggaggatgccgctaacaatttcgcccgtggccactacacaattggcaaggagattgttgatctgtgccttgaccgtatccgcaagcttgctgacaactgcaccggcctccagggcttcctggtcttcaatgccgttggtggtggcactggctctggccttggttctctcctccttgagcgcctgtctgtggagtacggcaagaaatccaagctgggcttcactgtgtacccatctccccaggtgtcaacctctgttgtggagccttacaacagcgtgctctccactcactcactcctggagcacactgatgtctccatcctgctcgacaacgaggccatctatgacatctgcaggcgctccctcgacattgagaggcccaactactccaacttgaatcgccttgtgtctcaggtgatctcatcgctgactgcttctctgaggttcgatggtgccctcaatgtggatgtgaacgagttccagaccaacctggttccttacccgaggatccacttcatgctctcctcctacgcaccggtgatctcttctgcgaaggccttccacgagcagctgtctgtggcggagatcaccagcagcgcgttcgagccggcttccatgatggtcaagtgcgacccacggcacggcaagtacatggcttgctgcctgatgtaccgcggcgacgtggtgcccaaggacgtgaacgccgcggtggccaccatcaagacgaagcgcaccatccagttcgtggactggtgcccgacggggttcaagtgcggcatcaactaccaggcgccgacagtggtgccgggtgccgacctcgccaaggtgcagcgcgcggtgtgcatgatctccaactccaccagcgtcgtcgaggtgttctcccgcatcaacagcaagttcgacctcatgtacgccaagcgcgcgttcgtgcactggtacgtcggcgagggcatggaggagggggagttctccgaggcacgcgaggacctggccgccctggagaaggactacgaggaggtcgccgcagagggcggcagtgatgacggtgacgaggaggaggaatactgatctgcttgcatgaatctgtttggctgtcgagccaggttgtggtgttgaaaaacctttgtttgtgtcctggcccccctgggtaatgtttgggtgtttccttccatcatcacttgctgaactgctctagtatttgcatttgtaattgaagtctgtcgctttaagcactcttggttctaaagatctctgtgcttttggggggt

SEQ ID NO: 3626 - DNA, 1211 bp, Zea mays
  Clone ID: 700333391_FLI
ggcaaaaacccacaccacacttcgttccccttgtcccaattgctcctccacttcccccaccgcccaccagtgatctcgccgccgcgacgcgaggcaccacggccggcgccggccgccttcctccagaaagtatcccccgtgcgcccgaatcacctcttaatttcgttcttagccgctgcgtttcacagaggtcgcgacatgcccgcctcggcggctcctcctgcccagcccgcggcaccgccccctcctcctcctcccgcttctcctgcccctccggaggatgtggaggcgactgccggttcaccttcgagggcttcagcagtggggacggtgaactggggaacggccaccctcgttggcgtcttcgctgggctgctatacggggggagcagggaggcctccgcttccgtcagtaaggatgccgaggtgatgctgaagatgggaagcacaactgacaagcgtgaacagtatagattgatgagagatgctatggagaaaaggttcattcgggttgccaaaggttcactagtcgggggtgttcggctggggatgtttactgcgactttctttggcatacagaaccttcttatcgatactcgtggagtacatgatgtattcaacattgccgctgctggctctgctactgcagctgcttttggccttatattgccagggtcaatgatgtggcgtgcaaggaatgtattggtgggatctgctcttggtgctggcatctgctatccacttggctgggtacagttaaagctggcagaaaaggccaatcttgagattgcaaattcaaaaccatcatccgatttgacagagggaaaagaaaatcaaagccgtgtgggtgctgctatcgaacgacttgagggtagtctgaagaagtgagtgaagcctacgcatcgatggcatttttctcgttgtcttggttccataaatgtagcagctacaaggactgggctgcactgactattgcttcttttctcgcatgttatggacttttatttcgagtttgcagtaggtatcgccgtaccgcactggtaacttgtatctttcaagtcacaagttattgagttcgcagttgctattctaaaaggactgggaaatgcaaaatgtgtttttttttttactttttttcaaaagctggaaaagatgtctgttgtactgaaacagtagataagtcattgtttgagttttgtttggcacagctt

SEQ ID NO: 3627 - DNA, 570 bp, Zea mays
  Clone ID: 700333417_FLI
caaattcgttccgtccaggcaaggaagaaatcgagcagccaaggagaggagaagatggctcgtacgaagcagaccgcccgcaagtccaccggaggcaaggccccgcgcaagcagctcgccaccaaggcggcgaggaagtctgcgccgacgaccggcggcgtgaagaagccccacaggtacaggcccgggacggtggctctgcgcgagatccgcaagtaccagaagagcacggagctgctgatccggaagttgcccttccagcgcctggtccgtgagatcgctcaggacttcaagacggatctgcggttccagagccacgccgtcctggccctccaggaagccgccgaggcctacctcgtcggcctgttcgaggacaccaacctctgcgccatccacgccaagcgcgtcaccatcatgcccaaagacatccagctcgcccgccgcatccgcggcgagcgcgcgtaggcgtatctcgcgcccggccccagtggcggcggagggatggaggagggcaatttgtaaccttatgctgtttgttcgcttttagacggcgtggtgaagaactagtgt

SEQ ID NO: 3628 - DNA, 1254 bp, Zea mays
  Clone ID: 700333432_FLI
gacgcgccatcgcgcctccaccaccccgaccccgccgtcgcaacaggccaagacgcagcagtagaagcaccaccaccaccaccaccggcacacgaccccggcggcagcgagtgccggttctgcgagatgacgcggcagcaccagccgcagtgcgcgcggcggctgccgaagcgcatcatcctggtgcggcacggcgagagccagggcaacctggacatgtcggcctacaccaccacgcccgactaccgcatcccgctgacggcgctgggcgtggagcaggcgcgcgccgcggggcagcgcatccgcgacgtggtggcgggcagcggcaactggaaggtctacttctacgtgtccccctacgcgcgcacccgcgccacgctgcgcgagatcggccgcgccttcccgcgggaccgcgtcatcggcgcccgcgaggagtgccgcgtccgggagcaggacttcggcaacttccaggtggaggagcgcatgcgcgccgtcaaggagacgcgccagcgcttcggccgcttcttcttccgcttccccgagggcgagtccgccgccgacgtcttcgaccgcgtcgccagcttccttgagtcgctgtggcgggacatcgacatggggcggctggaccaggaccccagctgcgagacgaacctggtgatcgtctcccacggcctcacctcgcgggtgttcctgatgaagtggttcaagtggacggtggcccagttcgagcgcctcaacaacttcgacaactgcgagttcagggtcatgcagctgggccccggcggggagtactcccttctcgtccaccacacccaggaggagctccagcagtggggcatgtcgccggagatgatcgccgaccagcagtggcgcgcctccgccaaccgccgctgctgggccgaggagtgctcctccttcatcgacaccttcttcgaggagccctacggctcgtcggagacctcctcctcggacgaagacgacgcagaggacaaggaggaggagaccaagctgctggagcaactataactggtttcatccacatccaatccacccattcgcctcgtcctttgaaattctctccattggattgaatcttataccatgtgggaagagcggagcagtgatgctgcattcagtcatcgctgatccctctcttattcgaaaacaatatgtagcatgttcataatagctattagctagaactagaaatgattcgagggaaatttcagaaaatgctaaagaaacgtatgctat

SEQ ID NO: 3629 - DNA, 1180 bp, Zea mays
  Clone ID: 700333522_FLI
gtttccgaaaagagctctagagccgccacacacacacagacaccatggcaccgcgttctctgctggcagtgctcgccgtcgccgccctcgcgttcttgcacgccgcctcggccaagtcgtcgtggcttgacaggaggttcaccacggacggcaccgtccgcacgggatacgacgattcgggccagcaggtggtgatgctccgcctcgaccagcactccggcgctgccggcttcaactccaaggagcagtacctttacggcgagttcagcgtcgagatgaagctcatccgggggaactccgccggcaccgtctcgtgcttctacctctcttccggcgacggcgacgggcgcgacgagatcgacatggagttcatgggcaactcgagcgggcagccggtggtgctgaacaccaacgtgtgggccagcggcgacggcaagaaggagcaccagttcgacctctggttcgacccctccgccgactaccacacctacaccatcatctggaacccgaccaacatcctgttcaaggtcgacgacctcttcatccgctccttcaagcgctacgccgacctgccgtacccgagctccaggcccatgacgctgcacgccacgctgtgggacggcagctactgggccaccgagaagggcagggtcggcatcgactggtccgacgcgcccttcgtcgtctcctaccgcagctactacgccagcgcctgcgtcagcggcggcgcgtgccgggccgccggcagcggcgggtggatgaacaggcagcttgacagcgccgagtggggcaccgtcaggtgggcggagcgcaacttcatgcgctacaactactgccaggatgggtggaggttcccgcaaggactccccgccgagtgcgcccgccactgatatgcgtccgccggttaattctttgttttgttgggtattctttttttttctacgggtatatgattcttgctcttctttgtggatttgtgattaaaaagcagccctgcagctagcaacgtgtgggcggttgttgtacacctagcttttcctaaatcaagcatgtattttttttatcgtgcctttggatacaggcatgcagcatatatagtattgttgtgagtcgtgaaaattattttttttcctagtgatcactgagatgtataaatggtgaactttaaatctttaatgct

SEQ ID NO: 3630 - DNA, 1593 bp, Zea mays
  Clone ID: 700333535_FLI
gtttttggctactccgcctccgctctcccccctgctgcgcgctactcgcccgatctcgcggtgctggtagcggtgaaaatatctgagatcgagtgaagctagcttttcatcgatatggcgcttgtactgcatgctggcagtagtaacaaaaatgcattcaaagcactaattgccgcggattacagcggcatcaaggttgagttggtaaaagactttcaaatgggggtttccaacaaaacaccagagttcctcaagatgaaccctattgggaaggttcctgtcctggagacacctgatggtcctgtctttgagagcaatgcaattgcaagatatgttactcgcttgaaggctaacaacccactttacggatcttcactgattgattatgcccatattgagcagtggatggactttgctgcgacagaggttgatgccagcattggaaagtggttgtacccacgtatggggttttatccctatgctgctgtgacagaagaatcagccattgctgctttgaagagagcattcggttccctgaacacccatcttgcatcaaacacattccttgttgggcattcagtgacacttgcggatattgtgctgacatgcaatctttatatgggctttagccgtatcttgactaagagttttacctcagagttccctcatattgagaggtacttctggaccatggttaaccagccaaacttcaaaaaggtcattggtgacgtgaagcaggcagaagctgtgccacttcttccaaagaagattgctccggccaaagagcagaagcctaaggaagccaaaaaggaggccccgaagcctaaggaagctgagaaaccagcagaggaagaggaggctccaaagcctaagccaaagaatccccttgatttgcttcctccgagcaagttgattcttgacgattggaagaggctgtattctaacacgaaaaccaacttccgtgaggttgctattaaaggtttctgggacatgtatgacccagagggctactccctgtggttctgtgactacaagtacaatgacgagaacacagtgtcgtttgtgactatgaacaaggttggtggcttcctgcagcggatggatctgtgccgcaaatacgcctttggcaagatgcttgtggttggctctgagccccctttcaaggtcaaggggctctggctcttccgtggccccgaaatccccaagtttgtcatggatgaggtctatgacatggagctctatgagtggaccaaggtcgacctctctgatgaggcccagaaggagcgggtcaatgccatgatcgaggaccaggagccttttgagggcgaggccttgctagatgcaaaatgcttcaagtgagcctcatctctttggagtgctgctcaggaaagagttgtttaggtttttgggtctaattctaaaacagctatgaatgttagttttgatctggggttattttctgtgctgtgttgagacttttggtcatggtaagggaatcggggaaggttttaggcgcgtgcaatattatggattatcgcattggaatcgtgacatgtccatcctttacccttctcataaacgtcccatttatat

SEQ ID NO: 3631 - DNA, 1910 bp, Zea mays
  Clone ID: 700333572_FLI
ctcagcattcccgccgccatcaaggacatgcccaagatgaatccgcaaggcatttacgtcaacaagaacgtcaagctggacgacctccaggtctacggcttcgactacgactacacgctgtcgcactactccgagcacctgcaatgccttatctacgatcttgccaaaaggcacttggtcaatgagttgaagtatccggagagttgcttgcagtacgagtatgaccgcaccttccccatcaggggtttgtactatgacagacttaaagggtgcctactcaagcttgatttcttcggctctattgaaccagatggttgcttctttgggcggcaaaggctgagtttgagtgagataaaagagctctatggcacacggcatattggcagagatcaagctcgtcatcttgttgggctgatggatgtcttctgttttagtgaggcatgtctgattgccgatattgttcaacactttatagatgcaaaactggagtttgatccatcttacatatatgaggatgttaatcaatcgattcagcatgttcacagaagtggtttaattcacaggcaaattctttccgagcctgagaaatttctgataaaaaaaagccaggtgttccgtttcttgaagatgctgaaagagaaagggaaaaagctatttcttcttactaattcgcctttctactttgtagatggagggatgcgttatttgctagaggaccaacattttgatggaaattcctggagggaactgtttgatgttgtgattgcgcaggcaaataaaccaactttctataactcagatcacccattcagggtgtatgacactcaaaaggacaccttaacttttactgcagttgacaagtttctgccagatcaagtatactatcatggctgtttgaaatcatttctacagatcacaaaatggaaaggctcagaggtgatatattttggtgaccatcttttgagtgacttgagaggaccttcaaaagctggttggcgaacagctgctgtaattcgagaacttgaggatgaaatagaaatccaaaacggtgacagctaccgattccaacaggcaaaattgagtataatacatgatctacttgggaaagtccatgcagctgttgttagcaccgagaaaggccaagtctataaagcattgctcaatgagttgaatgcagaaagacgtcaatgccgatctgggatgcgagatttgttcaatacctcttttggtgcaacatttcttacagacacgggaagggaatcatcattttcctatcacattcatcaatatgccgatatttacacgagcaagcttgagaacttcttatcatatgcccctgaatcttggcttcatccacctcatgacataaagatcatgccacacaatgcgaaggtcccagcgagccttttcagtacctcctagttcatcctttctctatttcggtggagaaccaagccgtagtacccccacctatggtttctgtgcgtgaccacgtgacaggattgtggactgctgctgcattcgcttgcgttatactataactgaagcaccatatgatgcatcaatccagcagaccagcaagttagcattctctagaattgccatggaattatcagtcatgtgagtagttaaccgactcatttgcctgtatgacgaagcctctgttttccgtttaaaataaaaaaaggaagcatctgagaggccgcatacttgtgttcccatgaaaccctaccaacctgtaatggccgccaataaaacagtcacacgcaacccatctcgtttccccattttattcgcattctgctacactctttgctgcactcatgttacactgaactcgcctggtggcatctgacaagttttttgggatgagcagaagataatttgggttcgggcaacggataaattat

SEQ ID NO: 3632 - DNA, 1941 bp, Zea mays
  Clone ID: 700333623_FLI
ggaggagctgcggcggctcctggagctgctccctagggagctgagtgggcgggtggagacccacccagagctcccggcgctcgtggaggtggtcatggacctcggccggcccccgctcgcgcgcttcccgtccggagacttcctcctctcccaacgccccatctccttcgacgacctccgtcacgctacctcccaggttggggactttggagcggataatcgtgctggaatcagccgcacgctgcaccggatcagcgccattaggaatcggaagggcgtcattgtcggcctcacatgccgtgttgggcgtgcagtgcccgggagcgctaatttgcttcaggatttggttaaggacggtggctcattgctgctcatcggcccacctggggtggggaagactactgtcataagagaaattgcccgtatgttagctgatgactataagaagcgcgtgatgattgtcgacacatctaatgagattggtggggatggtgatattcctcacccaggaataggcaatgcacgtaggttgcaagtgcctaaccaagacatgcagcataaggtactgatagaagctgtggaaaaccatatgcctcaggcgattgttattgatgaaattggaactaaactagaggccatggctgcaagcaccattgcacagaggggcatacagcttgtggcaactgcccatggggtaacgatagagaatctgatcatgaacccatcactagagatgcttgtgggaggaatacagagtgtcacacttggtgatgaagaagctaaccggagaggagttcaaaaaactgttctggagcgcaagggcccatcaacatttacttgtgctgcagagattgtctccaaaaaagaattacgtgtccatcgtagtttggaagccacggtagatgctttactcgcaggtaagctgcctaattttgaaattcgaaagttggattcaaagggatctatgcaggaagtttctgtgcaaaaggaacaatcacatcttggtatttatgatgcaactgaatttggcagtgactctctaaggaatgccagaagaagcttagactctgcatttagtcttgactctgctgaagggcacatagtgaggtcagatggagctgattcaagctttaatctttatgcatatgggatctccgagtcgactgccttgcaagccattcatcagctggagttggacggcagtgttactttaacttataatatcagtgaagctgatgcagtgatcgcgttacattcaaagctcaagaagaactctcagattcaggctgtgctgaaatctcaagatataccggttttcctcgtaaagacaaactccctgcctcaaatcaccagggcactccgtgctcttgtcgacgatcacatggacgaagtgatagactacaatgataaagaagaagcaaggtcatcagaagaaaccgatgctctggaggaggcaaggctggcaatcgagcaagtagtgattccgaaaggcgagagcgtgcagctactgccgaggccatcaagcatcatctcgtcccaagtgggtctcgtcgaaagcttcagcctcaagtgggaggtcgtaggccaggagcctaaggcatgcgtgaggatccttccgcactttgcgccaaaacaagtcgaagctgtcgcgcgagaaaccccagcggagcccgccgactcggactgggagagccacgatgactcggatcatacccagagtggcatcaccaggctacctttcctaccggattagcgcggcgtctggcgtatcctttcagttcttcgtggccctgccgcctgctgtgtatgtattccatttatttatcttggtaataacttgcaccagaaagcacttgcgtggttgcgtctatctacctacgtaatataagtggatagtgctccgatccggcctctacgcgcgcgtacagatatatatacagt

SEQ ID NO: 3633 - DNA, 2101 bp, Zea mays
  Clone ID: 700333641_FLI
tctcaatccacctcaggcctcgctcagatctctccgcccgggtccatcttcccaccccaaaccttcgcccgcctctctcgtcaacgccgcccgacgagagggatggcggccttgcgggctccggccgcaacgctcctcgtcctcctcgccctagcggcggccggcggcgtggcggccgacggctccgatcaccggtacaagattcgcgagcccgtcccgctctacgccaacaaggtcggcccatttcacaatcccagcgaaacatatcgatatttcgacctgcctttctgctctcctgacaaagtgaaggagaagagcgaggcccttggagaggttctcaatggggatcggttagttgatgcgccttacaagcttgatttccgtgacgaagtcgagtccaaggcagtttgctcaaagaagcttactacagaggatgtagtgaagttccggaatgcagtggctaaggactactacttccagatgtactatgatgatctcccactgtggggcttcatcggtaaagttgagaagggcgggaaggatgatccgagcgagtggaaatactatctgtacaggcacatcatcttcgacatcctatacaacaacgaccgggtgatcgaaatcaatgtgcacactgatcagagtgcattggttgacctgacagaggataaggagaccaatgtggaattcctgtactcagccaagtggaaggagacaccaacaccattcgagaagaggatggagaagtactccagctcctccaacatgccacaccacctggaggttcattggttctcaattataaactcttgtgttactgtcctcctcctcacagggttccttgcaactatcctcatgcgagtattgaagaatgattttgtcaagtatgcccatgatgaggaagcagccgatgaccaggaagagtctggatggaagtatatccatggtgatgtcttcaggttcccaaagaataagtcgctattttccgctgctcttggcacaggaactcaactatttgctctcacaacctttatattccttcttgcacttgtcggagtattctatccttacaaccgtggtgcactatttactgcattggttgtcatttatgcactcacttcaggaattgctggatacattgctacctctttctattgtcagttggaggggacaaactgggtgaggaacttgctattgacaggatgcctattctgtggacctctcttcctgacattttgcttcttgaacaccgttgctattgcttatagtgcaacagcagcactgccctttggcactatctgtgtcattgtgctcatctggaccttggtcacatttcctttgcttgttttgggaggtattgctggcaaaaacagcaaaagtgaattccaagctccttgccgtaccacaaaataccccagggagattcctccacttccgtggtaccggagaactattccacagatggctatggccgggtttttgcctttcagtgccatatacatcgagctgtactacatctttgctagtgtttggggccacaggatttacacaatctacagcattctgtttattgtctttatcatcctccttattgtcactgcattcatcacagttgcactgacatacttccagcttgctgctgaagaccatgagtggtggtggaggtcattcctatgcggaggatcaactggatttttcgtatacggctactgcctgtactactactatgcgcgatcggatatgtctggcttcatgcagacatctttcttctttggctacatggcctgcatctgctatgcattcttcttgatgcttgggatggtgggcttccgtgcctccttgttctttgtccgccacatatacaaatctatcaagtgtgagtgagctgttgttggaagatcaagagcagcagagctgtacccgtttttggtgccaccgagaagtcccaaatatagaaaaaaaaatggtttgctctcgcgtgcaacaggagcagctagtgattgccatgtttcagattaggccattatttatagtaacagctaatgaacctataaatttgttccgttcatgggactgctatgataaaatcgtcttttttgtc

SEQ ID NO: 3634 - DNA, 1538 bp, Zea mays
  Clone ID: 700333669_FLI
atcccgtcgcatcccatcccactaccacccatctcgtcgtccgccgattcgatccggttcttccaacccaggtgatggcgacgaagaggagcgtgggcaccctcggcgaggcggatctgaaggggaagaaggtgttcgtgcgcgccgacctcaacgtcccgctcgacgatgcccagaagatcaccgacgacacccgcatccgcgcctccgtccccaccatcaagttcctcctcgagaagggcgccaaggtcatcctcgccagccacctgggtcgtccaaaaggtgtcaccccaaagtacagcttgaagcctcttgttccacgcttgtctgagctccttggagttgaagtcgtgatggccaatgattgcattggtgaagaagttgagaagttggctgccgctttgccagaaggtggagttctgctcctagagaatgttagattctacaaggaggaagagaagaacgaacctgagtttgctaagaagctagcatctgttgctgacctttatgtcaatgatgcttttggcacggcacacagagctcatgcttcaaccgaaggagttaccaagtatttgaagcctgctgttgccggcttcctcatgcagaaggaacttgactaccttgttggagctgttgccaacccaaagaagccatttgccgctattgttggtggatccaaggtctcaagtaagattggtgtcattgagtccttgctggcgaaggtcgatatcctcatccttggtggtggtatgatctacacattttacaaggcacaaggatattctgttggaaaatctctcgtggaagaggataaacttgagctcgcaacttctcttattgagaaggcgaaggcaaagggggtttctcttttgcttcccactgatattgtagtagcggacaagtttgcagctgatgctgagagcaagattgtccctgccactgctatccctgatgactggatgggtcttgatgttggccctgatgccaccaaaacattcaacgaagcattggacaccaccaagactgttatttggaacggccccatgggagtgtttgagttcgagaagtttgcagctggcactgaggcgattgccaagaagctagctgagcttacaaccacgaagggtgtcactaccatcatcggcggcggcgactctgttgctgctgtcgagaaggctgggctggccgacaagatgagccacatttcgaccggcggcggtgcgagcttggaactcttggaaggcaagactctacctggtgtccttgccctcgatgacgcctagatccgctgctgctgctgctactcaggttctgccagctttgcgtgtcatcttgtttcggaccttggtgtagcactgcaaggctaaggtttactcctccgcacatggacttttggggataggcttgccaccgtgttttgctagatgagtcgtggaataagcttttacttcctcgctgctgtgggtgaagtgactggaattcggaaatttggaactaacaaaaccccccgtggatttgtatgatatgttttgttcgac

SEQ ID NO: 3635 - DNA, 1115 bp, Zea mays
  Clone ID: 700333671_FLI
caccagtctgtcccgttccccacctcaccctcttcttccctatactcgggctacacctgcgaccactgctcacccgtcgcggccatgactcccgcatccacctcccctctcgccgccgccgtcctgcccacgaacttatcttccttctctcgctgcccacctcgccgcctcccgcgcatctcctgcctggcagcgcccgaacgcgggggcaacaatgcgtcgaacgcctcgccggcaccgcagcagccgaggtggggtgccgcggtatccgccgcgctcgcggcggccgtgattgccgcctctatgccagcttacgcggacctgaacaagtttgaggccgagcagcggggcgaatttggcattggctctgccgcgcagttcggctcggccgatctcaagaaggctgtccacgttaacgagaacttcaggcgggccaacttcacatccgctgatatgagagagtcagatttcagtggttccacattcaatggtgcctatcttgaaaaggctgttgcttataaggcaaatttcactggtgctgatttgagtgatacattaatggaccgcatggttctgaatgaagctaaccttacaaatgctgttcttgtacggtcagtcctcacacgtagtgatcttggaggagccatcattgaaggtgctgacttcagtgatgctgttattgacctatcacagaaacaggcattatgcaaatatgcaagtgggaccaaccccatgacaggggtgagcactcgaaaaagcctaggatgtggcaatagccgtcgaaatgcatatgggagcccttcatcccctctgttgagtgccccgccacagaagattcttgaccgagatggtttctgtgatccagctactggtatgtgcgatgcaagctgagaggtttgatccaacatggaaactggtcactggatggtgtacatacattggagattgagtaagagcagaacagtgcagagaaacaagtcgtttttcttttcctcttgccattgttgtaacattgcaacacggaatcaggtaaaattcaggatatagatgagatatgcacgttgagtactgaatggcatgtatagcatagtatgtatacgaaaatagatcatatc

SEQ ID NO: 3636 - DNA, 1385 bp, Zea mays
  Clone ID: 700333684_FLI
gacactcccaagtcccaaccaaatctacgacccctccgaccgaaacgagatctccgcctcccctcacggaaaggaaagaaacgctctccccccggggcaaagggaaccgtcgccgcgtcgcggaaaactgaagcggggcacaggaggaggagaggccgaggcagggagagggttccggcggcgatggagcggtacaacccctccgaggtgtacgagctcttcgtgcgccacatgaacaacccgagggtggtggtggacaacggcgcgtgcgcgacggcgacgctcgtgttcgtgcgcgacgaggagaccggctcgccgatcgacgacgcggcgcgggtcaggcgcgtggagtccaggctcaggcacgtcctccgcggcggcgcgctcggcgcgaggatggtccgggcagacgccgcggccgtcaacatggaccggaggctccaccagcttctcaacgaggacggggaagccgggagccgcgccgaccaggcggaggcgcccacgcccacagcggtcgccgtgcaggattggggggagagggggtactcggtggtgacagtgagctgccgcgaccggcccaagctgctcttcgacgtcgtctgcaccttgacggacttggattacgtggtgtaccacggcacgttccacacagacgacgatcacgcccggcaggagttctacatcaggcggttggacgagcggccaattagctcggcgaccgagaggcggcgcgtgatccaatgcttgcaagcggccatcgagaggcgcgcatccgagggcgtgaggctggagctgcgcatcaacgaccgccgcgggctgctcgcctacgtcacgcgtgtgttcagggagaacagcctctcggtcacgcacgccgtgatcaccaccaggggcgacatggccatgaacgtgttccacgtcaccgacgtggccggccgacccgcggaccccaagaccatcgacgaggtgatccagaggatcggcacggagagcctccgggtggacgaggagcggtggccgcgcctgtgctcgacggagggcgacgcgggccgcggcggcggcggtgcggggatcttctcgctcgggagccttgtcaagaagaacctggtcagtcttggcctcataagatcctgctcgtgaggacgcgatgctcgatgggatccttgtgtaaatatgggatggtgcatgggttagtttgtaaatggagtaggggtttaaatcgccgtttctaggtttaagttgccacgtgtacatagtagcaagtggagatggaaggttttaaaagttgctggtcggcaacagctaggagcttagtaaaggataatggacctctctggtgggtcatgccatgtgtctatctaacttttacgtaagaaaaagtattatac

SEQ ID NO: 3637 - DNA, 1835 bp, Zea mays
  Clone ID: 700333695_FLI
gctgcactcaccggcagccatggaagacttgctctactactccctcaccgtagccatctgcatcgcagtcatcggcctcctctccatcctccgttcgttcaccgccaccggaccgccgccggcgctcccgcccggcccgtcgctgctgtcgctgatcaccccgctcctcttcctcggccgaacgaacttcggcatcgaacggatcctctccgccgcgcggtcccgctacgggcccgtcttcacgctctacctgctcccgtcccgcccggccatcttcatcgccgaccacgtcgtggcgcaccgcgtgctggtgcagggcggcgccgccttcgccgacaggccgccggccagcctccccttccgcctcttctccagtggccagcgcaacatcacatccggcgcctacggcccggtctggcgcgcgctccgtcacaacctcacgggcaacgtgttccacccgtcgcgcatgggccggttcgccgccgcccgccgccgcgcgctgcgggggctcgtcgccggcgtcgcgcgcgacgccggcagcagggccgtcgtcgtcgaggggctcctgcaccgggctatgttccacgtcctcgtcaccatgtgcttcggcgagcgcctcgccaccgacgccgtcgtcgcgtccgtggaggcgctgcagcgggagttcctcaagtcggtgctcggcttccaggtgttcgacgtgtgccccgcgctcaccagcctcctgttccggcgccggtggaagcagatgctgtccctccgccgccggcaggaggagctcttcgcccctctcatacgggcgtgccgcgcgcaacgaggctccgacgccaacgccggcgcggacacgtacgtggacacgctactcgacctccggatccccgaggacgggggcaggaacctcacggagggcgagatggtgagcttgtgcgccgagttcgtggccgtcggcaccgacaacacggcgaccgaggcgcaatggatcatggccaacctcgtggcgcatccggagatccaagcaaggctccgggccgagatccaccaggtcaccggcggcgcgggcgtccaggagcaggacctgccgcggatgccgtaccttcgcgcagtggtcctggaggggctccgccgccacccgccgggccacttcgcgatcccgcacgccgcgaccggcatccaagacgacgacggcggtggcgaccacgcgaccatcgaaggcttccgcgtgccgcggcgcgcgtccctcaacttcacgctcgtcgcgctggggctcgacgaggcggtgtggcccgacccgctgcggttccggccggagcggttcctgcccggcggcgagggcgcggacgttgacctcaccggcgcgaaggaggtcaagatgataccgttcggcgccgggcggcggatctgccccgggatggcgctcgctctgctgcacctcgagttcttcgtggccagtctcgtcgccgagttcgagtggctccaggtccccggtgagccggtggagttcgccgagaagcaggagctgtccgtcgtgatgcgccggccgctccgtgccaccgtcgtccggtgcacaaggaacgccaactgaccacacgggttgtcgttgtcgaaccgaacgtctgcacttttctgctcttgtttgttgctgcatgcatgtgcttttctttcagtgaagttcagcgaatttagtaaaaaattcgctaccaaatttcctgtggacttgtggagtcatgttgttagcatgccctgctcttgttggctagaggctttcatgtatttgcactgcactgctctgattgtcctaaaagttataatattaataaaaaaatcagtttttcttt

SEQ ID NO: 3638 - DNA, 1515 bp, Zea mays
  Clone ID: 700333696_FLI
gccatttatcactccttcctcgtcgaaaatcttctgtcgtaataaaggggtcatccgtccaccgtccacgtgggcggcggttgcggctacggcggcggcggcggcggcgtcagcgggcgccggagatgtgagagcctccgtgccgttggagatggctgcggcgggggcagggaccgggagcgaggggaagaagcggggcgcgtcgcggagctggatcctgctcgacgcggccggggaggagcagctgctggacgccgataagtacgccatcatgcgccgcgtcgacatcaacgcgcgcgacctccgcatcctcgacccgctgctatcctacccctccacaatcctcgggcgcgagcgtgccatcgtcctcaatctcgagcatataaaggcgatcatcacttccaacgaggttctgcttagggatccttctgatgagaatgtaatccctgtagtagaggagctccataggcggttagcaccatcgagtgctactcagcatgatggaaaagagaacttaagtggccagcatgatgtagaaggggcagaagaagatgaatctccttttgagttccgtgcattggaggttactctggaagcaatctgcagtttccttgatgcacgcactactgagcttgagaccgatgcttacccagctttggatgagttgacatccaagatcagcagccgcaacttggatagggtacgtaagttaaaaagcgggatgacaagattgaccgcaagggttcagaaggtgagagatgagcttgaacaattattggatgacgacgatgacatggctgatctttatttgtctagaaagttggctggggcatcttcccctgtcagtggttctggtggaccaaattggttccctgcctccccaactattggttcaaaaatatcaagagcaagcagagccagtgcagctactgtgcatggaaatgagaatgatgttgaagagctagagatgttgctggaggcatatttcatgcaagttgatggcacattaaacaaattgacaacgttgagagagtacatcgatgacacggaagattacatcaatatccagcttgataaccaccgtaatcagttgattcagctagagttattcttgagttctggtaccgtctgtctgtcgctgtactcattagttgctggagtctttggtatgaatattccgtatacctggaatgacggccacggatacatcttcaaatgggtggttcttgtatcagggcttttttgtgcctttatatttgtctccattgttgcttacgcacgacacaaggggctcgtcggatcctgaatagctgaaataaccgcgtacttgcttccctcaactgtaaatttgagccagtgagcatcgactttgcggggtgattcatctgttgtaccaaattcggtagtatcaaattggggatgttgaataggaactgtaataggaaaaagttaatgcaaaagaaatatgttatgattgcccccggttttataaagtttgcaccgaaagattcaaac

SEQ ID NO: 3639 - DNA, 1506 bp, Zea mays
  Clone ID: 700333731_FLI
gggattgctcatgaggttcttcagtggtatttgtgccgtatggagggttggtttgccaccgacgctgattcaatttcactacagggttgggatcaggtatgggttttttggtttgtcgctggccagtatacgtgcgcattatgagattactgtgccttattacatgataatgttgacgggatgtaggaggtgctgcttccaggtggccatggcctcatggttcgtgggtatcgtccggttataaatactctcgcaaaaggcttagatatacgcctcaaccataagtacgcatatctatccttttcttgttaatttggtaatcactagttgtggtttcacttccaccagccattcctagatcactgatcctgttctttgttcttcagggttgtggaaattgttcgccataggaacagggtagaggttaccgtaagcagcggccaaacgtttgttgcggatgctgctgtggtcactgttccgttgggtgtcctgaaagcgaaaaccattaaattcgagccgaggctgccagagtggaaagaggaagcgatcagagaacttacggttggagttgagaacaagatcgttcttcacttcgggcaggttttctggcctaacgtggagttcctcggcgtcgtttcctctagcacctacggttgcagctatttcctcaaccttcacaaggcaacaggccacccagtccttgtctacatgcccgccggccgccttgctcgtgacatcgagaagacgtcggacgaggctgctgcccagttcgccttttctcagctgaagaagatccttcccaatgcagctgagccggttagtttgtcgacacagtacctagagctacgagtagtaaaagaatccttgatgtagagcatttctcctcttacagcctgtgctggccaaaactttgttactgcagataaactacctggtgtcgcgctggggctcggacgagaacacgcttggttcgtacacgttcgatggggtgaacaaaccccgtgacctgtacgagaagctgcgcatccccgtggacaacctgttcttcgcgggagaggccacgagcgtcaagtacacgggcacggtgcacggcgccttctccacgggtgtcatggcggccgaggagtgcaagatgcgggttctggagcggttcagggagctcgacatgctggagatgtgccaccctgccatgggcgaggacagccctgtgtctgtcccgctgctcatctctcggctctaaaagcagacgagtagtagttgtgtatgggatggatcggcacctgagagtaggctgggacatcccactgattgccggagggaagcagggaggaagaagctcccctcgcttcgcttctcctcggcatgaggcatgtgcctggcgttacttgtggcgtgccaagtgccatatttccctaaacttattctgcgtgggaaccctctattatgtatgtatactgtgaatttgtgactgttcaggtaacacgagttatcgtgacatcttcgtag

SEQ ID NO: 3640 - DNA, 1776 bp, Zea mays
  Clone ID: 700333763_FLI
caaaaggctctcgcctcggcttggcagtcggcactccctctccaccgcgctgcaggggcgacgcaaggccgagcgctcctcgatccagatccaaggtaggagatggctctcacgagaattggcctcgccggcctcgcggtcatgggacagaaccttgccctcaacatcgcggagaaagggttccccatctcggtctacaacaggacaacctccaaggttgatgagaccgtgcagcgtgccaaggtcgaaggaaacctcccagtgtttggtttccacgaccccgcgtccttcgtgagctccatccagaagccccgtgtcgtcatcatgctcgtcaaggctggggcgccggtggaccagaccattgccacgctcgcggcgcaccttgatcagggggactgtatcgtcgatggtggcaacgagtggtacgagaacacggagaggagggagaaggcgatggaggagcgcgggctcctatatcttggcatgggcgtctccggaggagaggagggtgcccgcaatggcccgtccttgatgcccgggggctccttcgaggcatacaagtacattgaagatattcttctcaaggtggctgctcaggtacctgacagcggcccgtgcgtcacatatattggcaaaggtggatcaggcaacttcgtcaagatggttcacaatggaattgaatatggtgacatgcaacttatcgccgaggcttatgatgttctcaagtcggtgggtaagctcacaaacagcgagctgcatcaggtgttctctgagtggaacaagggtgagctcctcagtttcttgattgagatcacggccgacatctttggtatcaaggatgacaagggtgaaggctacctggtcgacaaggtcctggacaagaccgggatgaagggaactgggaaatggacagtccagcaggctgctgagctttctgtagctgctcctacaatcgaggcgtccttggactccaggttcctcagcggtctgaaggacgagcgcgttgaggcttccaaaatcttccaaggtgactactccactggcctaccggtggacaaggcacagctgatcgaggacgtgaggcaagctctatatgcctccaagatctgcagttacgcgcagggcatgaacatcatcaaggccaagagctcagagaaaggatggggcctcaaccttggtgagctagcgaggatctggaagggagggtgcatcatccgtgccatcttcctcgaccgcatcaagaaggcgtacgataggaaccctaaccttgccaacctcctcgttgaccccgagttcgcccaggagatcatagacaggcaagctgcctggcgcagggttgtctgccttgccatcaacaatggcgttagcaccccaggcatgtctgcaagtctggcctacttcgactcgtaccgcagggataggcttcccgccaacctggtgcaggctcagagagactacttcggcgctcacacgtacgagagggttgacatgcctggttctttccacaccgagtggttcaagattgcgcgcaactccaagatctgaacatggcctcgtgtttgcatatgccagtatgccaccgtgtcgagtaatcaatcatattactgcttgcagggaggaactgtgtttgatttttattttccatgcgcaatgcttaatttaggtcaggaagtccaaagtctctcccattgttttcctgtaagagctaagcagtaccagatggagaaccttatatttgctggaacatgaataaaagcatttgacatgcttgtgttt

SEQ ID NO: 3641 - DNA, 1838 bp, Zea mays
  Clone ID: 700333768_FLI
cgccaccttgtggttgttgctataatgaggagttgttgagagattcttgctccgctgtttctgtttatgggaggtatcataccatggaggaccacacggaggggcttgatgagtgtgttgcagaagctttcttgttcagactgaattcgttagttgatgctagcgaacagttagtggatttcaagaaaggagaggacgacggcttgaatcttagtgctctggagaaggaacttcaaatgcttactccgtacttggctgatgaagatgctcttgagagtactggacttgaagatgacgtcagaggaaataccaacctagatgtatgtatggtaacaaacgaggaaaatgctaatggcaaagaatttctaaaagatagctactgcatacttccttctcctgagagtgcagtcccttttgatgtttatggggtggaagacttcaagacagaagatacagatcttcaaaaccctaccgctcgcaaatttcaggaagatccaaaaattgatcctgcactctctaagtttcagcaggagtatgaagtatttgacctgaaaatattccaccggaagaacaggactggctttgaggaaaacaaagaattccctattgtcatggattccgttatagctggaagatatcgtatcaatgagtatcttggttctgctgcattcagcaaggttgtacgggcacacgaccttcgcactggagttgatgtatgccttaaaataattaaaaatgacaaggatttctttgaccagagtttggatgagataaagctcctcaagtttgtcaataagtatgatccagatgatgatcatcatatattgcgtctctatgattatttttactatcaggaacatctctttattgtcactgagttactacgggcaaatctttatgagtttcagaaatataaccaggagtctggtgacgaggtgtacttttcactgcccagaatacaggctatagctcgacaatgcttggaggctttggtgtacttgcatcatttaaacatagttcactgtgatctgaaaccagagaatatccttctgaagagctacagcagatgtgaaatcaaagttattgatcttggaagcagctgcttcttgtcagataacttaaacttatatgtccaatcacgttcttaccgatctcctgaggtcatcttgggtttaccatatgatcagaaaattgacatttggtctcttggctgcatcttatctgaactgtacactggtgaagtactctttcctaatgaatcaatgccaatcattcttgctcgtatgattgggataattggtccaattgatatggaaatgcttgcatcaggacaggagacccagaagtacttcacagatgactatgaccttttccacacgaacgaggagacagatcagttggagtatttgatcccagagaaatcctctttgcggcgccacttgcagtgcccagacaagaaatttgttgactttttgtcttacctgctgcaaataaatcccagaaacagaccaacggccagcgaagcgttgcaacaccgatggctttcgttcaaatatagttcaacggccaatcagactcgttcctgacaagtaggcaacactttctgaagctactggctcctgaaacaacatgtttccttttgcagtaggatttggcttcgtggtttttttaggtcaacacttggcgttgaaaaacctgttttgcaaggtgaatcgatcgtgtatatgcgctggttcatgcatgtaaatatgagaaaagtggttcctttttttttctgtacagttgccatgtactacagtgttgatccaactcatggtatagcaaaatggaattcatag

SEQ ID NO: 3642 - DNA, 1291 bp, Zea mays
  Clone ID: 700333777_FLI
ctctctctcgctcgctctcagccttccttccctggcggcaacgcctgggcggacgagcgccgtcgccctgccagttcttcgtctgtcccttcgcctgtgattggcgccgcgtcttctttggatttcggccctttcgcgccggggactagcgcccaccaggagcaagattgaagccttgaagggctatatagggttgggcacggttgacctgatcgactgaaactgaaatggcattggtggtgaagcggtaccgatgtacgcactccgtgagctgtgcttgcctcaagggccatgtcagggaggatgcaatgtatctcgtgtttaaacacatgaactggaacccgaagatgattgctatcttatccagtgtatgtaagtggttcgatgaatttgccaagagggtgctctggaaggaattctgccatgccagggcaccaaagatgatgaaggatttgcactctgacggaagtcatatcgttgatggcaactggaaggccctagggaagcttcttatctattgcgcagggtgccctagtggagacctgttcagtaatatccatgacccagtcccggggcactttgtctacagaacccgtttttctaggacattggggaagagcttactggcgccacagtgcaggtctgatgcgttgtatgtctcagagtcctgtgaacatcttgaccagggcgaggaaggtgacttgggcctcttccggggtatcttcaagtcgtttgctgcgtcgaagatgaagaaaatgttgattgagaggcaggcaaacttccattcgaataagatgtgtccttattgtaagacaaagctatgggacttgatgcaaccaaatatgataccaagtagtgccgccgtgagattgggtgcggaagatggttctgttgagtactatatatgtcttaatgggcacatccttggttcatgcactctgatacccatctctgattctgagggcacaaaggaagagtgatcaagacttgatttaggttgctgtgtgaaatcccgtgcttgttgactagggcgtgagcagcgataaggacgagccctgtcgccgccgttgtacttaactgtaattgtagtgccagtgttcttctagctgcctttctttgagggtgtgggttgacggattctcgtagttgcttgtagcagtagaaaaagaagaggttgctgtatcgtggttgccttttatttatgaatacctcattacaggtatgtttgcagagcacctgcatattgctttggtaccggtatgtaccttcaaatgcacagatttttcctgtg

SEQ ID NO: 3643 - DNA, 1242 bp, Zea mays
  Clone ID: 700333804_FLI
ctccagctcagaagccagccacagcccacaggcacagctattcatcagcttgacctccccgtccgcccgcccgcccgcttctcgcgtcgaggtcggccgcgcgccactctgaatccccagggcaccacaccgccggacaacctcgagaagaagcaccggcaacgacgacgagctagcactagcagtcagtcacagccgggcaagattgattcggacgagcagccgatgatgatgcacgggaacgggcacgggcacggccgtgtccacccggcgtcctccagctccgacttctccggcgagatgaaccagtcggccgtgtccgacccctcctccagcccgctctacagcttccacttcgagaagcccgtcccgccgccgccgcccgcaggcacgtacgtggtgcaggtgcccaaggacaaggtcttccgcgtcccgccgcccgagaacgcgcgcctcttcgaccactacacgcgccgcgccaggcgccgccgccgcggcagctgctcctgcgcgtgcctgctcgtcggagccgcagtcgcgctcgccgccgccctcgccggcgtcctcgcgtgcctggtcctcgggccgaagccgccggcgtacgcggtccaggcgctggccgtctccggtctcgtcaacgcctcctcctccccggccgcgctctcgccggggttcgacgcgaccgtgcgcgccgacaaccgcaacggcaggctcggcgtgcggtacgaggggggccggggccgcgtctccgtgtcgtacggcggcgcgctcctggccgacggcgcgtggccggcgctctaccaggctccccggaacgtgacggtggtcgtggcgagggcgagggggtccggggtacggctgtcgcggagcgtgcgagggcagttggccgcggcggaacggctccggtcggtgccgttcgacatggacgtcgacgtgcccgtgcgcctccagctcggcgtggtcaggacgtgggccgtgccgctgcgggcgcgctgcaccgtggcggtcgacaggctcgcggccgacgccagggtggtgtccaactcgtgcgacgtcaaggtgcgcctcctgtcgtggtggaggaactgacgatggcgccatggtggcggattacatacttgagcacttcttgtttggttttaggatgcgttttcccctcatttgtaagctggtttggttccccaatgtggatcttgtcatcgtagtatcatatcaggaacgctgtcaaatcgtcttgcgact

SEQ ID NO: 3644 - DNA, 967 bp, Zea mays
  Clone ID: 700333805_FLI
ctcagcttggtacacacccacctgatgtttgtgttggaacaccttgttggatggctccagaggttgttaaggccatgcatgaaaaacaccactatggactggaaatagatatctggtcatttggatgttttttattggagatgcttacgcttcagatgccttaccagggactttctgacactgaaatatatgatctgatactgaggaagaaacagaggccaaggctaactcaggaactagaagcattctggacaatggatgagccagctacgagactcaagttagggatcacatctgatgctcatgcagataaattgagacacctgatagatctcttctaccagtgtaccagaggacatgcatccaggcggcccaaagctgtgcaaatttacaactcactgtgctccttgcccacatgttacgacatgaggtgaacgttctgatactgtatgaacgcgaaacttgatgcagaagtgcaggggaagaaggtcaaggcaggacatctagccagcctcagagggtttggtgctctaacccgaacatttcaccgtgagttggccttcaggtgctgccaggcagaacatgagaagtgggaccaaggctagcggctgtggtcgccagagctcctcctgagttggtcagttttgtagcggcacggcatctgcgtccacttgtagtcatcatcagttggtcagttttgtagtggcacggcatctgcgtccacctgtagtcatcatcatgtatgtgttatcacatccattgtttccccttttcatggttgctgccatcacaatggggtttaagttatcaaattaggtcattggtgccccaggggcatttgtctgctagaccgctgcatttacttctctatgtgtattgtattgtttatatctgtttagaaaaaaatgactgttgtccatgtaacaattgatgacatctgctatgtgttattgcgaggttatttgtt

SEQ ID NO: 3645 - DNA, 1636 bp, Zea mays
  Clone ID: 700333832_FLI
taaacacacccacccggtcgctccgctccaccgttccgccctcgaccgcgcgcggagcctcctcaacccttcggacctccgcctcccaccgcttccgtagcctcgcgccctcgcctcgcctcgcctcgtccttctcctccgtcccaaccatgagggagatcctgcacatccagggcgggcagtgcgggaaccagatcggtgccaagttctgggaggtgatctgcgacgagcacggcatcgaccacacgggcaagtacgccggcgactccgacctccagctcgagcgcatcaacgtctactacaatgaggccggcgggggccggttcgtcccgcgcgccgtgctcatggacctcgagcccggcaccatggactccgtgcgctccggcccctacggccagatcttccgccccgacaacttcgtcttcggccagtccggcgccggcaacaactgggccaagggccactacaccgagggcgccgagctcatcgactccgtgcttgacgtcgtccgcaaggaggccgagaactgcgactgcctccaaggatttcaggtttgccattcattgggtggaggtactggctcagggatgggcaccctgctcatctccaaaatcagggaagagtacccagataggatgatgctgacgttctcagtttttccatcacccaaggtgtctgatactgtggtagaaccttacaatgccacgctctcagttcatcaacttgttgagaatgctgatgagtgtatggtcctcgacaacgaagctctctacgacatctgcttccgcactctgaagcttgctacacccactttcggtgacctgaaccatctcatctctgcaaccatgagtggtgttacctgctgcctgcggttcccaggccagctgaactcggacctccggaagcttgcggtcaacctgatccccttcccccgcctccatttcttcatggtcggcttcgcgccgctgacgtcaagggggtcccagcagtaccgcgccctgaccgtcccggagctgacccagcagatgtgggacgcgaagaacatgatgtgcgcggccgacccgcggcacgggcgctacctgacggcgtcggccatgttccgcgggaagatgagcaccaaggaggtggacgagcagatgctgaacgtgcagaacaagaactcgtcctacttcgtggagtggatcccgaacaacgtgaagtcgagcgtgtgcgacatcccccccacgggcctggcgatggcgtccacgttcgtcggcaactccacctcgatccaggagatgttccggcgcgtcagcgagcagttcacggccatgttccggcgcaaggccttcctgcactggtacaccggggagggcatggacgagatggagttcaccgaggccgagagcaacatgaacgacctggtggccgagtaccagcagtaccaggacgcgacggcggaagaggaggagtacgaggaggagggagatgaggtggctgcctgatccaccggcacattgtggggttgtgcacattgtggggttgtgttattactgttgctcttcatctggtgtttaaaatgttactgtgatgctgctgcggaactgacgtaagttttaactgtggaattgattacttctagatcgtggatttgtcg

SEQ ID NO: 3646 - DNA, 946 bp, Zea mays
  Clone ID: 700333880_FLI
gtgactgcaaactgcaatacatcatctagactagatctctctttttcttgggcgtatatattcctacataagtacgctctgatcttcttccagctcgctcgctcgctcgatcgatcgatcgctcggcgcgcgccagtagataaatttatatatctctacacgtcatggggcctcagcaaggccggcggtcgaacggcggcgcggcggcgcggagcaaggaggaggaggaggtggggggcgcgaagaaggtggtgcgctaccgcgagtgccagcgcaaccacgcggcgtccctgggcgggcacgccgtggacgggtgccgcgagttcatggcggcgggcgcggacggcacggcggcggcgctcgcgtgcgccgcctgcgggtgccaccgcagcttccacaggcgcgaggtggagcagcccgccgccgactgcgactgcgactgctcctccaccacctccggcgcctgaagtgaactcatctacggtgaatcgcctcgccggcggctggccacgccgcttgagtgagctgctcctgctagcaggtgggtgggtgcatgcatggggtgggaccgacgatcatggggcggcagggcattcatcaaacggtgtgattggggcatagtcgatcgtaggtgcattatattcatcaaccattaccatatatggaccggtggtttttatttttatattttttacttcctcctctgcagctctctgctctttttttttctctctcctctctatttgttcttggatatggttttcagtgaagaattctgttgtgcgcgcgatgcatgtgacataatcgtccgtatatatgtatataaatggtgcttgtacgtgtgcctgtgctaggctgctagccgtgtgtgtgtgtgtgtgtaaagtccagcggtttccatgttactttcctgtatatatataaaatggacatgaatctctctcgc

SEQ ID NO: 3647 - DNA, 397 bp, Zea mays
  Clone ID: 700333908_FLI
tgtgcatcgacaatgttcagctacatcaacctgtatggcaagtatccaccgggcctgttctccagcgagtgcaaagaaggcaagcaggggctctcttgcgcagatgtcctcgagagagacagtgccactgcaagcagtggtcatcacgctcaaatcagcttgcttgcgttgattactgtcttgagtgtggtagtagcgttgttccactgaactatatatgcattctccccaaatatggtgtgttacaactaatgaggtttgaattgcaccttttggtgctcatggtgggattctaggttcttcctttttgtgtgtaaagtctcacataatgttattcatggcctattgcatactctttttaattcaatttaatatcgcagcgggtctgattaaggct

SEQ ID NO: 3648 - DNA, 1432 bp, Zea mays
  Clone ID: 700333915_FLI
caaatcccgtttttcccatcccgtgaagaaccatggcacggtactccccaccgtcgctgcgctgcttcttccgctgcgccgccagctccgcctcccgagccgtaggcagcggcactcggaagaagaaccttgtattcttgggctctccccaggtcgccgcctcggtcctggacaagctgctgggcgcgtccggctccccggaatccgcatttcaggtggctgccgtcgtgacgcagccgccggccgccaagaacagggggaggaagttgatgccgtcggccgtcgcgcagttagcgctcgatcgcgggttcccagaggaactcatcttcacgccagaacgagcccgagaagagtcgttcctgtcggccttgaaggaagtggaaccggatgtttgcataactgctgcttacgggaacattctgccccagaaatttcttgatatcccatcgtgcggcacagttaatatacacccaagtttgttgcctctatatcgtggtgcagctcctgtgcagagggcactgcaggatggtgttgcagaaacaggtgtttcccttgcatatactgtccgtgcattggatgcaggtccagtgattgcgtgtgaaaggttttctgttgatgaatgtattaaggcaccagagctactttctatgctgtttcatttaggatccaagctattgattaatgaacttccatccattcttgatggttcggctaaagataaggcacaaccacaggatgactccaaagctacactggcaccaaagttaaattctgaggagtcatggctatcgtttgacgaagaagctaaagtgctgcataacaaggtgcgggcatttgcaggatggcctgggacgcgcgcaaagctgcaactcataaaccaaaacagtgtacccgatgtactagagattaaggttatcagcacgaaggtttcaacatcatgtgtcaaagttggagatgaaaacgagatactattctctgggagctcgttgctgattccttgcagtggttcgacctggctcgaggtgttggagcttcaactccctggaaagaaagtaacaaaggcacaagatttttggaatggtttgcgtggtcagaagctgatgaaattgccatagggggatatctgcattcgcagcacaggagtgtgcctatatgcatagcaagggttattgaggtcagtcattgcgcgaacataagcagggtagtgctagaagcctatatgcggagatctcggttttatgactaccttttccttctggtaaacttggtgctataaactcgtaactcagttacattaggcatgccatttgtattgcttcctcaatttcagaaaacacactgctgtaactatttcagttattcaatttttcactgtcataactgagctacaaacatttgagaaataatacagttatgtggtgagtaataaggc

SEQ ID NO: 3649 - DNA, 717 bp, Zea mays
  Clone ID: 700333954_FLI
ggagaagccgccgcaccagcaatcacagcagcccggagaacgccctggtccaacaagatgcagatcttcgtgaagacgctgacagggaagaccatcaccctcgaggtcgagagcagcgacaccatcgacaatgtcaaggccaagatccaggacaaggaagggatcccgccggaccagcagcggctgatctttgccgggaagcagctggaggatggccgcacccttgcggactataacatccaaaaggagtctacgctccacctcgtgcttaggctccgcggtggaatcattgagccctctctgcaggcgctcgctcgcaagtacaaccaggacaagatgatctgccgcaaatgctatgcacgactgcaccctagggctgtcaactgccgcaagaagaagtgtggtcacagcaaccagctgagggccaagaagaagatcaagaactgaggtgctgctcctagtcagtttcatggacaatgttgggctgtattgctgtgtggttgttgaacggtgtttgtttacccaacatttgggccttctgttatgttttaccttgttgtcgatgacactactatatgacaatagcaactctgttattgtagttttggtcactgttcacctgatatgtgccatatttcggtaaagtatcgttagtgggcaaccggaactgtgtcctttctacttattccattttaaattattgaacttttatttagc

SEQ ID NO: 3650 - DNA, 2156 bp, Zea mays
  Clone ID: 700334006_FLI
aatgaatctgctggaggatagacttcagcatgcaaatggagctgttgttttggcaacgattaaagtttttctccatttgacaatgtctatgactgatgtccatcaacaggtttatgaacgtattaaagcacccttgcttactctggtgggtgctggcagtcctgaacagtcatactctgtgctatgccatctacatcttctggtgatgcgtgctccaatgttattttcctcggactataaaagcttctactgccaatttagtgatccttcatatgtgaagaagttgaaacttgagatgttgactgctatagcaaatgaaagcaacacatatgagattgtcactgaactatgtgaatatgctggaaatgttgatgtaccaattgcaagagagtctatccgggcagttggaaaaatagcactgcagcagtatgatgttaatgccattgtggacaggcttctacaatttcttgaaatggataaggattatgtgactgctgaaactctagtcttggtgaaagatcttctcagaaaatatcctcaatggagtcatgattgtatagcagttgtgggaaatatcagcagcaaaaacattcaggagccaaaaggaaaagcagctctcatatggatgttgggagaatattcacaggacatgcatgatgctccatacatccttgaaagtcttgttgaaaactgggatgaagagcactctcctgaggttcgcttgcatctcctgacagcagtgatgaaatgtttctttaaaagacccccagagacacagaaggcactaggggatacattagcagctggtctatctgacacccatcaggatgttcatgacagagcacttttttactacaggcttttgcaatacagtcctaatgtagcagaacgtgtagtaaaccctcccaagcaagctgtctctgtatttgcagacacacagagcagtgaaatcaaagatcggatattcgatgagttcaacagtctatcagttgtatatcagaagccatcgtacatgtttacagataaggagcatcgcggaccatttgagtactcagaggatcttacaggcttgactgaggatccagaaaatgtaatttctgcccaaagatatcaagaaaatgataatgatcttttgctaagtacttcagataaagaggacaatggtacaagagccagcaatggttcttccacctctacatacaatgctccttccgatttgattagtccttcattgataagctcgcaagcaccagctgaaacttcactagtaaatactggtgggacatattcctcacaatcaaacttcagtctcgatgaccttcttggccttagcgttactgaagctcctgctttaccacaaccaacactggcccttaactcaaagcctgtgctagatcctggtacgttccagaggaaatggggccagctagcattggcactgtctcaggaatgttctttgagtccacaaggggcagtagctttgatgaatccccaatcactcatccgtcatatgcaaagcaatcacatccaatgtattgcttcaggcggtcagcctccgaactacaagttctttttctatgctcaaaaagatggggctgctgctttcttccttgttgaatgtattgtcaacacagcatcagcgaaggcacagctcaaaatcaaggctgatgatggaactgctgctgaggcattctcgagtttgtttcagtcagccttgtccaaatttgggctttcttgatcctgagtaatttgtctgagcgattcaccggtccacagttttttatgggtttcacagtttgccccaactccactgtcttggcttgtccagtacttgtgatcatattattggagaatcagagtagaaggtgcaaaagggtactggagttttgcggagctaaaaatcctatttgtactatttgggtgaactgtgcatttgtacatgactacatgtcacccagataaatagctgggttatttaggactgtactgtttgatgttctgggttatttaggattgtgatagtttgatgccttgatctcttctgaagggtttcgtttccttgaaggatgtagaaacaacacgcaacaacccctttcatgtatgctatttaccatttcttgcacagatgatcaataagatgtttcgtcttccatttt

SEQ ID NO: 3651 - DNA, 883 bp, Zea mays
  Clone ID: 700334018_FLI
cagcaagagggctccactaccttcacaccggttttgcccagtcaatcatacaccgtgacgtcaagtcagcaaacatactactcgatgaaaatctcttggccaaggtttctgattttggcctctcaaaggttgggcctgaattcgaccagacgcatgtgagcacagcagtgaaagggagcttcgggtaccttgatcctgagtacttccggagacagaagctgactgacaaatcagatgtgtactcttttggtgtggtgctgcttgaggtgatttgtgcgaggccggttatcgacccgactcttccaagggacatgatcaacctcgcggagtgggctatcaagtggcaaaagagaggagagcttgatcagattgtcgaccagcgcattgctgggacagtcaggcctgaagcactgaggaagtttggagagacggtggagaaatgccttgcagagtatggtgtcgagcgtcctactatgggggatgtgctgtggaacctggagtttgtgctgcagctgcaggaggcaggtccagacatgtccaacatcaacagtatgaatcagatctctgaactcccttcaaatccaaagagagttagctccctggatatcagcagtacagatcaaagccgcgtgcccatcgactactccgacatgtcaacgagtaacgccttctcgcagctaatcaatgcagaaggaaggtgaactggatagaattgttccagtcactgaaaaaaatgtttgttacaaaaactagagatgcctcttgtgtgactacccagcctatcccttctcacatatacaacaccaagttgtgaatcttattgaaattttgtttgccacttgtaactacttatgttctagaaaagggtgagtagctttattgc

SEQ ID NO: 3652 - DNA, 765 bp, Zea mays
  Clone ID: 700334022_FLI
ggagagtctagtagggttctaagcctcggccgtttcttcgtctccacagctcccgccgccgcggaccagcgcgtcactctaccgggttccggcgtctccccgtagcgcggcatccatggcggagcagacggaaagggctttcttgaagcagcccaaggtgtttctctgttccaagaaggccaccaaggggaacaaacctggcaagggaggaaacaggttctggaagaacattggccttggtttcaagacacccagggaagccattgaaggaacctacattgataagaaatgtccattcaccggcactgtgtctatcaggggtcgcatcatcgccggaacatgccacagtgctaagatgaataggaccatcattgttcgtaggaattatcttcacttcgtcaagaagtaccagaggtatgagaagagacactccaacatccctgcgcacatttcaccatgcttccgtgtcaaggaaggagatcatgtgatcattggccagtgcaggccagtgtcgaagactgtaaggttcaatgttgtcaaagttattcctgcaggttcgaagagtggagcagtgaagaaagctttcactgccgcttaagatcatgacgagttcatcatccatggcccggaaaagctctgtgttataacgttttgatgctgcctattagcctttttccccgtaactactatatgtgtacttggaattggacttgaattacatccagaacttgaaatcctgaaaaaaaaatcataaccctttgtctg

SEQ ID NO: 3653 - DNA, 681 bp, Zea mays
  Clone ID: 700334082_FLI
aggatatcaaggagaacccagtcttgatctacatgaagggttttcctgagtctccaatgtgtggcttcagtgcactggctgttaaggtcttccagcaatatggcgtccctgtctgtggtagagacattcttggggatcttaagctcaaagagtgtgttaaagcccacactaactggcctacatttccacaaatatttatcaaaggagagtttgttggggggtctgacatcatattaagcttgcaccagaagggtgagcttaaggatcttcttggggatattgcacaaagagacgaacaaaaagtgcatgctcacgattcatgaagcaatcaacagtaggttcttttactatgcgctatctactctgccactaaaatgttctatctcggagtctttaggcgacagcgtacgtgacattgtgaactgtccctacgcattggacatggatgaccggatgtgttcccagaatcaggttgtaggcatctggtattctggaagaggcaaaataatgatctgatacccatatgccgggttctctgtcaatgaataagcgacacttttagcaatagcaatgctgttctttggtgccttgtagtactatggaacttaaattccaggattcgtaggttatgacgttatgttgcattccttttttttaatttaatcgaactgaacttatgat

SEQ ID NO: 3654 - DNA, 2218 bp, Zea mays
  Clone ID: 700334109_FLI
cccgctgccctcggctcccacgacgcccggctagggttttgcctccttcccgctgccgccgtctcagcgagcgagactgagctgtgcttagtaagccatgtcgctgcgcccgagcgagcgggtcgaggtgcggcggaaccgctacaaggtggcggttgacgcggaggaggggcggcggcggcgcgaggacaatatggtggagatccgcaagagccgccgcgaggagagccttctcaagaggcgccgcgaggggctccaggcccaggtccctgcccctccctcgggggtcgagaagaagcttgaaagcctcccagctatggtcagtggggtttattcggatgacaataaccttcagcttgaggccaccacacagtttcgcaagttgctatctatagagaggagccctcccattgaagaagttatcaaatcaggtgtagttccaagatttgtgcagttgctcacaagagaggatttgccccagctgcagttcgaagcagcatgggctctcacaaatattgcttctggcacttcagaaaatacaaaggttgttattgatcatggggctgttcctatatttgtgaagcttcttgggtctggtagtgatgatgttcgtgagcaggctgtgtgggctttgggcaatgttgctggcgattctccgaagtgtcgtgaccttgttctcgccaatggtgcattgatgcctctgctagcccagttgaatgagcatgcgaagctctccatgttgaggaatgccacctggactctgtccaacttttgcaggggaaagccacagccatcatttgatcagactaagcctgctctgccagcacttgcacgacttatccattccaacgatgaggaagttctcactgatgcttgctgggctttgtcatacttatctgacggcactaatgataagatccaagctgtaattgaagctggtgtttgcccccggcttgtggagctccttctgtatgtcaaaatgctgtgtaacaactctatgatgatcacttggatagtttttgttatttgcaccagttctttatcttttatatgagtgtgctgataccacatgcagccatccatcaccgtcggtgcttatacctgctctacgaactgttgggaacattgtaactggagatgatcagcaaactcaggtggggctttaattttggcagctttcttctatatatttgacacactttatgcaaccagttatcagagttaatttttgtgggtatgattatttagtatgggtcatgctatatttcatcacatcacatgttccgaaaataagtagtagagcctttttgttattaataaataatattgtggtaccgaatggacggtggctgatgctctctctctagttcatcctggattggtgatttgagaggcatggtgacgtgggaggtcattgctgtttttctcactcttacagatgctatcactaatgttgctcttcagcctggggttccagataagcacctttggagattctctagcaatggtctctactctgccaaatctgcctatgagctgatgttcagtgtctctacctccttggctgtcttttgagataatctggaggacttgggcaccgcctaagtgccgttttttcctctggttggttgcacataataagtgttgatcgacttgctaagagagttcatccccaccctgctagttaccctctttgtgatcagaaagggtaggatatttaccacctgcttatatcttgtgttctaacaaagacagttctggttcctcttgcttcagtgtgtgggcttggctgccctttccccgggattggatgaaatgtgttttgaagattgctggagcagattggccgagcttgttcctaaagacctcaaagatggttttaattccttggtgactccaggggcttggtgcatctggaagccccccaatggttgtgtctttaatggtgctcggcctagtgttgtgagagtgcttgcttcggctggtcatgagttcaatatgtggtgttttgcaggggccaaaggcttgaccttgctttcggaccttgcctttgtgtttaatccaggttaggaggcgggtgtgcctcttatgggtgtgtgtggttttgtttgttaggtcccttttcttgttctgggtgtttttggccttttgccttctcctaatgaaatgatacgcagtgtgttcgaatgaactaatgcactgtcacaagcattgaatg

SEQ ID NO: 3655 - DNA, 984 bp, Zea mays
  Clone ID: 700334133_FLI
tcgtggtgctgggcgtggccgccgcggcgtcggcgcaaggcccgacggcggcgccaacgacgcccacgcccacgccggcaacccccgcggcgcccgcgcccacgacggcgtccagcaacatcacgggcgtgctggccaaggccgggcagttcaacaccttcatccggctgctcaagtccacgggcgtggcgtcgcagatcgacaaccaggtcgccaacggcgggaacggggtcacggtgttcgcgcccacggacaacgcgttccagtcgctgccctcgggcacgctcaactcgctgtcggaccaggacaagaacgcgctggtgcagtaccacgtggtgtccgccgccatccccatgtcgcagttcgacaccgtcagcaacccgctccgcacgcaggccggcagcgcctcgccgggggagttcccactcaacgtcacctcctccgagggccagcaggtcaacgtcaccacgggcgtcgtcaccgccaccgtcgacaactccctctactcgggcgacagcctcgtcgtctaccaggtcaacaaggtgctgctccccatgaagctcttcggcgccgcggatgcgcccgcgcccgcgccgctcgcgccggccaagaagaagggcaagacgccggcggccgtcgccgactcgcccgacgcggcggaggcgtccccggacgccacgaccacgtcgctcgcgcccgcgaggctgacgcggggtggcctcgccacggctcttgcgctcgccgtcgtgtggtgggggctgtagtcacggcgaggagtgtctcgtgaggtctctccggtggccgtgacatctatacattttttttttcgttcgcgggtcttgtttgtcttttcgtttttactttattgcccatttttggatgaattgttcttccctgtcattcaaattgctaggagtatgtcatgtcatgtaacgtccttgtcccatttttatgtaattttaactaaataaatatgagttgtgt

SEQ ID NO: 3656 - DNA, 1123 bp, Zea mays
  Clone ID: 700334139_FLI
gaatttttacccatctggtttcggggtacccattgccagccagagcgagagggagagggagagcgagcgcgagcgcgcagtcgccgtccacaccgttgagctttttctcaggcttcgcatggcctgattcatcctacagtctccaacaagccaagcaaacgccgcatcgcgctttctccgcttccttctttcccctcacagggtcagaccccaacgccgggagaataggggattaggagccagacctggcggcgccgggcgtccaagaaacgctgcctaataaaatccctccggcgtctgtcgtcttgaccgcggcggcgcaggcttcttcttttcgctctccacggcagcgtcatgaagattcagggaacttgcatgtttgatgtatccctgtagcaaaaaattattgtgataaaatttgttgaattagtcactgtcagggagggatctagttgtcggttgtttgtattaaagctgctggcactttccttgcagggtatctgtagaataaatgggagaagcacacttggatgaatgttgtcattgccaggggtgtgctggcaagtatacactactcagagatgaagaaaacccacggtggacaatctttgagaggcggcttccttgctgtggttgtggtataggatggtcttcttttcttttagggttcttgtgtcctttgatttggtactttgcagccactctttactgctgcaagtactacaacaaggatcctcgagagcgccctgggctagctgcatcagctgttgcggcactcatcttcacagtcctggcactcatcgctctctctgtggcactgatattctatatataaagcgaggaatgaacttgcgcttgcttgaaatgcgtactcaggcactcatcttcacagccctggcaaccatacatcgctctctgtggcacagatcatctgaaacccaaagcgaggaaaacgcggtagctggacctggcattcagaaggaacttgtaatctcagtgatagtagcatatcgttgcaatcatccttcatgtatcgccatatcaatttgttgatttaaatgctgcatcggttgacctgtcggctgctgttgtctatcaacgaggatgatcattgctctatcgc

SEQ ID NO: 3657 - DNA, 1369 bp, Zea mays
  Clone ID: 700334184_FLI
gaacgttgaggctcacaagccgcaggagtacaactggactggctacaggcgcctcttccagatgatcagggaactcaagctcaagttgcaggtcgttatgtcatttcatgaatgtggtggcaatgttggagacgatatatccattcccctcccacattgggtaatagagattggaaggagcaatccagatatctactttactgacagggcaggaagacgtaatacagagtgcttatcatggggagttgataaagaaagggttttgcaaggcagaacagcagtggaggtatattttgatttcatgagaagcttccgagtagaattcgatgagtattttgaggatgggatcatctcagaaattgagattggactaggggcttgtggagagctgcgatatccatcttatccagcaaaacatggctggaaataccctggcattggagaatttcagtgctatgacaggtacttacagaaaagtttgagaaaggctgcagaagcacgagggcataccatatgggcaagaggacctgacaatgctggccattataattctgaaccaaatctcactggatttttttgtgatggaggagattatgatagctactatggccgttttttcctcagctggtactcccaggcattggtggatcacgcggaccgtgtactgatgttagcaaggctggcttttgagggtacaaacattgctgttaaggtctccggggtgcactggtggtataaaactgccagtcatgctgctgaattgactgccggattttacaacccgtgtaaccgtgatggctatgctccaattgctgcagtattaaagaaatacgatgctgctttgaactttacatgtgttgaattgcgcaccatggaccagcatgaggtataccctgaggcatttgcagatccagagggcctagtatggcaggtgctaaatgctgcgtgggatgctggtatacaagtggctagtgagaacgctctaccttgctatgatagggatggattcaacaagattttggagaatgccaaacctctgaatgacccagacggacggcatttgttaggtttcacctacctaaggcttggcaaagatctgtttgagagacccaacttttttgaatttgagcgcttcatcaagagaatgcatggtgaggcggttcttgatctgcaagtataagattggtagcatattgcatacacgtatacaagtgactgattggctcaggccttatggcttacatttttttcttcttttgctttgtgtttttaggcggtaatatcagctgatttttgagctgttaaatagagaactcgctgctcaatttttaactctagtcttcaagaaggaagacgagttgagttccgt

SEQ ID NO: 3658 - DNA, 1010 bp, Zea mays
  Clone ID: 700334243_FLI
cagaggtccgctgacgttaaggacatgctgcgcaagtatatgtcacttgtacagcttctagaaagtgtcgacctcggtggaatgaaaaacgaggagaagcttgctttctggatcaacgtgcataacgcgatgatgatgcatgcccatatagagtacgggatcccacagagcaacagcaaaaggatactgcttaccaaggtatcctacatcgttagtggccagagagtaaacgcggagctgatagagtaccagatcctgtgctgccgagcacactcttctggacagtggcttcggctgctgctccacccgaaatggaagtccggcagggacagggacgaggagctgcaaggcttcgccgtggatcggcccgagcctctggtgcacttcgcactgtcctccggtagctactcggatccagtggtgcggctctacagccccaagagcctgttccagcagctggaggcggcgaaggaggagcacatccgcgccaacgtcgccgtcggcgtgcgcgggcgggggcagcgcaagatcatcctccccagggccctggagctgtacgcgagggacgccgggctgggtgcgcaggaggtggtggccgcggtcgcgtgccacctgcccgacggcctccgggacgccgtgcgccggagcccgccggccgggcgggcgcgcggcggcgtggagtggaagccccacaacctggcgttccggtacctgctggccaaggagctggtcggcgggtcgcccgcgtgcgggcggcagcaacttaagaaatgcggccccccgatcggtgcgccgctgcgtgctgatcggtgatccgtcagcagatcgccgtgggtccgtggccgtgccgagccgagcccgaggtgcggtgcgggggtatcagggtctgtatgtacagagggagatggacaggaagatgatctgaatagtgtgcgctctgctgtagctagtttggatcattctgattggatgggattgaaatgaatatgagtgtatcctaacttgccctc

SEQ ID NO: 3659 - DNA, 903 bp, Zea mays
  Clone ID: 700334249_FLI
gtcatcctgcggggcttggccacgtaccgcgccaagcgtggcgtcctccccggctccacatacgacatttctaagctccacggtcgcatccggagcgagctcagcgttaaggtaaccaccacgcagctaggtgacaaggtacggcgtctcaagcagaagtacaacctgcttgcgtcacgtggcaagagtgggcgggatccagacttgcccagccagcacgaacagagcgtctatgagattggcaagaaggtttggggagcaagtgctaacggtggaggaagtaccggtggtgatgggtacgagattggtggtgacagcgaagaggagcatgagtttcgagagagtgacgaggatgtggagaatggccgagatgaacgtgcccgcaagaacaggagggttatgccaatcgccatggcaaacgggaacggggctgggttgggggctgtgaatgccaatagcagagggaagtttgaaactgagaagggaaaggatgcttacccctacctttgggagactgtggaggatctgtcaaaggagcacccgaacggggtagcattcaagaaggccttcgagtcgatcgaaggccccaaagcgcgtgggatggaggaaaagctgcgaaagttcaggttgacagagatcagacaccagctgcgccgtatggaactgatgaaggagacggtgaagatggtgctcgatgcgctggagggttgaccgagactgaatgatcttccggtcttcttttgtttctagatagagtttttgtggctgagttacttaacttttatggacaaaggtgcacttgtcacagtaagaatataggtacagaaagaaagtgagactgatggtgtttcccttgttcctgtggatcatagtgttttgtgtgtcatacatgatacatgtgct

SEQ ID NO: 3660 - DNA, 1050 bp, Zea mays
  Clone ID: 700334279_FLI
cttcaaacacactccaactccaagcctcaataatctcgatctctgtaatgaccaagaagctcgtctccatctccaccatggccgggaagcaaggttgcaaggagcagtccaatgatcggaggatccaggcttcgatccaaggagacgccaagagcgtggtggtggggttcggcggtaggctggtctcccgtgagcaggaggacgccatcatcgtcgcggcgctgcggcacgtggtgtccgggtacagcacgccgccgccggaggtcgtcgtcacggtggcgggcggggaggcgtgcgggacctgcggcatcgacgggtgcctcggctgcgacttcttcggggcgccggagctggcgcaggaggcagtgtcctgcggcacagggcaggtggcgacgacggcgtcggtcgggggcggggcagcggcggcggcgctgaggccccggcggcgtaggaacaggaacatgtaccgcggcgtgcggcagcggccgtggggcaagtgggcggcggagatccgcgacccgcggcgcgcggcgcgcgtgtggctgggcacgttcgacaccgcggaggaggccgccagggcctacgactgcgccgcggtcgagttccgcggcccgcgcgcgaagctcaacttcccgggccacgaggcgctgttccagggccacggcgacaccgcggcggcggcggacaccgagacactgacgccgtcgccgggagagtggcagctgggcggcggagcaggagacgagctgtgggaaggtctacaggacctcatgaagcaggacgaggtggaccgctggctcgcgccggttttcggcgccgcgtctagtttttgagctgttgtactgtgcacacacaagcgtggttactgacaggatcacagctagactgaccaccattcttttgctgtctattgaactagttggttcttttgtagcgtatttttttagggaaacatgattcttttttttttttgccgtgtgttgattgggatatagagagttttttttcctctcttgatggaagtacttgggaagctatgttgatagactg

SEQ ID NO: 3661 - DNA, 822 bp, Zea mays
  Clone ID: 700334343_FLI
cacgggcttcgagggcgtgtcgacgctggtggacgtgggcggcggcgtgggcgccacgctgcacgccatcacgtcccgccacccgcacatctccggggtcaacttcgacctgccgcacgtcatctccgaggcgccgccgttccccggcgtgcgccacgtgggcggggacatgttcgcgtccgtgcccgccggcgacgccatcctcatgaagtggatcctccacgactggagcgacgcgcactgcgccacgctgctcaagaactgctacgacgcgctgccggaaaatggcaaggtcatcgtcgtcgagtgcgtgctgccggtcaacacggaggccacccccaaggcgcagggcgtcttccacgtcgacatgatcatgctcgcgcacaaccccggcggcaaggagcggtacgagcgcgagttccgcgagctcgcaaagggcgccggcttctccgggttcaaggccacctacatctacgccaacgcctgggccatcgagttcatcaagtgaaccaccgtcgccgcgatgagatggcatggctgccacatgctttgcttgcttggtcctcgtatcgtacgtcgccgtcgtcgtcttcttctggttattgcgctgctacctcgctgctctcgcgtatgcatgtacttttgcttaattttctttcttcatatcatgcactctggctggcctagactgcccccgatccatggtggccggtacgtcttgtcgagctcttgcatgtcgtggattctaaattcttcttctgcgtcgaattgtctctgccatgtgcgagtaataacaatcaaggttatacttacgatacaatt

SEQ ID NO: 3662 - DNA, 1262 bp, Zea mays
  Clone ID: 700334458_FLI
gttgctgttggttctttcttgagttcaatggtgcttgtggttactaaagaatctaaaaagttctgccctgaagcaattggtttcctgcaatctcttttggtaacatcacttaaaggaaaagtggaaactcatctgcacaatcagattaacgatcaatttatggagctcaagactttaaaactgtggctcagtatccatgaccatgtgcatgaggtgaatccagtgaatatcctagaaatagttggcatggatcctgacgccccttatttctcatctgataactttaaggctggtgtacttttatctgtggcagaatgtttaagaggttttgttattatacatgaagggctatcttctttcccggaaatcttccttccaatatcctctttgctgcaagaaattttggatagatctgagttgcctggatcgttacaagacattttccatgaagtcattgacttgatcaaaaagagaagtgatgaacactatgcttcaagggagcccctccgaatgcggaagaagaagcccgaaccaattaagcaattgaatccaaaatttgaagagaactacatcaagggtcttgattatgatcctgatcgagaaagggcacaaatgaagaagctgcggaagcgtgtcaagagtgagatgaagggggcgaagcgtgagctgcaaaaggataattatttcctgtctgctgtgaaggagaaagagaggaggaagcgagatgaagagagagctgagatgtatggaaaagccatggcgttccttcaagaacaggaaagtgctttcaaatctggacagctggggaaaggaaagggtaggaaaaggatgcggtgatactctattgcaggggggcagctcggccagtgtaaatatacgggattgtgtttgctcaccctcttcccgcggtactggagggtggatccagctgattactgtatcgtgagctgctcagagtttgtcgtgcctacaagagcagggtgggcctagtcttatggaacatctccacctgcttactcctaaagctttgcctataaaattgtaacgccacaaacactttacaaggcttctccttggtgaactaccacacctgggaaatgctttatttcttttgtaccgtggagtggcttgcatctatgttatatactggtgccatagtaattttcagaagcacagtgaagagtttttattattttcatttttgttgtactctgacatgtgagccctataagtatggcaattttggcacggttttgcagtag

SEQ ID NO: 3663 - DNA, 1371 bp, Zea mays
  Clone ID: 700334461_FLI
ggtcagcgaggaattatcaaaggaaactatggagatgctggctgagattctcctactctttctttttactgctctgttcagaaggtgaatctcagcagtaaaaagaaagagtaggagaatggtgcatttgcttgtacagtttgttgtactatgccttgataattccaaggtttaccccttcctcccaaactttcctggccctggtggtttaactccgttgcatcttgctgcatccattgagaatgcagaggatatagttgacgccttgacagatgatcctcaacaggttggtttgacctgttggcagtcagctttagacgaagatggccaatctcctgaaacatatgccaagttgaggaatcataattcatataatgagcttgtagcacaaaagctggtggacatgaagaacagccaggttactataacggtcaatggcgatgaaattcatatggatcagttagggaatgttgatgaccgtaaaaaatctggggttcaggcattgcaaataagatcttgctcccagtgtgccattttggagtctggtgtgttaaggcagcctatgcggtcaaggggactgcttgctcggccttatattcattcaatgcttgctatagcagcagtctgcgtatgcgtctgtgtattcatgcgagctttgctgcggatcaattctggaaaatccttcaagtgggagaggctggattacggtacaatataattgtggggacacacctgagccttgtggtattattaagttaacaagcagttgttatggagctattttggagccttgaagggtatggagattgtttcatgcttcctcgaaactcgcccatccgtatggctgagtggaataatgtaatatttttgctggacaattcctttacttcctgtgaaatagaagtgttaataggtgagcagccggagatgttaggggggtggcaaaacttggtaccaaatgtggagcttgagcagagttggaacatgtcatggcaagggccgtagcaactgcgctcccacaacatgatatgcatgcaatgcacaaaatgtcgatatggatgcaatccgcaagatggatgtaatcacagttcggggagaatgagcaagtaagtaaccttggtttcctttttgctgctgtaagctcgactcttttggttcatgtatcccaagaatgatgtttaatttatcttgctcactgtttcatatttttgtgtgtgtgtgtattaaatacagtacgctagcatgaatgtaccctatatcgactttagatagtagcaggggtaaatgaaaagaggctttgcatatgtctgtgtcgaccattttgacttgtagctacatagaaatgaggcagatctgaagtgtacttggatc

SEQ ID NO: 3664 - DNA, 809 bp, Zea mays
  Clone ID: 700334483_FLI
gattgccattagcgacgttctaatgtattacctgaagtccgtatttggctttgacaaggatcagttctcagagattctaatggttgtcggcgtcggttcaatcttttcgcagattctggtcctccccttccttagccaaataattggtgaaaagggcgtcttatgcatttcaatactcgcatccattgcttatgctttgctttatggtgttgcatgggcttcgtgggttccatattttagctcttcattgggtatcatctatgttctggccaaaccagcaatatatgcgataatttctggtgaagtactgtcaactgaccagggaaaagcgcaaggttttattgcaaccgtgcagtctgtagctatattgttggcaccactatttatgagtccactgacctcttacttcatttcagaggaagcgcccttcgactgcaaaggtttcagctttattgtggcgagtttcttcttggcaatctcgttctgcctcgcttggatgcttaacccaggaatgaaggacaagggcacaaaagctgccgtttcagacagcgctgatgaggaagcagcgcaagcaccactactggcaaaatggaacagaccatgactccaggaaactgagctataaagctcagctggagtgtgcgtaaaattgtaggatatgtgaattagagtgccaacaacatagggcttgcctgtacctgtagtatagtgtctgtacataccccagaacgagaaagccgataaagctcggtgttttgtgccatccagccttcactgtttcaggcaaatggatctttatattatgtgct

SEQ ID NO: 3665 - DNA, 902 bp, Zea mays
  Clone ID: 700334517_FLI
gctaaaagggcatacttgtgctcgtataaaattgagaaagacatcaaatgatctgtacatcttgatcaactttgcagaatctgaatgaacatcctgatgcttggccattcaaagagcctgtggattcacgggatgttccagactattatgatatcatcaaagatcctattgatttaagaacaatgttaagaagagtcgactcggaacaatattatgtgaccctagagatgtttgtagccgacatgaagagaatgttcagcaatgcaagaacttacaattctccagatactatctattacaaatgtgcgacacggtgagtattctttttacgtacattattctcgcagccagggatgggtatgttcctggcaagtaagctaggacctgggttgccaacatctagtttctcgagattttctaaccggctgctttatcatgtttagttgttcacattatctgacctaatattatcaaccatgccattctatcttctaaatggcacaatgcccagcttaaatctggccggtacagtttatgccagctggcagactagggttgcatctctggcgctgccacgtgactatcgattttgttggttttggtcacgcaggcttgaaaacttcttctcgggcagaattactgtactgcttgcacaactctcaaccaagagctaggctggcgtgggctcactggactggacactactgtcgcatgttgtaaaattattaagttgtattgatatagttgtcaccttgctgaatgttacgcacggtgatgaacttttagtttagcatgtagtttttattttaaccaggagggacactgattgatctttacatttcggtctcaacctggccggcctaataatatagattgaggagattcttcagtttccagcaaac

SEQ ID NO: 3666 - DNA, 2025 bp, Zea mays
  Clone ID: 700334563_FLI
gccacttcgattgtccgctgcatgaatccggctccgcgcgcccaattccctgcaaagccccagtctctggcgatttttttcttggaagatttcttcattctttagtggcgcccaattctgctgggaggggggttcttgggagggagatccaccatttcgtttcggcttgagcagccggggagctgagcagcgcggcgcccatgtcggactccgagctgtcccagggcacgctagtgttcggcctccacctctgggagctcgtcggcatcggtgtcggtgccgcattcgtgctcctcctcgtcctcctctccctgctctgcctcctcgcctcccgccgccgccgacgccgccgtgctgcccccgtcctccacctccccgccgtcgtgcccaatgcccagcccaagcaccccaccaagccccccaaggacatccaagaggtgccctcccgcggcaccgcggcccccgccgccccggccaaggcgccgctcgcccaggtgctgcaggcgccgccgccgggactccatccagatcgagacggggaaggagcaccgtatcacgttcccggagcagccgccgcccccgcaccaccagcggagcggggggccgtcgtctcggggcgccagcggggagagccgtggcggtggtggggaaccgggggtcccggaggtatcgcacctggggtggggccactggtacacactcaaggagctggaggacgccacgtgcatgttcgccgacgagaaggtgatcggcgagggcggctacggcatagtgtaccacggcgtgctggagggcggagtgcaggtcgccgtcaaaaacttgctcaacaacagggggcaggcagaacgggaattcaaggttgaggtggaagctatcgggcgagtgcgacacaagaaccttgttcggttgttaggatactgcgctgaaggcaaccaaaggatgcttgtgtatgagtacgttaataatggaaacttggagcaatggctccatggggatgttggccctgtgagccctcttacatgggatatcagaatgaagattattctgggaacagcaaaagggttaatgtatttgcacgagggacttgagccaaaggttgttcaccgtgatgtcaagtcgagcaatattcttcttgacaagcattggaatgcaaagctttctgattttgggctagcgaaacttttgggttcagaaaggagttatgtcacaaccagggtcatggggacgtttgggtatgttgcaccagagtatgcgggcactggcatgttgaatgaaactagcgatgtctatagtttcggaattcttatcatggaaataatatctggccgtgtacctgttgattacaacaggccgccaggggagattaatctagttgagtggctgaagacgatggtcagcaacagaaattctgagggggttttggatccaaagatgactgagaagcctacttctagggcattgaagaaggctttgctagtggctctgcggtgcgtagaccctgaagctcgcaagaggccaaagattgggcatgtcattcacatgcttgaggttgacgatttcccgtacagagatgagcgccggggtggcaaagctccagcccaagcaagatcggtggaaacgccacctgcaagcgaacctggcgatagcagcggaaacaacactccaaaggacgcaccgaatggagaacctttcaagtggagaaactaagaggactagcttggctagccaccaggaaaacggtggttgcgcttgagtttgtgcctgataaagaagctggatatggttggttggttggttggtcgggcatgcaaactccacaagcaccagtgtcggtcgtcgtcgtcgtgacagtatctgtacattgttgaatcgatatgttagccatagcgatttttttccagttggttttcttggggccgtatatttatgcgaaggatgattttgtgtgataaaggcgcgcgcgctcgtgtgtattcctgaggcgaaaaaaagactgagcattgctatagctgaaaccgttccagt

SEQ ID NO: 3667 - DNA, 873 bp, Zea mays
  Clone ID: 700334566_FLI
ggcgaggagtgtttggaggcgtaattctgaacatgcatttgcattggaaaaaacatgaaactgtgaaggtcatatgtaagccctgcaaaccagggcagatccaggaatatgcaaacgagatagcccgactgagcggtggcatccctgtcaacgtcattggagatgacaccatagtcttctatcgaggaaagagctatgttcagccagaagttatgtcacctgttgatacactgtcaaagaaaaaggcacttgaaaaatcaaaatacgaacagtcgctggagacagttcggcgtttcattgcaatatccgagaaggaacttgagctttattaccggcatgtcgcactttatggaatttcacaatcccagaaatctgatcttgtttgcggtgatgatagagaagcttctttgctcaaaatggagggattggatcgagggaagggccaagagcctcacctggctacgaatcatttctctgatcttcacattggtgatgtttctgaatccgacgaggaagatagttccggcagtgaatatgatgctgacgacgacgacaacgagaccgaaagcatggccagcgtttctgaagacgctagctaatgtttctgatcatggaggtttagccaattggggcgggcgaagtgtggttaccttgcctcacataatgaccttgttggctagaaatttgccttggatcgagccacctcatcataacatgcttctgttgtcagctgtaattaagcttcttcttcttctttttttggtgtggcggtttaccttgaaggacttgatgtatgccagtacaacaaattcagccaaatgtggccgtgtatctaacatatccttgtaataaaattgctccctccttgctgtc

SEQ ID NO: 3668 - DNA, 1152 bp, Zea mays
  Clone ID: 700334635_FLI
caaggacattattgttgcgaatataacattgaggaactcacctttctggcacttgcatccttatgattgcacaaatgtgactgtttcgaatgttactatcatgtctcctgtttctggtgctccaaacacagatggcatagatccagattcttgtcaggatgtgcttattgagaattgctacatatcggttggcgatgatgcaatagctataaagagtggttgggatcagtatggtattgcatacggtcgtccatcttctgacattttaattcgcaatgtaaccgcccgttctcttgtgagtgctggaatttcaataggcagtgagatgtctggcggagttgcaaatgttactgtggagaatgtgcgcatctgggaatcaaggagaggtgtgaggataaagactgccacaggaagaggcggctacatccgtaacatctcataccgcaacataactttcgacaatgtccgtgctgggattgtgataaaggttgactacaacgagcacgctgatgatggatacgaccggactgccttcccagacatcacaagcatatcattcaagggaatccatgggcagggtgttcgggtgcctgtccgagctcatggcagcgacgtcatccccatcaaggacatcagcttccaggacatgtcggtaggcatcagctacaagaagaagcacatcttccagtgctcctacctcgaggggcgtgtcatcaggcctgtgttcccgaaaccatgtgagaacctggacgtctatgatgagcaagggcagcttgtgaagcgggcagtggccctaaacagcacagaacttgactacgatatatgaggtgcacatatcataccacagctttgatagttgtagtggaaattggtgctctctaccctcagaaatcaattttctccgattgtccatggctttttgggtctagaattgtagatagagaggagattttcctcttgataggtttgctgcttacagtggctgaatgtatctcaccggcgatttactgatttgtccatgaacatttgtaatcgccagaaccttcctggcgacaaatgtatgctgtcaatatattgtacacctgaagattgtattggagtatacacagtacatgatctctaaatatctgccagcagatttttctaaaacag

SEQ ID NO: 3669 - DNA, 2227 bp, Zea mays
  Clone ID: 700334655_FLI
ggagctcaaccgactcgggaccaaaatcggctgctgttgctgcctgggacgaaatcggaggcatccgcctttctcgagagatcgagctccgcgccggagcaggcgggccaggcggtgccgctgctggtatctggtgggtttacaacatagggatggagtcgagatccatccggattcgacattcgaggtcttctgctttgctgttttaaacctgtagaggcagaggacttgggaatgctgaaaaatgtgcctgcaaaccgacgggggaattttttgtgcaaacaagattcgacctctgttcaagcagatattgttggcttctcatgagtatgggcttcatgctgatactgctcttcttttcaatgatttaaagcacagtagattgaaggcctttatatttgttggccatcaccttggagacgacggttaaaatcttctacattctttgataagtggtgtggcgcttgttcattattctatcgttgcatagtttgatacgatggatgggaggaggacaattttgatgggacgatatgaaattggtaaacagctgggacaaggaacctttgcaaaggtcttttatgctcgtaatcttactactggcctggctgttgccataaagatgattaacaaggacaaggtcatgaaggttgggctcatggagcagataaagagggagatctcaataatgaggttagtgaagcatccaaatattcttcagctttatgaggttatggctagcaagagcaaaatttattttgttctggagtatgctaaaggtggcgagcttttcaacaaaattgctaaggggggaaagctcagtgaggatgttgcgaggaaatatttccaacagttggtcagtgctgttgatttttgccacagccgaggtgtctatcaccgtgatttgaagcctgaaaaccttctacttgatgagaatgaaaaccttaaagtctcagattttggcctaagtgctctagctgagtccaagaggcaagatggtctcctgcatacaacatgtggaactccagcttatgttgctcctgaagtgctgagtagaaaaggttatgatggtgcaaaggcagatgtttggtcttgtggagtaattctttttgtgcttgtggctggttaccttcctttccatgacacaaatttgatagagatgtacaggaagatttccagagccgagtttagatgccctcgttttttctcaactgagctgaaggatctgctacataaaatccttgttccagatccaagcactagaatttctatctcgaggataaagaggagtgcttggtacagaaaaccggttgaagcacatgcaaagaaaaatgaggcagaaacaagcgagaatacttgtaccggtgaaggtacaacttctgtctcaacagagtgcagtacgtctgagggaaatcaagggccattaagcctcccaaacttgaatgcatttgacatcatctgtctctcaacaggttttaatctttctgggttttttgaggataagtatggtcgcagggaagagagatttactaccagacagcctgtaacaacagtatttacaaagctgaaggagcttgccaaacgcctaaagttgaaggtcaataagaaagaaaatgggaccttgaaattggcagctccgaaggaaggaaagaagggtatgcttgagcttgatgcagagatttttgaggttgctccttctttgctcttagttgagttgaaaaaaaaccaatggggacacgctggagtatcaaaagctagtgaaagaggagataaggccggcactgaaggatattgtttgggtttggcaagatgatcaacaccagtgctcacaattaccagagtctctattatcaccaccggagacacaggatgaattgcgattatcattgcctcagcaagagggtcaagacttcttagaagccccattgccatcactatcgcttgaccagttgaaatcaccaactgccccagagcaagcagagcaactgccacaaccagaacagttgcaaacgccaatcgctccagaggagcaaattaactagctctaacagccagctggtaattcatatgcccctctcagtcatagttcatagttctattccggtttttactctttgttccggcttttctatttcttctggaattgtaaagctgtatgcctgtatgtactgcagaaatgccatgtattccagtttgaaatgatataatacatcatacatccgatgtt

SEQ ID NO: 3670 - DNA, 809 bp, Zea mays
  Clone ID: 700334679_FLI
aaagggaacacttaattcctgcaagattgggtactagacaatttataaggcggcaaccatcagataggggtttccccagaattatatcttcatcaacgatggatacacggagtgatctctctgccattgagaatcaggttcggaagctgattgatgatttgaaaagtgattccatagatgttcagagatcagcagcatcagatcttcgttctctagctaagcacaacatggagaataggattgtcattgcaaactgtggggctgtaaacgtgctggttggtcttcttcattcaccagatgccaaaacccaagaacatgctgtgacagctcttttgaatttgtcgatcaatgacaacaataaaattgctattgcaaatgctgatgctgtcgaccctctcattcatgtccttgagactgggaaccctgaagctaaagagaattcagcagctactctattcagtctctcggttgttgaagaaaataaagtgaggattggacgatctggtgccatcaagcctctagtagacttgctaggaaatggcacccctcgaggaaagaaagacgcagctacagcattgtttaacctgtcgattcttcatgagaataaagctcgcatcgtgcaagctgatgctgtacagcatctggttgagcttatggatcctgctgctggaatggtcgacaaagctgtggctgtgttggcaaaccttgctacgataccagaaggaaggaatgcgattgggcaggcacgtggcattccagcccttgttgaagttgttgagttgggctctgcaagagggaaggagaatgct

SEQ ID NO: 3671 - DNA, 1596 bp, Zea mays
  Clone ID: 700334725_FLI
gcatgagccgatctcagagatcaagaagcattgaacttctggagaagcacaaggatttactgaatctttttaatagaatggagagttctataaggttgctacgcttacggaagaggatggctacatttaataatattgccacccaggtggaaatactcgcaaaaaggaagttatcgtactgtcatttggcccaaatgaagtatttgtttccagaagcaatccagattaagagggtacttctacatgacgagaaaagcctatgcatgtatgctgatatggaaatcatacttgtaatggatgttgtggaatacacaagtactgatcactctccatccatgacaatttgcgatgctttttactcgaagcttttgacatttttggatgctcatcataagggtacagacattccagaggcaatcttaccagaaccctttaacttgaggtcaaggggccagttaaatcttgaggcatcacataatggacatgctgctgagccacatctgcaaggcaccactaaggatggattctcaaatgcttcccacttcccacaatcttttcgaaagctaatgtcccagaaagtcattactgatggagctgaaaggactcaattgctacttgatccaacaaaactgagctctgtgagtgcttatgatacagaaggaacaaacagaagccctaaaaagcaagacaaacatgcttcagttacagtgaactctgaaatttctgctactccaagccgtcatttgatctctcgttgtcaagagggtacgccaaaacaagagaccttagaatcaccactgttggctcaaacaccagcaactcagacacccaaaaggcaattgcccactccacttgagaaacttgaggccacatgtggacacatttctgaaccacgttcagctagttctgcccgcagatcactaaatacatctttaaaatttgaagggggaagcccttcttatcatgatagaatggaacatgtggctacatctaaaattggaattctctcggaagattcatctagtttcaacaagtcattagaggagaatggtcctgtcttctttactgatagagacaaaatcaatctggcagacccagtgggtgtccaggaaaagatggcttcgttacgttccacatttggcatcgtctgcgatatttctcattctatcaagaattcgctaattacaaaacaggagcttttccataatattcttgccaacaacttggagatagaacagatgggagagatagaagagcagctacatattttagaggatctggctcccaattggatatctaagaaggtgataaatggagaagaaatactttacagctttgaaactatagcagatcagaattcagtgtgggaaaggcttgtagaagctgtgtgaggtgtggaatagctgggattggtttaaagctaaagaatcagccgcatagtactatgtatgtaacgctaacggaacccatcaaacagccacattttctcatcatggaatcctcaggattgctcgtcttattcaattttaattttttcttctgttgcattgctaatgtgctaattacatgcttaatactgaaatttctacaagacat

SEQ ID NO: 3672 - DNA, 3060 bp, Zea mays
  Clone ID: 700334747_FLI
gcttttcactagtttggattcggacttcctgagctccgccgattccttcctcctccacctcctctcctcccccagccgccgccgctgctcatcttatctttatctcatccccatcgcccgcccttgctccgcccccgggaatcgtcgatggcggcgtcggcgttgtggcagccgcaggagcaggggctccgcgagatctgcgcccacctggaggcgcatatctcacccaactctgaccaggcccgcatctggcagcagctccagcagtacagccagttccccgacttcaacaattacctactcttcatcctggcccgcggagaggggaaatctattgaagttagacaggcagctggtctattactgaaaaacaatctgcgaacgacttacatttccatgcaatcttcatcccagcattatgttaagtctgagctgttaccatgtataggggcaaccaatagggcaattagatccacagttggaacagtgatcagtgtgcttttccaaattgtacgagttgctggatggattgagttgtttcaggcactccataagtgtttggagagtaatgacctggatcacatggaaggtgctatggatgcgatatacaagatctgtgaggatgtccctgaagagcttgatgttgatgttcctggtttgtctgaacgaccgatcaacgtgtttatgccaagaatactgcagtttttccagtcaccacatgcaagtttgagaaaactatcattgggtatcataaaccagtacatagtagtgatgccatcggcactctacatgtctatggatcagtatattcagggattattcaaccttgcaaaggactcttcagcagatgttcggaaactggtttgttcagcctgggttcagctcattgaagttcgcccatcaattttggagccacatcttaaaaatgttactgaattgattctgcaagctaataaagattcagatgatgaagttgctctggaagcttgtgagttctggtctgcatactgtgatgtgagcatgcctcctgaaggtttacaggagttcttgccgcacttaatcccgactttgttgtcgaacatggtatatgctgacggcgatgagtcccttgatgatgctgaggaagatgaatcctttccagacagggaccaggatttgaagccccgcttccatgattctcgattgcatggatcggaaactggagatgacgatgatgatgctgatgctgtaaatgtctggaacctgcggaagtgtagtgctgctgggttggatgttctctctaatgtgtttggtgacagcatccttccaactttaatgccattgattgagcaaaacttggctcgaacagatgatgattcttggaaggagagggaaactgctgttttatgtctaggcgctatagcagaggggtgcattagtggtctatacccacaccttcctcagattgttgcctttctaatcccacttcttgatgataaatttcctcttatacggagtattacgtgttggacgctctctcgatacagcaaattcattgttcagagccttgatcatccaaatggacgcggacaatttgataagattcttatgggagtgctcagaaggatattggatactaacaaaagagtgcaagaggctgcttgttcggcgtttgcaatccttgaagaggaagcttctgaagaattagtaccccatttggaagtaattttgcagcacctcatgtgtgcctatagaaaataccagagacgaaatctccggatactctatgacgccctcggtaccctggctgatgctgttggagcagaattaaatcaggcaaaatatctagacatatttatgccgcctttaatcacaaagtggcagcaactttccaattatgacaaagatctatttccactccttgaatgctttacatctatcgcacaggcattgggaccaggatttgctcagtttgcggaaccagtgtttcaaaggtgcattaatcttatccattcgcaacagttgtcaaagattgatcctactgcagctggtgcggtgtatgatagagaattcattgtttgttcgttggacctactatcaggacttgcagaaggtcttggcgctggtattgaaagtcttgttgcacagagcaatttgagagatctacttttgcaatgctgcatggatgaagcagctgatgttcgacaaagtgcccttgcacttcttggagacctttctagggtttgcccaatacatttgcatccacgccttcaagaatttcttactgttgcagcgaagcaactgaaccctcaatctgtgaaggatgcggtatcagtagctaacaatgcttgttgggctattggagaattagcaatcaagattggcaaagaaatagcgcctgtggtgatcaccgttgtttcgtgcttggttcccattctaaaatccccagagggttcgaacaagtcacttgttgaaaacagcgcgatcactcttgggaggcttagctgggtgtgtccagacatcgtggcccctcatatggagcatttcatgcaagcatggtgcaaggcgttgtgcatgatcagagatgattttgagaaagaggactcgtttcatggattgtgtgcaatggtggcagcaaaccctacaggaggcgccggttcattagcttacatctgccaggcctgtgcgagttggactgagataaaaagtgaaggtcttcacaatgaggtgtgccagattctgaatggctacaagcagctgcttggaaacggtgggtgggaacaatgcatggccaccctgcaaccggatgttgtgcagaaattagctagatacggagtatgatggcagtggtcgtgtggtttcatcatctttttacgctggagacagagatcaggatggttggttgggtcacttgctcgtccctcccgcctcccagtcccaggcaaggcgacattgatgaaagaaaggtttttgtagcgtgtaattcttttcttcctcttcctcttagcaggtgagtccaaaattacattaccaattcatttttgcccaataataaaagatgaagatccatgggatttgttt

SEQ ID NO: 3673 - DNA, 703 bp, Zea mays
  Clone ID: 700334779_FLI
caaagagcccagagcccgggaggttacttcgctgcctgaggagtccccggcaccggaggtcttgctaccggctggcggcttcttcttccgttcctccccaagtcctcttcccggaggaatcatgatcgtctgcgtcgccgttgtcggccaccagaacaatccgctgtacctgcagagcttcacggaggcggacgacgccctcaagctccaccacatcgtccactgctctctcgacgtcatcgacgagcgagtgagcaatcctaagaggagtgcacctacattgaatgagacatttttgggtcttctatacccaactgagaactacaaagtgtatggctatttgacaaacacaaaggtcaaatttatcatggtcacgactgatcttgatgtcaaagatgcagatgcccgaaattttttcaggaagttccatgctgcatatgtagatgccgtctcgaacccgttccatgtcccagggaagaagattgcttcaagaagctttggcgcaagagtaagcaccatcgttaaatccttcggttcagggtccagttgatcgaatgccacttttgtcagactttctgtaatcaaacatatgtgttctctctctgtttgacaaaattactccctaccgtgtactgcttgtctggtgaacgagatgctattggtactgattgctgaacaaagaaaaatagtggtttattcattc

SEQ ID NO: 3674 - DNA, 598 bp, Zea mays
  Clone ID: 700334786_FLI
ccagctaaccacttccccaacccccaatccatatctagcattctactgtagtggcaacgatgatggccgtgtctctgcagctgcgcccaatccctcgtctccctccgtcgagaaatcgctgcgcaggcacaagtccgcggatggccgccttgagctgcagatacaaccagcctaccaatgtgcaagggcgaacaaggctcacaagccacataacacgcagagatgccctgtcgttcatgtcatccggcgtgctggccgcattcgtgctcgtggtggccagtccggcagaagctagaccttcgagattggagaacaaaaggaaagccctggagaagcttgagaagctccgggagaaggcgttaggcccgaaggagaagagcggagccaccggtaacggtaaggagatgccccctccggcgaacttgctaatccctcctgccgccgtggaggctttcttgtgaaaggcagtctgccgatggacccttcccttgtgttaaatggcgaggctagtctgagtttgtacgttgttggagtcttgtatgactatgccaactggaaaatgaaatgaaagtgagcttgcatgcttagctgaaagttt

SEQ ID NO: 3675 - DNA, 901 bp, Zea mays
  Clone ID: 700334874_FLI
ccaccatggccgctcgccggagcactagccccgcccggcacggcgtcctccccgccctccttctcatcctatgctcgtccctcccttccctcgccgccgcataccgcccaggcgacatcgtcccgatgctccgctcgggccagtaccacggctcgaggtcggtgtggttcgacgtggtggggcgccattgcccggccttcgcggtcaaccgggaggtgctgatgccgatcccaaagcctacggggttcactggtgctgatccgtacaagataacatttcaaattggacatgaaaagttccatgttccttggctttatgttataaatcgcaaaacctctgaagttccactgatcgatttccatttgaagtactctggaaatgatatacttggggtgacagctaaagttgtggacatgcctcaccactacgtggaagttcatcctgacataaagaagaatttctgggatccacagaattggccaaaatacgttcttgttagatatacatgggaggagcaatcagagatagatgttactggaggattttatgtgttatttggatccgggcttgttttgtccttcattcttgcaatatatgtcctacagtcatctcaagagaagttgacaaggtttgtgcgagaagcagttgcagatagtagcctcccagatggagttgcaaaggtcgagtgatgacctgtctacgatgagctgtcttattacccactaatttctacactgatcagaacctcaagttttttaacagtcaactttcttagctgcggaacgagtaatacaacagagtagcatacatatgaagagctagtggtttatttgattctcttgtgcatgctcttaaaccaactttgcttatatggtggaagtgcataatttcatttccaggc

SEQ ID NO: 3676 - DNA, 3167 bp, Zea mays
  Clone ID: 700334889_FLI
cttcaatctttggcgatggtggtccccttggcgccggtgatctgcatgtgcctgtgatctactgctggctgcatcacctcaatagtctacctgggggcgtatgacagcgaggaggcagctgctcgtgcctatgacctcgcagctctcaagtactggggtcctgagactctgctcaacttccctgtggaggattactccagcgagatgccggagatggaggccgtgtcccgggaggagtacctggcctccctccgccgcaggagcagcggcttctccaggggcgtctccaagtacagaggcgtcgccaggtgcttatactgcttatattattctactgtgttactatgtgctaatcttgattccagcacctacatctcgattgatcacctagtagcaaatggtagggtgtataaatctgctagctcaatcagcacatgcactgaccatggaatgatggaacacacctggcatggcaagaggctgtgcagctcccaagtgcaaaaaaatggatgtcacactggattgtgaaatggggtccaggctgcaggcacactaactcacaccggcgttctctagttgcattgggtgacagacacggcacaagatgaggtccaactgtaacctataacgtcagaggcacacgcatcacctgggcgggcctgtggcacgtcacacacgccagccatgtcatgcatgactcatcacccacctggcattgtgcttctgtgcacctagaaaatgccagctctgaactgcatgcatcacagactactactaaaattgtttgtgaaaccagtgagtgcatcattcttcaaggatcaggatgcacgccttcaataagctaaaagaatgaatgttttttttcttcatgttcttgttgctttgatggtctaggcatcaccacaacgggaggtgggaggcacggattgggcgagtctttgggaacaagtacctctacttgggaacatttggtatggatggacaggcagcgtactacatacattccgcaatgataatctatggtttcatgctctttgcgcttcttttaacaagtcagttcacgccagcatttaagcgcagctcttgtttgttgtggaactgtcctactacttactgcaagggccacctaactttaaccagtttttatgaagttgatcaacctaactcctgcacgattgaatgactcgtatttcttagtttccattcaatgcaggcttggcaactcccttactactatattgcccccctattcagacatggtgatcctgactgcaacctctccttttcattataaaaaaaattcaaagataaaccctggatctgatcctccatcaaatcagatcatactatattgtccctgtcttgactgtcaagatcaagaccatgagaccaagataccactgtcctgtgagcgatccccagacggctgatcctcgacactccaacttagccataaaaatcagtggcataaaactgttggctagttaccagccaaaactacatgaccctccaagctcatgtgacaagcacgtgatgggagtagtcaccactcacctgccagccgctgctagtggcagtaacaatgagatggtgcctagggatcttcaattccccagcactgccgacctttttcatttctttctttctttttttcacttgtctgcgtgactcagcaatagcagccagtgatctcttcacgtgcagcaagcatgccctgtgtcaaaactagatcaagattcaagatccagaccacagatttgctttcacccccctattaccatcataaaagcctagtgacagaggaaaacacaaaggtttaactagttgcactgagactggatatgtccggtggctggcacatgtgcaagcaagcagcccaccgtccattcagattagttgagcagcctttgtctgcaattcagtatctcacattaagcataatctatgtgcatgctttttttttctttctttctaaaaccaacaaattatatacatttaccagaatctgtgtcaccaaacattttgtcttactttcgagaggcactactgtactctgagaacaagggcacttggacaaattttgcacttggacaaattagccaagcgtcatgtctgaacatctgtttttatccacccattcagacagactacttaaccattcgtccgcttctgcagacactcaagaagaggcagccaaggcctatgaccttgcggccattgaataccgtggcgtcaatgctgtaaccaacttcgacatcagctgctacctggaccacccgctgttcctggcacagctccaacaggagccacaggtggtgccggcactcaaccaagaacctcaacctgatcagagcgaaaccggaactacagagcaagagccggagtcaagcgaagccaagacaccggatggcagtgcagaacccgatgagaacgcggtgcctgacgacaccgcggagcccctcaccacagtcgacgacagcatcgaagagggcttatggagcccttgcatggattacgagctagacaccatgtcgagaccaaactttggcagctcaatcaatctgagcgagtggttcgctgacgcagacttcgactgcaacatcggatgcctgttcgatgggtgttctgcggctgacgaaggaagcaaggatggtgtaggtctggcagatttcagtctgtttgaggcaggtgatgtccagctgaaggatgttctttcggatatggaagaggggatacaacctccagcgatgatcagtgtgtgcaactaattctggaacccgaggaggttttcgctttccaggtgtcctgtcttgggtaatccttgatctgtctaatgccacagtgccactgcaccagagcagctgagaactttcttgtagaaagcccatggcagtttggcgttagacaagtgtgtcgatgttctttaattctttgaatttgcccctaggctgcttggctaacgttaagggtttgtcattgtctcacttagcctagattcaactaatcacatcctgaatctgaagtggttgtgcttgtgcagtatatcactgagtttacatggcatgatcatggcaacgcagccagtgcagcatagatttgttcgtttgaacagtttacaaggctgtaaccctagtaagctccagattaacgaaccctttgttttcccc

SEQ ID NO: 3677 - DNA, 684 bp, Zea mays
  Clone ID: 700334923_FLI
aggtatcaaaataacaagccaactacacctatgagatcacctgctagtaatgaagcccaagaatctttgaccattggtatagccgatgaacacattggtgctgttgtaggtcgagcaggaaggaacataacagagatcattcaggctagtggtgctcggatcaagatatcagataggggtgactatatatctgggacatctgacaggaaagtgacgattactggaacacccgaagctatccggaccgcggagtccatgatcatgcagagggtgtcagccagttcagagaggtgatgagccccttctgaaggaagggcgtaggccattgctgtgtccgagcacagcagcgtgtttgatgcaagttaggaggatgtgggaactgctttccttttattttccccccttttttcttttttcctagcaagctcgagcagaaaaaagaaacaagctgttattgtttgttgcattgcgtccaaccgatggttttatgttagtataaactgctagtcgaagataattaggtgcagcgtttgaattgatttgggtttacggttgagttatatcccgtgtatgccataacaaaggcagtcgccgctctgttgctagtggcaagcgctgcctgtcctgtgtctgtttgtacgttgacaatttgattccgttgctcaaggatagaagaatattgat

SEQ ID NO: 3678 - DNA, 816 bp, Zea mays
  Clone ID: 700334950_FLI
ctgaatctagctacgtaccatctctttcgaatcgcgatcaagtttatttggtgcggggtcggaacaggaagatgggtaaaacatgggcgctcatcacccacctccacgctctcgcagggccgagtctcactctgatataccctctgtacgcgtcgatctgcgcgatggagagcgcgaccagggtggacgacgagcagtggctggcctactggataatctactccttcatcaccctcttcgaaatggcggccgagcatgtcctctactggataccgctgcggtacgaggcgaagctgctgctggcggcgtggctggtcctgccgcacttcaggggcgcgtccttcatctacgacaggttcgtcagggagcagctgaggaagaacggggtgaggctgcacggtcaccaccacggccacgccgccgaccacgtgccgcacgtcttccaggctgagcatcgtcatggcgtgcacagctgagagccccgagaatcgtggttcttccgagaagaaattaaagctgaactgcgccaacgcggttcgttgtctgccgtcacctgaactgcgcaggaccgccgcgcgatccgtttctcggtcgtaagctacttgtgttgcactcacctgtaacagcatctcgacagagcacttgacttggacatcgtcactccactaggctcgtcctgctaattcacatggacctgattcttcagctggagaagttcctttgtaacgaataaatttcgacagagacgcatgattgcgtaactgtgtattgcttattgctgaaacattccgaatattggattgcttgtgcactgac

SEQ ID NO: 3679 - DNA, 1400 bp, Zea mays
  Clone ID: 700334992_FLI
tccaaaccagacaagcaaggaatcccccgatggctcatcgcgttctcctcctcctctctctcgcgtcggccgccgcggttgccgccgccgtcgacgcggaggacccgctgatccggcaggtggttcccggtggagatgacaacgatctggagctgaacgcggagtcccacttcctgagcttcgtgcagcggttcggcaagtcctacaaggacgccgacgagcacgcgtaccggctgtccgttttcaaggccaacctgcgccgcgcgcgccggcaccagctgctggacccgtcggcggagcacggcgtcactaagttctccgacctcacgccggcagagttccgccggacctacctcggcctccgcaagtcccggcgcgctctcctcagagaactcggggagtcggcgcacgaggcgcccgtgctccccaccgatggtctccccgacgatttcgactggagggaccacggcgccgtcggccccgtcaagaaccagggttcgtgcgggtcgtgctggtcgttcagcgcgtctggagcgctggagggtgcgcactacctcgcaactggcaagctggaggtgctttcggagcagcagttcgtcgactgtgaccacgagtgtgattcatcggagcctgattcatgtgattcgggttgcaatggtgggctaatgacgacggcattcagttatctccagaaggccggtggccttgagagtgagaaggattacccttacactgggagtgatggcaaatgcaagtttgacaagtccaagattgttgcttcagttcagaacttcagtgttgtgtctgtggacgaggctcaaatttctgctaacctcatcaaacatgggccattggcaatcggcatcaatgctgcctacatgcagacatacatcggaggcgtgtcatgcccatacatctgtggcaggcaccttgaccatggtgttctccttgttggatatggtgcttctggtttcgcccccattcgcctgaaggacaagccttactggatcatcaagaactcgtggggcgagaactggggggagaacggatactacaagatatgcaggggttccaacgttcgcaacaagtgcggcgtcgattccatggtctctaccgtgtccgcagtccacgcctcgaaggagtagactctggtcagcggtgataatcgtgattccatatattgtagaactataatccctgctagtaatccatttgtgctgtttatgtatcgaaggcagcaaagatgtgtgaagcggcaatgggatgcttgctgtaaggtaatatgtttggcttgctaggcatgctacacgctatttggatgtagcaacgttatcaccagctgtatacgctttttaatcgacaacatttgaataatatgtacataacattatgttgtgctc

SEQ ID NO: 3680 - DNA, 832 bp, Zea mays
  Clone ID: 700334993_FLI
gaaggaggttcatcaaagaactttacattgattaagaaaatggccttctcagaaccagcgattctacacaatttgctacagaagttcacaacatcaatggctaactatattaaataccaagcggacaatggggcgcaggctgtccaaattttcgattcatgggctactgaactcagcccggctgattttgaggagtttagcctgccttatctaaagcagatagtggatagtgttagggaaacacatcctaacttgcctctgatactctacgcaagtggatctgggggcttgctggagaggcttcctttgacaggtgttgatgttgtcagcttggactggacggtcgatatggcagagggcaggaaaagattgggatctaacacagcagtccaagggaacgtggaccctggtgttctttttggatccaaagagtttataagcaggcggatttacgacactgtgcagaaggctggcaatgttggacatgtattgaaccttggccatggcatcaaggttggaactccggaggaaaatgttgctcacttcttcgaggtcgcaaaagggatcagatactaaagaaccttgcatggttctttcctttctccaaatcggcagaagttgtagagtcggcggcggtcgaggatagatgcagaaagccatgtgcagtatagagtgcctgaaaacatttttgtgactgattctgtctgtcgtatttcaagttccgatttcagtgtaatattgtaagcagatttgagtcgaggcgtaatgaagtgcctacttgtttatagcactactatagttctgtacaaccagtagccttgtctatgagact

SEQ ID NO: 3681 - DNA, 1281 bp, Zea mays
  Clone ID: 700335017_FLI
gtacattctcttcctcgactcctcattctcccctctcctagtctttggcgcgtagtggcgaactggagaggtgtacaatcgtccggcgatccggacttcgattggttctctgctgttggtctgatgggaagtaaagacggcaccggtgacatatcggaagcccaaggctatgctgccgacattgattccatcagggaggcgcaggcccgcattgcgccgtacgttcacaggacgcccgttatgtcgtcgacgtccatcgatgccatggtggggaagaagctcttcttcaagtgcgagtgcttccagaaagcgggcgcattcaagatccgaggtgcttcgaattcgatattcgcacttgacgatgagcaggtatcaaagggcgttgtgacacatagcagtgggaaccatgccgctgctgtggctttggctgcaaagctgcgtggcatacctgcgcacattgtcattccaagaaatgcaccagcgtgtaaggttgaaaatgttaagcgctacggtggtcatattatttggagcgatgccagcattgaatcgagagaatatgtttgtaaaagagtccaggaggagaccggcgctgttcttattcatcccttcaatagtaaatacactatcagtggtcagggtacagtatcccttgaacttttggagcaagtccctgaaattgacacaataattgttcccattagtggtggtggtttaatttctggtgtggcccttgctgcaaaggccataaacccttcgatacgcattctagcagcagaaccaaaaggtgctgatgattctgctcagtctaaggctgctggaaagatcatcacattgccttccacaaacaccattgctgatggactacgagcttttcttggagacctgacatggcctgtggtgcgtgacttggtggacgatgttatcgttgtggatgacactgccattgtggacgccatgaaaatgtgctatgagatcctgaaggtggctgttgagcccagtggcgcaattggcctggccgcagcactgtccgacgagtttaagcaaagctctgcttggcacgagagcagcaagatagggataattgtttcgggaggcaatgttgaccttggcactctctgggagtctatgtacaaacactgattggagagagtaggaccgatgatattgcccttgaatttcaaacgtgatagttttagacaagtcgtttgtaaacttggaatagttcgttgtaaacatcacttattacctgtttttttatcaacgggtcattcagttgcagcc

SEQ ID NO: 3682 - DNA, 775 bp, Zea mays
  Clone ID: 700335072_FLI
gagaagccaaaggaaatacatatagaatggggtaaagggttggttcagaaacgagaagctgagtctaggttgaaagagattgaagctgagaagagtaaaccttttgctcgaacaagggatgatcctgagcttgataatatgctaaaagaaagaatccgatggggtgatcctatggctcatctggtcaagcggaaagatccagaatttattttggaagacttgggagatgatgaaaagatgaaagaatctggcttcatagtaccccaaagtatacctactcacagctggctgaaacgtggagtggatgctcctccaaaccgctatggcataaaacccggtcgtcattgggatggcgtggatcgcagtaatggatttgagaaggacatgttcaagctgaagaacgagaagcaagcaatggagcaagaagcctatctttggtctgtctctgatatgtgatcccaactgctgctccttacgagaggaatacagttgtgtaaaggaagaaccaatggaagacctttcaaacgattttttttcactcttattacacaaagtgacagcattggtgatgctgcgccggagtagcctgaatattttccaggaaagcattttcaggaatgcagttcaatgaagctgcattacgtatttgttggaaatctgttactgctgtaccatttgtcatccttcacgttttgtaatatagatgaacgcactgcaaggttttagaacagttcaaaagatgagattttatattgactttctggtttccatgtgt

SEQ ID NO: 3683 - DNA, 1466 bp, Zea mays
  Clone ID: 700335116_FLI
atgccctccacgtactggctctagaaattcttgtaggcattcctttatctcctccacctccacgtagaaagcctaggattatctaccagccacgtctttcatctcctaggcgttatctgaacacagctcatttgttttcttatgccatttcttctctgttcctgaagtcacggctccctggagatgttcagctcgtctgcgcttggtctttgccggtaaccgagctgctctctatgctcgagttcctagcgccctgctccctggtgccggagcttcttccttcccctgcgctcgccggcgttcggatctgcgcgactctgccccagctcggatctccctccccagccgaggcccttcttccctggtctcccatggccaccgttcttcagtcgagctcctcagcgccgaaggctcgggtccctgccgagctcgtctcgagctcccgcccaccctctgcccagccccagcgcccagcccatgtgtctggtgcctctacctgctcagatttggtgaccgtgttccctggttcttgaagtttgtcgctgtccctgcttgccttggcacagttgggtccgaccaccacccccatgtcgacggtgccctcgattcgtcggtgcccaggcgtgcatcctctgcaccggctattcccgcccaaaattcacccctgcacttggtcctcgtcgaggatacgtcgccctccactcggttcatggcgctcggcctccagctcgcgaagcttccctggtggccgcttcctcgtcgttttctatagtcgcgccggccgaggttcctccctgcgtgcgcaagctctgttgcgagcgtcgatccgtacccacaaagcctcgtcggtgctcaattagctcgaaccccctgctcggaccttttttccgtggcgctcagctcggccagatgcgacctcgccttggctcactgtccctgctgcgctcgccagtcggactcctggccatcgtcaacgaatctcgcgatcacggctctctgttgctcaaccggtgactcgcttctcgtcttgctccaggtacgttaattgatcacgtgctatggaagacgagtggaattgatctccaagtgatgctgatggacgaagctaaaatggatgaataaaccaagtgccaggatggaagatgctcaccaagtgatcgtcatttaacaacactaacatagtgttatcccaggattataagtttgttctgttgtggatgctgctaagtgccggtgggctcggccttcttatataggtgtatcccatctttagcttctttattgaggattgtcacttaagctagcatgtattttaaaacttataaatgttttatacattcaaattgtaatctttttgaatcaatttcttttgtaaccaactccgatgatatatattgtaatcttgctataacttgtaaatgttgtaacttgtaaccattttgtaataaataatttatttccgctgc

SEQ ID NO: 3684 - DNA, 1524 bp, Zea mays
  Clone ID: 700335174_FLI
ccacttgctgccccacgagcccattcccctcagcccttcaccatctccggcggtcgcagtggcatcagcagctccggctcacgcgcagcaaaggaacgacaatatggcgaccatcgtaaacacgacggaggaggagccgatgctggccgtggtccgcttcaccgctgagctcgcctgggccgacgcgggcccggaagtcgccgaccccgaggtcgcccgcctatgtctcgaggcgcaggagcatatcctcgcggggcggtggctcgacatggcctcccttatgctcgcctccgccgacctcctcctcacctccccgtcgcgcgtctcggacaaagacctggagtgcgttctctccgtcatctgcagcctcgtcaccaaggccggatccgaggaccaggcgctgcagatcaccgaactcatctgcgctaagctcacccagcaacacggtgacaagccagcgctgcgcctcaaagttcttttcagcttgtacaatctgctcccgagcccgtacggcaaggcatttgtttacaagaaggctcttgagctcgccacggctggaaaggctgctgagtacatcatcccatctttcaagaacattgacagttttgtcagtgagtggggaattgacaatttggagaagagggagctataccttgctatcactaccatcctcaaagaccacaagggcatggctaaggagtactttaactttctcaataagtaccttgccacattcaaagggtcagatgatgaatcaggtataattggtgatgcgaaggaagaggctgttgcggcaatcatcgagtttgttaaatcgcctaatctctttcagtgtgatttgctcaacatgccagctgtttcacagcttgagaaggacggaaagtatcagttggtgtatgaactactaaagatattccttactaagaagcttgattcctacttggagtttcaaagtgcaaactctgacttgctgaaagattatggtctcgttcatgaggaatgtgtaaccaaaatgcgcctcatgtctttgctcgatctgagcagccgatgctctggtgaaatcccttattctgcaatcactgttgaactcaggatcaatgatgacgaggtggagcaatggattgtgaaggcaattgcatccaagatattggattgcaaggttgaccagcttaaccagactgtcattgtcagtcggcacacagagaggatctttgggatggaacattggcatgctctgcgcacaaagctcggagcttggaggggaaacattgccagagctatcaacacaatacaagctaacaaagtcaccgaagagggggcacaagggatgcaaggcttggcgatccactgattcggggcgggtcagcgggttcgtgaattgagattatagcgtgggagattagaagggcaaccttttttgtatgagacaagttgtaatggtttatttacttagatcccgtaaccatgcctggttattccttgtatttggtcagacacgccgcgcagtgcaaggcagttttacac

SEQ ID NO: 3685 - DNA, 1486 bp, Zea mays
  Clone ID: 700335184_FLI
cgcgctagctagttctattgccgcaccccagatctccaggagggactcgttctttcagctaactacactgcacgcaatggccaccacggcgaccgaggcggcgccggcgcaggagcagcaggccaacggcaacggcgagcagaagacgcggcactccgaggtcggccacaagagcctgctcaagagcgacgacctctaccaggtaaacagagagcacactccggatcctgcctgcccatttccggcctcgcgctctagatcttatcttccgtggctcgaatctgaccgggggaagaatcacttccaccagtacatcctggacacgagcgtgtacccgcgggagccggagagcatgaaggagctccgcgaggtcaccgccaagcacccatggtatgttccgctttcccgggccgatctctcgacggcgacctagctgctggacgacagatcgagatctgaaaacatggcgtgcaggaacctgatgacgacctccgccgacgaggggcagttcctgaacatgctcatcaagctcatcggcgccaagaagaccatggagatcggcgtgtacaccggctactccctcctcgccacggcgctcgccctcccggaggacggcacggtccgtcgttgttccctcccttttcccagatctgccaccccacctccctgaaggcgaagcagctagcggtcctcccactgataaaccaaggattcctctctccctctctttgttgttcgtcccgccccgcagatcttggccatggacatcaaccgcgagaactacgagctgggcctgccctgcatcgagaaggccggcgtcgcccacaagatcgacttccgcgagggccccgcgctccccgtcctcgacgacctcatcgcggaggtacgaaatggccgccagatctgtgcttcttcgcctatatcgaccgagtagaagttgacatgacatctcggaaccgtgtctgtctgcgtctgcgcaggagaagaaccacgggtcgttcgacttcgtcttcgtggacgccgacaaggacaactacctcaactaccacgagcggctgctgaagctggtgaagctgggcggcctcatcggctacgacaacacgctgtggaacggctccgtcgtgctccccgacgacgcgcccatgcgcaagtacatccgcttctaccgcgacttcgtgctcgtcctcaacaaggcgctcgccgccgacgaccgcgtcgagatctgccagctccccgtcggcgacggcgtcaccctctgccgccgcgtcaagtgaaaacatgccctggcctggcctgccccaccaccgccaccgacggcgccgccggccgcatcctcattccaatcataatagacgacccgcagcattaattatccaccggcttttttttttggctctttcttgcccctgtaatctttctcctcctcttcttcttgggaattgtcgctgccgtttcgatacgtaaatcacgagatcggtaatacagt

SEQ ID NO: 3686 - DNA, 697 bp, Zea mays
  Clone ID: 700335196_FLI
ctatcttctcccccaaatcgcattctcatcgcaccgcacgagctacggatctgcggcccgacgactacgacgacggggaggtaggggacgaatcgttgcaagcaacgaggtcagaactaaggaggccgatccatcctccagcctccgatcccatccgacgacatggtctgcgtcgcgtgcctgctgccgctcttcctgatcccggtggtcaacgccctcccttacctcatcgacctcatcatcagcaaggtgtatcggctatttggatgggagtaccggagacctgaaagagtcccacctgcatgtccatacaagcctgcagctcagaagaacgatgagggtgcgagtgaatcaaaacccctggccgaaccgcacggtgctggtgctgcggcggcagaagataagaaagtggaatgatgcagcaggcgcttaaaatggaggccacggctctgtgtggttagctaagaaacaataattgttgtggatggttatgtacttgggtgatgggttgaacttgttatgacactccggatccttaccagttgcattactaatcgctgctgctggtctggtctgtctgaatagaagggagttgaacttgcagtcgcaaatgtaatagcgagagtgaatcttgttgtccaaggctttcgtatagaatataatgcttgaataatgagctcaaaattatgattttgtc

SEQ ID NO: 3687 - DNA, 1213 bp, Zea mays
  Clone ID: 700335205_FLI
gaatgttgccctggatttagctcgaagagaggctgagatggctatccgtgctcgcaatgatttcctagctgttatgaatcacgaaatgagaacacccatgaatgcaataatagccctttcctccttgcttttggaaactgagcttactcctgagcagcgtctaatggtggaaacagtactgaaaagcagcaatttgttagcaacactcatcaatgatgttctggatctttccaaactcgaggatggaagccttgaactggagattaaagcattcaatcttcatgctgttttcaaagaagtgatgggtttcattaaaccaattgcatctatcaagaggctatctgtatcggttatgttggcaccagatctgccgttatgtgcaattggtgatgaaaagagactcatgcaaactattctgaacatctctggcaatgctgtaaagtttaccaaggagggacacatcacgcttgtagcttccattgtgaaggctgactctttgagagagttcagaaccccagaatttcatccaactgcaagtgatgaacatttctatttgaaagttcaggtaaaagatacaggctgtggagttagtcctcaggatctacctcatgtattcacaaagtttgctcatcctcaaagtggaggaaaccgagggtttaatggtagtggtcttggccttgccatatgcaagaggtttgttagtcttatgggagggcacatctggatcgacagcgaaggaaccggaagaggttgcaccgcaacattcgtcatcaagctcggcgtgtgtgacaacacaaacacctaccagcagcagctggttcctctagtctggccaagcagtgcagactccaatttgtctgctccgaaagtgctgcccgacgggagaggatctgtttccctgaaatctcggtaccaaagaagcgtatgagctcagtgtaaatgattgacggcatagtgccaagtaggggatcgattagtgccattgtctaattttgtttgtaacccagtcatagcaacatatagtgtacaaataatgtaaagccaatggagactgcagctgtgtatctgggtagcaacgctgacttgctgcattgagtagtatgtcctaccagcggattgaattgcttgttctggggtgtgcggcgcgcgccccgttgattgttctgttgtaacttgtaatcccatattaatcgtgtaatatgaaattcaatgc

SEQ ID NO: 3688 - DNA, 2192 bp, Zea mays
  Clone ID: 700335261_FLI
cggacgccatggaggaagctcgcgaccacaggctctcctccaccgccggccgccccttcctctctggcttctgcgccgcggcgctccgacgtaagcccctcggcgcccgcgcctccgccgccgccgccgccaccggcgagggccttgtgcggcagctcggcgtcctcgacctcgtgctgctcgggatcggtgcgtccatcggcgccggcatattcgtcgtcactggcaccgtcgcccgcgacgccggcccaggtgtcacgatcagttttgttcttgctggagctgcgtgcgtgctcaatgccctgtgctatgctgaactggcgtctcggttgcctgctgtggttgggggagcatacttgtacacgtacgcagcgttcaatgagatcaccgccttcttggtcttcactcagttgatggtggattaccatatcggcgcagcaagcattgctcgcagcttagcaagctactttatcgagttcttggagctaatcccgctcttgaagggccaaattccaagctgggtaggccatggggaggagttttttggtggtgttgtatcaattaacatactggcccccgttcttctcatcatcttaactgcgattctctgctatggtgtcaaagaatcatcagcagtgaacacgtttatgacaacattgaagataatcattgttatagtcattgtatttgctggtgtgtttgaggtggatgtatcaaactggtctccgtttatgccaaatggtttcaaatctgtagtgactggagccacagtagtcttttttgcatatgttggatttgatgcggttgctaattctgctgaggaagccaaaaggccacagagagacctacccattggtatactaggaagccttatagcatgtgtgttgttatacgttgctgtatgcttggtcattactggaatggttccatatacattactcggtgaagatgctcctttggctgaggcttttgctgctaagggcctgaaatttattactgtattgattagtattggagctgttgctggacttacaacaacacttcttgttggcttgtatgttcaggtaataccttctaacttggctatgtatgtttaggtcacactagtagttttcacttaatcaaattgatctacttgatgagctttacatccttaattgtaaacagtcacgtttgtactttggacttggaagggatgggcttttaccttcagtatttgctgaagtacacccaacaaggcatactcctgtacagtctcagatttgggtcggttgtgttgcagcagtcatggcaggcctctttaatgtgcgtatgctctcacatattctttccgttggcactctggtatggaaacttcagtaaatatttcaatcacactgtctaattcccatcatcgaacaatcgcatgtaactgctactttttccccttatttctttctgggagcagaccggttattcagttgtatcagcttgtgtgatcacactaagatggaatgacaaaggaactagtcgtcgctcccttggaagtatgtcaatttggcaagagggtgttctaagtcttgtcatagttgctctttgtggttttatagtgggactttgctatcgctttaactatgctatagcctttatggttgtagcttttctgatagctgttgctgccagtttcgctctccagtttcgtcaggtctatgtggatccacctggcttttcttgtcctggggtaccgttggttcccattatttctgttttcttcaacatggtcctgtttgctcagctacatgaagaagcgtggtatagatttgtcattcttagtctcatcgctgtgggagtttatgccggctatggtcagtacaatgctgttccttccagctcagaacactctactattggttaccatggcattccttctgaagccgcatgagctatgttcatccccggagttcttcgaacatactgtatggtaccaacatacaccatcgtcaccgaagtttgaacctgttgcttttttttttgatgttttgcacagtgcatactcttgtagttacgcttagtactcctatacctatatctagacagtgaatttcacagcctgtgttgtgcccaccacaccattcgtcaggaagcttgccaagtgcatagaccttgtaaaaatgcaaatgaaaataaagaactgcagctgcattgtttgtagg

SEQ ID NO: 3689 - DNA, 1005 bp, Zea mays
  Clone ID: 700335286_FLI
cgcagaactccaacgactcctccatcagcagctccaactccagctgggagcccaaggtgccgctgctctacggcggcaccttcagcccctggggcgacgtcatggtgtctcgggagatgaggcgggaggacgatgacaaggtcagtgaccatgacgtcgaaggaggcgaggaggacttggactgcagtgagccggggagcctgcgtaggtgcagctggatcaccaagaacagtgacgaggcgtacgtccagttccacgacgagtgctggggcgtccctgtgtacagcgacaaccggctgttcgagcttctgtcgctgtcagggatgctgatcgaccacaactggacggagatactgaagcggcgggacatgtacagggaggcgttcgccgacttcgaccccagcgcggtggcgcggatggaggaggaggacgtggcggagatcagcggcgacagggagctgaggatcgccgagtgcagggtccggtgcatcgtggagaacgccaggtgcatccagagggtggccagggagttcggctccttcagcggctacatgtggggccacgtgaaccaccggccggtggtgggcaagtaccgccaccacaagtacatcccgttccggacgcccaagtcggaggcggtgagcaaggacctcgtccgccggggcttccgcctcgtcggccccgtcatcgtctactctttcatgcaggccgccggcatggccatcgaccacctcgtcgactgcttccgcttccacgactgcgtccgcctcgccgagcgctcctggggcatcaccaacgtcgccgcgtaggcgtagccagccgggccctcaatatctgtgcatgcatgcctctccaactttttcacaccttcttcttggtgttgttattttttttttgtttggagatcgaaattgtgtgtgaaattacgtagagtatgtagtactctactaagttatgatgtaatacttctattaactctttgccaatgaaaagtagtactgaact

SEQ ID NO: 3690 - DNA, 704 bp, Zea mays
  Clone ID: 700335353_FLI
gcagcagctgaacctgaacgactcgtggttgctgtggagggcgattctggattcggcttcagtgcaatggaggttgagacgttggtgaggtaccagctgcctgttgttgtaatcgttttcaacaacaacggtgtctacggcggggaccggagaagccctgacgagataaccggaccctacaaagatgacccagccccaacctcttttgttccggcagcagggtaccataagatgatggaggcttttggagggaaaggctatcttgtggagacaccagacgagctcaaatctgccctttcagaatcgttccgcgccaggaaaccagcggtgattaatgttatcattgatccttacgctggcgcagagagcggtcgaatgcagcacaagaactgaaggcgcttgcttggcttttgtaccataccatagcaggatgcagatgcgacttgatacaaataagcagcaaccgtcaatcaatccatttgtttcttccttacgacctcgcttcgttgttcgtggtacagatgtggggcgcttttaattggaagtcccatttgaaggcatgtgaatgtgttatgattatctaaatgccacgatgcaaactttaaaggcgtgttgatgatgatgtgtggaaaacctgtgcccatatatgagcctgtataattatttctcaaagtaataaagtcagcgttttagggcttgtttgg

SEQ ID NO: 3691 - DNA, 1097 bp, Zea mays
  Clone ID: 700335366_FLI
acccgagtacccgacgcgctagctagttctattgccgcaccccagatctccaggagggactcgttcgttcagctaactacactgcacgcaatggccaccacggcgaccgaggcggcgccggcgcaggagcagcaggccaacggcaacggcgagcagaagacgcggcactccgaggtcggccacaagagcctgctcaagagcgacgacctctaccagtacatcctggacacgagcgtgtacccgcgggagccggagagcatgaaggagctccgcgagatcaccgccaagcacccatggaacctgatgacgacctccgccgacgaggggcagttcctgaacatgctcatcaagctcatcggcgccaagaagaccatggagatcggcgtctacaccggctactccctcctcgccacggcgctcgccctcccggaggacggcacgatcttggccatggacatcaaccgcgagaactacgagctgggcctgccctgcatcgagaaggccggcgtcgcccacaagatcgacttccgcgagggtcccgcgctccccgtcctcgacgacctcatcgcggaggagaagaaccacgggtcgttcgacttcgtcttcgtggacgccgacaaggacaactacctcaactaccacgagcggctgctgaagctggtgaagctgggcggcctcatcggctacgacaacacgctgtggaacggctccgtcgtgctccccgacgacgcgcccatgcgcaagtacatccgcttctaccgcgacttcgtgctcgtcctcaacaaggcgctcgccgccgacgaccgcgtcgagatctgccagctccccgtcggcgacggcgtcaccctctgccgccgcgtcaagtgaaaacatggcctggcctggcctgccccaccaccgccaccgacggcgccgccggccgcatcctcattccaatcataatagacgacccgcagcattaattatccaccggctttttttttggctctttcttgcccctgtaatctttctcctcctcttccttcttgggaattgtcgccgccgtttcgatacgtaaatcacgagatcggtaatacagtaatgctcctcaattttac

SEQ ID NO: 3692 - DNA, 726 bp, Zea mays
  Clone ID: 700335459_FLI
tacacgccgcgtgcgcgcgccgtgctctctctcgctcgtggggacagctgcgcgaccgccgccgccctacgccaggcgcccaggtcttcggcagtaccttcgccggcgacgaactagcacccacaggaaaatggcaagcagagcaggtggcgatggcaaggaagccataaacgagcaggtaatcgccaacacctacgccaacatgcgcaccgaaatgaaccagctctacacaaagatcacggagctggagatggaggtcagcgagcactccctcgtgatgggcgcgatcgagccgctggacccctcgaggcgatgctacaggatgatcggcggcgtcctagtggagaggaccatcagggaggtcatgcctgccgtgaagcgcaacaaggagggcctggaagaggtgattgcccgcatgcacgaggcgctggagaggaagaagaaggagataaccgagtttgagctcaagtacaagatcaggatccggaaggctgatagcgacgctgaggatgaaggcggcaagaaggaaggcactgcgcagggagtccttgttggtcctgccggacagtaatctaagttgattagagagacctgcgtgctacaagctatttatgcttggaccacagtaaggtggttgttgctcctctctgccaatgtgtgtgtttagggggtgacgacatgcttctgtagaaccagcgattttgtgtttaaactggaatggttttg

SEQ ID NO: 3693 - DNA, 919 bp, Zea mays
  Clone ID: 700335463_FLI
ggaagcacctgctgggaattccactgagtccaagctgaagcaacctgcaaatagcaatgcggtatctgccgactctgggatgtcgaaccctggagtgaaaggtgattccagtgtttgtacccctttgaggcaggctaggtctagtctgtctctttcctttgctggtttgactggtgagagtagtgcgggagaccaccaagattgtgtggtatcatcattgcttcttatgggtgagcctccttggcagcctcctggccccgagggctcaattgctggaggtagtagagacagtgcactcacacgatacaaggagaagaaaatgagaagaaagttcgacaagaaaatcaggtacgcttctcgtaaggctagagcagatgtgcgaaagagggtaaagggtcggtttgttaaggctggtgaagcatatgactatgatcctctctgccaaacgaggagttactgaagcatatgatctttatccagttttaaattagcaaactgcaaccaaggctcgttgcagctagaacaaaagcactggcaatccaagctattgggccaaactgtgccttcgaaaagaaaaaaaaaaggagaaagctgtcggcatgataaaatatagagaaatatttggatgttgcagaagtttttgggtgaggatcctcctttttcctcctgtacagtggttggaagcggtttgagtctctccatcttttgtgaattagcctgaatccagctaaacagacttgttgcattttgatctccattctgcattcctgctgactgccatcagtctacgtacacgggctggcggctgcggtgtttttggaggtgttcgtccagattagacaagatggctagatgtgatctgtgaaatatccttctattataataatgtaaaatttgctgggacctggatgtttctgct

SEQ ID NO: 3694 - DNA, 1222 bp, Zea mays
  Clone ID: 700335564_FLI
actggagctatactagtaggagggcatttaagatgttcaacatagtttcgtcgtggaacaagaggcggagaagcaggtcactcgaccagctaaatccctgggtgtacaagccggctgagctatggcaggcgaaggagcaggagcaccaccacccgccgcccaagaagcgcagctgcaccatggtgttcacgctcaaggagatggaggaggcgaccaacctgttcagcgaccgcaacctcatcggcaagggcggcttcggccgggtttacagaggcgtgctcaaggatggccagatcgtcgccgtcaagaagatggagctgccgacttgcaagcaggccgacggcgagcgcgagttccgggtggagatcgacatcctgagcaggctagaccaccccaacctggtcacgctcatcggctactgcgccgacggcaagcaccggttcgtggtgtacgagtacatgcccaggggcaacctccaggacatcctcaacggcattggggaggtgaggatggactggccgctgcgcctgcggatcgcgctgggagcggcgcgggcgctggcctacctgcactccagcacggccgtcggcgtccccgtcgtccacagggacttcaagtccagcaacatcctcctcaccgaccactacgaggcaaagatctcggacttcgggctcgccaagctgctgcagcaggaccaggacctgcacaccaccaccagggtgctgggcacgttcggctacttcgaccccgaatacgcgctgacagggaagctgacgctgcagagcgacgtgtacgcgttcggcgtggtgctgctggagctgctgacggggcggcgggccatcgacctgagccaggggccgcaggagcagaacctcatcgtcggcatccaccaggtggtgggcgaccgcaagaagctgcgcaaggtggtggaccgggacatgcccaggggctcctacacgctggagtcggtgtccatgttcgccgcgctcgccgcgcgctgcgtctgcttcgacagcgccgcccgcccgcccatgcaggactgcgtcaaggagctccagttcatcatgtacgctaacatgaagatatgatcactctcgcgggtgcaaaccgcgcgtgggttttctttacttttgagacgggggcggggcatgcggacgatgctgctggattgcaagcaattgcaggtccgcagcttttgtttggttgatgaaacgaattgtct

SEQ ID NO: 3695 - DNA, 948 bp, Zea mays
  Clone ID: 700335565_FLI
gagctaaaacgataaaccagagcccggcctaaatgtgacggccgctctagtggaagcgcgtataaattgggggaaggaaaattccagcggacgagcgctctagccgtttttcctcgtcctcgatccagcccctgccgcttccagctccgatcgatctgatccctccccaccaccacgcccatggcggaccaactcaccgacgaccagatcgccgagttcaaggaggccttcagcctcttcgacaaggacggggatggttgcatcacgaccaaggagctgggaactgtcatgcgttcactggggcaaaaccctacagaggctgagctccaggacatgatcaatgaggtcgatgccgatggcaacggcaccatcgattttccagagtttctgaaccttatggctcgcaagatgaaggacaccgactctgaggaagagctcaaggaggcctttcgtgtgtttgacaaggaccagaacggcttcatctctgccgccgagctccgccatgtcatgacaaatcttggggagaagctaactgatgaggaggtagacgagatgatccgtgaggctgatgtcgatggtgatggccagattaactacgaggagtttgttaaggtcatgatggccaagtgagccacagaagcataagctcaaggcagagaggattgtgcattgcatattagtcaagatgcaatgcaactcttatttcatcgacttccagtgaaacattctgctagttgtagtttttgaaaggcaatgcagttgctgctttgttcttccctccagtgtgttttcagaactgttgattcatgtgaaactgtaatgattgccctccctgctgtgtcttggttgcagttgaaaccatatgtagctacattccccctcccaccacctccacacatcaacttctgcttcaccttttttagcatcaatggatggccggttgttttt

SEQ ID NO: 3696 - DNA, 1771 bp, Zea mays
  Clone ID: 700335575_FLI
cacaaacatacgcaccctctcgaccggttcgacttcagaacttccagcatcctatcagataccgaaatctccaactcccgcatcgcatcgaaccttcggcctgcaagcgaattcgtcctcccctctcctaccggcgcgaattcaaccgcccgcaaagccctaggccgatgcgtccgatccggctacccgagccgccgggtgtcgacggcatggagacgcccgagatcttctctggcagcggcactggtggcgccgccgtcgttcgccgcgccgtcctcataggcaacggctcccccggcgcagaaaaccagtgtctcggcctcgcccgcgccctcggccttgccgacaacctcacattctaccgtgtcacgaggccgagaggagggatcaatgagtggctgcactttctccccatttccatgcacaagtttatagaccaaatactcaggcagttcttccggaacacaaggttcgcaatagtggttcaggggaggaagccgcgtgtgctgaatggtgcatcagttgggttgtctgcagttctggaagcaaacgtcaagaagattgttactgtagcacgcgatacgtatgagaaggaaggtccgacgttagtcgttgcttgtggctgggacaccatatcatattcaagcttgataaggaaagtagcttcagataatgtgttcgtcatccagatccaacacccacgatctcgccttgataggtttgatttagtggtgactcctcgccatgattactatgctttaaccgctagtggacaacaagaagttccacacctgttccgcagatggattactccacaggaaccacccaggagtaatgtggtacttactgttggtgcactacaccaggctgattctgctgcgctacggcttgctgctatagcctggcatgatgaactcgcccctttgcctaagccgttgctaattgtcagcattgggggccccaccaggaattgtaaatatggtgtagatcttgccaggcagctcataacttctctgtataatgtgctagatagctgtgggagtgtcagaatctcattctctccgagaacaccatggaaggttgctgatactatatttaaagaatttgctggacatcccaaggtctatatttggaatggtgaagaacctaaccctcacatgggacatcttgcatgggctgatgcttttgtcataacagcagactcgataagtatgttaagtgaggcaggtagcacagggaaacctgtttatgttattgggaccgaacactgtaaatggaagttttcggcttttcacaagactctacgggagcgaggggttgttcgcccgttcactggattggaagatatttcaaatagctggagctaccctcccctaaatgacgccattgaagtagctactcgtgttcgtgaagtgattgcagaacgagggtggacagtgggatgatgtgatcataagtagctctctgttattctgtctaactttggtccagatatgatatatacggtaaactatagagtttggttagcatcactgtggattcagtttgtgtcgtttggaaaaaaaaaggagagaataacatagccatggaatggcctgtacaaaaggtgaccctctctttcatggtacacccccaagccaaaattttgagtaactgcacagctccgggagatttttttggctactggcaacatgttgcctgatgtaaatttaagctgctagaaggaattggagtaaatagagttgataatgagaaaatttgaagctgatgc

SEQ ID NO: 3697 - DNA, 2439 bp, Zea mays
  Clone ID: 700335606_FLI
ctgggagttgtgatccttatgttgaggtgaaactaggaaattataagggccagactgggcatttcgagaagaagaacaacccggagtggaatcaggtctttgcctttgcaaaggagcgcatccagtcatcagttgtggagattctggtcaaggacaaggatcttgtcaaggatgacttcattggacgtgttatatttgatttgaatgaggtcccaaagagagtgccacctgatagcccattggctccacaatggtatcggttggaagaccgcaatgggcacaaggtgaagggggagttgatgctggctgtttggatgggtactcaagctgatgaagcattccctgaagcatggcattctgatgcagcctccgtccctggtgatggccttgcaagcattaggtccaaagtgtatctaactccaaagctttggtatctccgtgtaaatgtcattgaagcccaggatcttataccaaatgacaagactaggttccctgaagtttatgtcaaagcaatgctaggcaaccaagtccaaagaaccagggcattggcaagccggactttgaatccattgtggaatgaagacttgatgtttgttgcagctgagccatttgaagagcacctagttttgagtgtagaggacagggtggccccaggaaaggatgaagtaattggaaggacaatcattgcactgcagcatgtaccccggaggctggatcacaggttgctaaccagccagtggtataaccttgagaagcatgtgattattgatggtgagcagaagaaagagaccaagttttcaagtcggatccacttgagaatatgtcttgaaggtggatatcatgtcttggatgagtcaacacattacagtagtgatttaaggccaactgcaaagcctctgtggaaacctagcattggcattcttgaactgggtatattgacagcacagggcctgttgccaatgaagaccaaggatgggcgtggcacaactgatgcatattgtgttgcaaagtatggacaaaaatgggtgcgtaccaggactataatcgatagtttcactcccaaatggaatgaacagtacacctgggaggtgtatgatccatgcactgtggtcacaattggtgtattcgacaattgccacctgaatggcggggaaaaggccaatggtgcgagggacaccagaattgggaaggtccgcatccgcctctcgacactcgaaactgatcgggtgtacacccactcataccctcttattgttctgacacctggtggtgttaagaagatgggtgaggtgcagctcgctgtccgtttcacgtgttcatcactgctgaacatgatgcatctgtactcacagcccttgctgcccaagatgcactatgtgcacccgctgtctgtgatacaggtggacaacctgaggcgccaagccacaagcattgtctccacaaggctgggccgtgcagagccaccgctgcggaaggaaatcgtggaatacatgcttgacgtggactcacacatgtggagcatgagaaagagcaaggcaaatttcttccgtatcacgggtgtcctgagccccctgtttgctgtggcgaggtggttcgatcagatctgtcactggaagaacccgctgaccaccgtactgatccatgtactctttatgatactggttctatacccagagctgatactgcccacaatcttcctctacctgttcctgatcggggtgtggtactacaggtggcggccgaggcagccaccgcacatggacacccgcctctcccacgcagagaccgcccacccggacgagcttgacgaggagttcgacaccttccccacctcccgtccgccggacttggtgcggatgcggtatgacaagctgcgcagcgtcgcggggaggatccagaccgtggtcggcgacctcgccacacaaggcgagcggctgcagtcgctgctgagctggagggacccaagggcgaccgcgctgttcgtggtcttctgcttcgtcgccgccatcgtcctgtacgtcactccgttccgcgtcgtggtcttcctcgcaggcctgtacgtgctgaggcaccccaggttccgccacaagatgccatctgtcccgctcaacttcttcaggcgtctgccggcgaggaccgacagcatgctgtaggcgcggcaggtgcatggcctcatcgctggccggtggtttcgcctctcagttgcagctcacagatggttgttgctctctcttaagtaagtgtatccggaaaaaaaggagctgctagctatcttcgtttactttttgagcttctctgtgttgcatggttggttatgtattcatatggttgtgaacctttcctgtaacaactggacgcatgatgcgtgactgtgtctaggtatgcatgcatgtgtgtgatgcttgaaaactccgagctttagtgtttattgctttacct

SEQ ID NO: 3698 - DNA, 1345 bp, Zea mays
  Clone ID: 700335615_FLI
cgaagagccgccgcaatcctcctccccgtcccctaccttcgtcggtgctctcacccgccgctggtcgccattcctccagatcggcgcccagctcgcagcccactaggcgttgcgctccctctccaaacccaacgaaaccccaggggaaccctcatccccctgtcgtctcccttattgggggccagacatggagagcaagcaatgggggaagacgccccaggaggtggtgggcgcaggcggcggtcgccaagtggatctagatgaagaggatgacctggaggagttccggctgcccatgggccaccgccccaccgagaacctcgacacggaggggctccagcaggcctctgtctacacccagctcaccgcgtccaacgtcggtttcaggctactgcagaagatgggctggaagaccggcaaggggctcggcaagaacgagcaaggtatactagagccaataagagctgacatgagagatgcaaaattaggtgttgggaagcaagaggaagatgacttcttcacatctgaagagaatgtgcaacgaaagaaattgaatattgaacttgaggagactgaggaacatataaagaaacgggaggtcatagcagagcgtgagcacaaaatccgcagtgaagtcaaggagatacagaaggtgtttttttgcaacctctgcaataagcagtacaagctggctcatgaatttgagagtcacttgagctcatatgaccacaatcataggaagaggtttaaggaaatgagagaaatgcagagcagcagtggtagtcgagatgacagacagaaacgtgaacaacaacgagaagagaaggagctggcaaaaattgctcaacttgcggatgctcataggaagcagcagaaggataagcaagaaaagtcagagacggaggatgcggcacccaaaaacatggcagcctctagcaaccaggatcagaggcaaaccttgaagttcggattctctaaaatggctccttccaaggttctagttggtagtgccagcaagaagccaaaggttgccacgaaagtttcttctgtctttggcaacgagagtgatgaggactcgtgacctttgccagagggtggcagttgcttcttctgtcgtggcatttggtctggggacttgataacagcatcgagaattgtatgaacttttgagggtacactgtataaggaaatctgtactgttgttgctggattttggaagctgtttattaaccattcgcccttgtaggcaggcaatacccttcagtttgggacacacctttgtattgtaggctgtactatcgttgttggcttttaatgttaaaaaaaaacctttgtattggatgct

SEQ ID NO: 3699 - DNA, 1663 bp, Zea mays
  Clone ID: 700335644_FLI
cacaaacgccggcgcaaactctcgcccgagcccgacagatcttcaattccccattccgcccaccgatcgaccttcacgccagtctcggtctcttccgaaggcgtcgcgcgcggttgtttgagaggagaggaggaagatgagggagtgcatctccgtccacatcgggcaggccggcatccaagtcggcaacgcgtgctgggaactttactgcctcgagcacggcatccagcctgatggccaagtgcctggagataagaccgcgggacatcacgatgatgccttcagcaccttcttcagccagactggtgctgggaagcacgttccccgtgcaatcttcgttgatctagaacccactgtgatcgatgaggtgcgcactggcacgtaccgccagctcttccaccctgagcagctcatcagtggcaaggaggatgcagctaacaatttcgcccgtggccattacacaattggcaaggagattgttgatctgtgccttgaccgtatccgcaagcttgctgacaactgcaccggcctccagggcttcctggtcttcaatgccgttggtggtggcaccggctctggccttggttctctcctccttgagcgcctgtctgtggagtacggcaagaaatccaagctgggcttcactgtgtacccatctccccaggtgtcaacctctgttgtggagccttacaacagcgtgctctccactcactcactgctggagcacactgatgtctccatcctgctcgacaacgaggccatctatgacatctgcaggcgctccctcgacattgagaggcccaactactccaacttgaatcgccttgtgtctcaggtgatctcatcgctgactgcttctctgaggttcgatggtgccctcaatgtggatgtgaacgagttccagaccaacctggttccttacccgaggatccacttcatgctctcctcctacgcaccggtgatctcttctgcgaaggccttccacgagcagctgtctgtggcggagatcaccagcagcgcgttcgagccggcttccatgatggtcaagtgcgacccacggcacggcaagtacatggcttgctgcctgatgtaccgcggcgacgtggtgcccaaggacgtgaacgccgcggtggccaccatcaagacgaagcgcaccatccagttcgtggactggtgcccgacggggttcaagtgcggcatcaactaccaggcgccaactgtggtgccgggtgccgacctcgccaaggtgcagcgtgccgtgtgcatgatctccaactccaccagcgtcgtcgaggtgttctcccgcatcaacagcaagttcgacctcatgtacgccaagcgcgcgttcgtgcactggtacgtcggcgagggcatggaggagggggagttctccgaggcacgcgaggacctggccgccctggagaaggactacgaggaggtcgccgcagagggcggcagtgatgacggtgacgaggaggaggaatactgatctgcttgcatgaatctgtttggctgtcgagccaggttgtggtgttgaaaaacctttgtttgtgtcctggccccctgggtaatgtttgggtgtttccttccatcatcacttgctgaactgctctagtatttgcatttgtaattgaagtctgtcgctttaagcactcttggttct

SEQ ID NO: 3700 - DNA, 1521 bp, Zea mays
  Clone ID: 700335650_FLI
caactcccgtcttccttcttcctcttccttgttcgaatccaagtaacctacccaaaccgccaaccccccaccccaaggaaggaaccctagtaccctacccgtgagaaccgccgccgcacaaccccggacgtggtggcaggcgaccgatccggatccatcatcccaagcttcctttctgtctcctcttcatccatctccacaaggataatcaaggaaggaaggccatggttttgttcgaacttgacccggacatcatccgatggggtcttcaccatctcctccccgctccggctggatactctcctcattgtcgcacccaaaccacccctaccacaccttgtacagcttttgctcgccctcctcatcagcccatcggagacatgggtacctcaagctccgttgagatcaaggtcgagcatgtcgatggggttgacaacgacgcgatcatcgcacaagccctccaggaggaattgtccaatgtcgccttcgccgaagcgtccgggccaacctctgccgctgacaatcaacaacattctgctgttctcacgcagcaatggcttcgcccacgcgccgtccatgtagaaccagcttctcaagaggcagggaccagggaggaacctttcagcacctgctcaagccctggagatgacaataacgtccaggacagccagcaatgcttgatagagctcatggataacttctctgtcattgacggtgaagtgggcaaaagattgaacaacatggttcctgttcctcatgttcctaaaactaatggagagattccttctgttgacgaagccatttcagatcatcaaagacttcttgacaggttggtggtgtacggtttggttgatctcaaggttaaaggagatggcaactgccagtttcgagcgctgtcagatcaattttaccgaactcctgaacatcacagatttgtccggcagcaagtggtgaagcagcttgaatcgcatcctgagatttatgcaggatatgtccctatggactacagggaatatctcaaaaagatgtcaaagagtggagaatggggtgaccacgttacattgcaggctgctgcagactcgtacggtgtaaagatcttcatcctgacatcattcagagatacatgttatattgagattcttcctgttgttgagaaatccagaagagaggttttggctatctaaactcagaagtcctgttgtgcagttatatgcttgagtttttgggctgaggtgcactacaactccatatatcctgaaggagagttgccggttttggagtttgacaacaaaaggaaaaggtggtggcccttctagctaggattcccaggacagactagatagagcagctttaacagactgaggcctttctgttgggctatgtgacactgactgatgacgaaaacgagcccatgggtggtggacggaactgcattggccttgcgctccttgcccacgcgatagacatgtacagtgcgtagtagatggtactatttgcctacttggtaacccattctcagat

SEQ ID NO: 3701 - DNA, 975 bp, Zea mays
  Clone ID: 700335652_FLI
tcgaattcgcctccgccgcctgctcgatccggtgggaactcgccgctgccgggttgttttcgctgggtgattaaggctcgggattcgagatctacgcgagtcgcgggcaagcagccatgagcgaggtgttcgagggctacgagcggcagtactgcgaggcctccgcctcgctctcccgcaagtgcaccgctgcctccgccctcgatggggagaagaagaagcagaagctgtccgagatccaatccggcgttgaggaagctgaatcgctgattcgtaagatggacctggaggcaaggagcctacagcctagcattaaggctggtttgcttgcaaagctgagggagtataaatctgacctcaacaacgtcaagagtgagcttaagaggatctcagcgcccaatgctaggcaggctacccgggaggagctcctggagtctggaatggctgatactctcgcggtgtctactgatcagagggggagattgatgatgacaactgaaagactgaatcagtcaactgacagaattaaagagagccgaagaactatgttggagacagaagagcttggtgtgtcaattcttcaggaccttcaccaacagcgacagtcactactacatgctcatactactttgcacggagttgatgacaacattggcaagagcaagaagatcctggctgcaatgtcaaagaggatggataggaacaagtggatcattgggggaattatcacggctctcgttctggccatccttctcatactctacttcaagctcgctaattaagcctctgcctgcaggtaggttccccctacatatctgtgttcagtaattgtgtgatatgagttgtctgaatgccgtgtattgagcaacacgcagctctccgagcgtcatttgttccccctcaaacctgtaaactcaaaatggcttattctgtgtatagtctgttattcccaactatgtaaaatgtctaaagagt

SEQ ID NO: 3702 - DNA, 917 bp, Zea mays
  Clone ID: 700335762_FLI
gtcaccccggagcctctccttcccggtctcctccgcccgttgccttcgtcccctccatctccggctgcgtcgccggcgagcccgacaccgcgaatcggatccgccgacaaggcgagagggaaaagatggggcttacgttcaccaagctgttcagccggctgttcgccaagaaggagatgcggatcctgatggtgggactcgacgccgccggaaagaccaccatcctctacaagctgaagctaggcgagatcgtcaccaccatccccaccatcggattcaatgttgaaactgtggagtacaagaacatcagcttcactgtctgggatgtcgggggccaggacaagatcaggccactgtggaggcattacttccagaacacccagggtctcatctttgttgtggacagcaatgatagggaccgtgttgttgaagcaagggatgagcttcaccgaatgctgaatgaggatgagttacgtgatgctgtgttgcttgtgtttgctaacaagcaagatcttccaaatgctatgaatgccgctgagatcactgataagcttggactgcattcacttcgccagcgtcattggtacattcaaagcacttgtgctacaacgggtgagggattgtatgaaggcctggactggctgtccagcaacattgcaaccaagtcctaaattgtcaagcgaggtttggatcatctaggagcttttggatgatgatgatggtgctggatatttagggttgggttggtatttccgtatgtaagatgtatgcccctgagctcggcagtttttgagctctgcttaagattctcacagttaaattgttttatgtaatttgggccttgagatgtttctgaaccaaacagctaaaagagttcagttgagttaactggttgccattattacattatgagattc

SEQ ID NO: 3703 - DNA, 907 bp, Zea mays
  Clone ID: 700335853_FLI
ggggagggcgacccggatctactccagcaccatgttcgacacgggcggcgagaagtactggcgcgactgcctccgcctggcctgctccttccccgccgtcggcgacagcgccgcggcctggcccgacaagccccggaggctccgggaggtggtggagaggttcacggtgcagacgcggggcctggggatggagatcctgcgcctgctgtgcgagggcctcggcctccgccccgactacctggaaggggacatcagcggcggcgacgtcgtcctccacgtcaaccactacccgccctgccccgaccccaacgccacgctcggcctgccgccgcactgtgaccgcaacctcctcaccttgctcctccccagcatggtacctggcctcgaggtcgcctacaggggcgactggatccgggtggagcctgtgcccggcgccttcgtcgtcaacttcggatgccagcttgaggttgtgacgaacgggatcttgaagagcatcgagcaccgggtgatgaccaacctgggagtggcgcggacaacggtggccacgttcatcatgcccaccacggactgcctcatcggccccgccgccgagttcctcagcgacgacaacccgccgtgctaccgcaccctcaccttcggcgacttcaagcgcatctacagcgttgtcaagctgggctcgtcgctcaacctcaccacaaatctcaagaccgttcagaaggagctctgattatccatcaaactttgtagcctccctcgaattggcggcgaggaactagctagctagctggcaagatgtagtctgtgtcatcactgtcatgttactgcccggacgtcatgctgatgatagaaatgacggaataaaaatgaaatgccaaatatgcgtgtatggcgcacgcatattcttgct

SEQ ID NO: 3704 - DNA, 1363 bp, Zea mays
  Clone ID: 700335861_FLI
gagactattccaaattcaattggagagcttttcaaccttaggcttttatgcctcaataaaaccaaagtgaaagagctccctaaatctattacaaaacttcaaaacctacagacaatgagtcttgagaatggggagttagtgaagttcccacaagggttttcaaaactgaagaaattgcgacatcttatggtttcacggttgcaagatgtaactttcagcggtttcaaaagttgggaagctgtggagccatttaagggcttgtggactttgattgaactgcaaactctgtatgccattacagcaagtgaagtattagttgcaaaacttggaaatttatcccagctgaggcggcttataatttgtgatgtaaggagtaacttatgtgcacagttgtgtggctctttgtcaaagttgtgccagctgtcacgattaacgataagagcatgcaatgaagatgaagtgctacagctggatcatttgacatttccaaatcctcttcaaacccttagtttagatggacgactgtcagaaggaactttcaaatctccctttttcttaaatcatggaaatgggcttcttaggctaatgttgttttacagtcagctttcagaaaatccagtaccacacctctctgaattgtcaaacttgactaggttatcccttataaaggcatacaccggccaagaattatacttccaagcaggttggttcctgaatttaaaagaactttacttgaagaatttgtcccggctcaatcaaatagacatacaggagggagctttggccagccttgaacgtataacaatgaaacacctcccggagctacgggaggttccagtcggtttcagatttctcaagtccctaaaaacaatatttttttccgatatgcatcctgagtttgaaagcagctttcaaaaggaaatgtagatcatatcccgtacatatgcaggacaacaacataagtatggtttgtttgtatgtctacgtgtaccttctgtcctctcccaaaaatagggcgggttgcattggcgaaaagttcatgatgggtgttttgagcttgggcaattactgtggagaggaaatgcagcactaggatccaagctttcgagcagaaagcagcgctgaagctgaagggcatgtcatgtcattcaggtacctagtaggatccaaaccttcgagcagaaagcagcacaggcactggcaccaaagaggaaccatagccgccaggcaacatcagtcatcaggaccggttaataatgtttatgtgtgataatgttgtttcaataattatttggaaccatttcgaactccgaatacttgagagtctgtacgaagcatttggcaataaatactatttcagagt

SEQ ID NO: 3705 - DNA, 557 bp, Zea mays
  Clone ID: 700335911_FLI
gggtttttaccaaagcatgctcggtcaagaagagataggcttgagatatctgctcgtgaagctgctacacaaatattctatgttcctccccatggcattcagcagtttcttgttgatgctgcttcatcttttggcgattccaggcattgtgtggtcgcaagggagataacaaaaatacatgaagagttttggcgtggaactttaggtgaagcaaatgaagcttttgcaactcgacaaccaaagggagaaataacagtgctcatagaggggaagttaatttcagatgacgaaattccatcagaggatttccttgagcatgaactaagagaattgacggcaaagggatatactctttctgcggcggtgaaattggtcactgaagccacatcagcaaagaagaaagatgtttatgcactcgcattgaggttgtttggaaaataagtaaaatggaatttttggtcgcatctggtaattaaacttatttctatgtactggcatattttccatttgactctgtagataccatgaatcacattgggaaggtgttatttctctgt

SEQ ID NO: 3706 - DNA, 2461 bp, Zea mays
  Clone ID: 700335924_FLI
agttggagcaggtctgggtctggccgcgtgagttatttcccagccaggcatctgagagctttggtcttgacctcgacagagatcgccatggacgcatcggcggaggtggaccacctcgccgccgagaggtcggccgcgcgcttcgacgtcgaggcgatgaaggttgcatgggctggctcgcgacacgccgtcgaagtcggcgaccgcatggcccgactcgtcgcgtccgaccctgtcttccgcaaggataacaggaccatgctctccaggaaggacttgtttaaggacactctaagaaaggcagcccatgcatggaagcgtattgtcgaactacgtctcacagaggaggaagcaggtatgctgaggctatatgtcgatcagcctggttatgttgatctgcattggggcatgtttgttcctgctataaaaggtcaaggtactgaggagcagcagaaaaagtggttaccaatggcttacaagttccaaataattgggtgctatgctcagactgaactcggtcatggctcaaacgttcagggccttgaaacaactgccacatttgatccaaagactgatgagtttgtcatccacagtccaactctgacctccagcaaatggtggcctggtggcttggggaaagcttccactcatgcagtggtgtatgctcggctgataactgaaggaaaggactatggtatacatggtttcattgtgcaactgcgaagcttagaggatcactcccctcttcctggtgttactctgggtgatattggtggaaaatttggcagtggtgcatataacagtatggacaatggtgttctgcgatttgaccatgtgcgcataccaagggatcaaatgttgatgaggctttcacaagttacaagggaggggaaatatgttcattcagatgtcccaaagcagctgctttatgggacaatggtttttgttcgccagacaatagtcgcagatgcttctaaggctttgtcccgtgctgtttgcattgctgtacgatacagcgccatccgaaagcagtttggctctcaagatggtggacctgagactaaggtccttgattacaagactcaacaaagcagactctttccgttgctggcttcagcatatgcatttagatttgtgggtgactggctgaagtggctatacatggatgtcactcagaaactggaagctaaagactactcaacactgcaagaagcccatgcctgtactgctggtttgaaggctgtgacaacatctgcaacagctgatgccattgaagaatgtagaaagctctgtggcggacatggttacctgaacagcagtgggcttcctgaattgtttgctgtctatgttcctgcttgcacttatgaaggagacaatattgttctgcttttgcaggttgcaaggattctaatgaagaccgtatctcaattgacatctggaaagcaacctgttggtacaatggcttacatgggcaatgtacaatatctgatgcaatgcaaatgtgctgttaacacagccgaagattggcttaaccctgttgccatacaagaggcgtttgaagcccgggctctcaggatggcagtaaactgtgcccagaacataggccaagcagcaaaccaagaagaaggtttctatgagcggtcccctgatttgctagaggctgcagtagctcacatccagttggtcattgtaaccaagttcattgcgaaggtacagcaggacattcctggacctggagtgaaggaacagctccagaacctttgcaatgtctatgccctctacattctccacaagcacctgggcgacttcctggcaaccgggtgcatcacacccaagcagggagcgctggcaaacgagcagctgggcaagctttacgcacaggtgcgtccaaatgctgttgcgctggtggatgccttcaactacacagaccactacctggggtctgtgctggggcggtacgatgggaatgtgtacccagcgctgtacgaggaggcgtggaaggaccctctgaacgagacggtggtgcccgaggggtaccacgagtacctccgccccttgctcaagcagcagctcaagctctccaggctctagtctgatcggctaccccccctggaattctccatggcggctgccttctcagagaatctcacgcgacctccgaatgaaagtgatgtaagctactaacgattcttgttagagccaggaaagaggctctccagccaattataaatttattcctcaagctctgaggatcaagttcaagctgtggattatataggaagcacgtttaataattaataaagagggagaggatgagcatctctctgttgctgctcaagtgttgtgcgcagtgcgagtagtagaatgaatatatacgagtgcgtgtattgtatggtgaattgaagttccatttgtttgctaaaagtatatcagaaaacaatggcttgatttgcctaagtcc

SEQ ID NO: 3707 - DNA, 1647 bp, Zea mays
  Clone ID: 700335931_FLI
accggcgatggcaaagaccccgtcgttcgcggtggcggcggtcgccggaggccgcgggccggttcacaaccggacccagctcctcctcctcctcctcgtggccgtcgcagcctccgcatccacagcagggttcctcctccgcggtgccctgcgagacccttgcgacggccgtggggaccccgccgccctcaacaccgccgtcgccagcgggagtcccctcgggttcatgaggtccaagctcgtgctcctcgtctcccatgagctctccctctctggtggtccacttttactgatggaattagcatttcttctgaggcatgttggctcgcaagtggtgtggataacaaaccagagatcacaagaaacaaatgatgtcacatatagcttggagcataggatgttgaaccatggagtgcaggttttaccagctagaggacaggaggcagttgatattgctctaaaagctgatctggttatcttaaacactgctgttgctggcaagtggcttgaccctgttctgaaagatcatgttcctaaagtccttccgaagattttgtggtggatccatgaaatgcgtgggcattactttaaggttgaatatgtcaaacatcttccctttgttgctggagccatgattgattctcatacaacggctgagtattggaatagcaggactagcgatcgcctgaaaatacagatgccacaaacttatgttgttcacctggggaatagtaaagaactaatggaagttgctgaagacaatgtcgcaagaagagtcctacgggaacatattcgtgaatcccttggagtacggagtgaggatctcctgtttgcaataataaacagtgtatcacgaggaaagggacaagacttatttcttcaagcattttatcaggctttgcagctcatccaacacgagaaacttaaagtgcctagaatacatgctgtagttgtgggaagtgatgttaatgctcagaccaaatttgagactcagttacgtgactttgtggtgaagaacacgattcatgaccgtgtccattttgtgaacaagacattggcagtggccccttacttggcagcaattgatgtgcttgttcagaattctcagggccgtggagaatgctttggaaggataacaattgaagcaatggcattcaagttgccagtattgggcacggctgctggagggaccacggagatcgtcctggacggctcgactggccttctgcatcctgctgggaaggagggcgtggcgcctcttgcaaagaacatcgtcagactcgcaagccacgccgagcagagggtctccatgggggaaaagggctatggcagggtgaaggaaatgttcatggagcaccacatggctgagaggatcgcggcggtgttgaaggatgtcctgaggaaatcacaggagcactccaggtcttgagctttgccgtgcccatcagcttgcgctaacatgttgaactagattttacgggctacgcctacgtggttcaggctgtaaactgtagattgcactctgttggtctactttttcacattcatgttttacctattaggccatgtccgattctattccaattcatataggttctatttcaatccatatagattaagagggattgaggagatttcaatcttagt

SEQ ID NO: 3708 - DNA, 501 bp, Zea mays
  Clone ID: 700335976_FLI
ggccaagtacgtgcccgacgcactcatcgtccatatcggcgatcagatcgagattttcagcaacggggcatacaaggcggtgctgcaccgtacgacggtgaacaaggagaagacgcggatgtcatggccgatgttcgtggagccgccgggggagctcgtcgtcgggccgcaccccaagctggtcacggaggagagcccggccaagtacaaggccaagaagtacaaggactaccagcactgcaagatcaacaagctccccatgtaattatgtagctcgggttctactgtcgtgtgcacccgcttctgtaatttcagtctaccatatttaagtcacataaccgttattccagtcgcatgcatggccacaggattggcttgtgggctctttcgtctggtttgggccattgcgggctgcttatctactctctttcccgaccgtgttatttgttgttgttgtaagggcactaatacatgttaaagaataacgagtcttttgtccgt

SEQ ID NO: 3709 - DNA, 1439 bp, Zea mays
  Clone ID: 700336003_FLI
cctatcgccggcagcccaagcccccctccgtctccctataaaaccccctcgccgcctccactcacagagtcacaagctcgaccaccaacccagctcgctcgtcccagctgatcaggtcgagcacctagtagcgacctgctcgatcatcagtgtagagtgtcggtaggtgtctgtctctcttggtggctggttgcaacggtcatggcgacgtcgtctcgtcgggtgcccttgctgctgctgtgcctgggcgtgctggtgtcctgctccttcgcggcgggcagcttggaccaggagctggacatcacgtggggcgacgggcggggcaaggtccttgacaacgggcggctgctgacgctgtcgctggaccgcacgtccggctccgggttccagtcccggcacgagtacctgttcggcaagatcgacatgcagctgcggctggtgccgggcaactccgccggcaccgtcaccgcctactacctgtcgtcgcagggcggcgcgcacgacgagatcgacttcgagttcctgggcaacgtgtccggcgagccctacacgctgcacaccaacgtgttcacgcgggggcaggggcagcgggagcagcagttccgcctctggttcgaccccaccgccgacttccacacctactccatcctctggaaccccaagcacgtcatcttcatggtggacgacatgcccatcagggacttccgcaacctggagagcaagggggtggcgttccccaagagccagccgatgcggctctactccagcctgtggaacgcggacgactgggcgacgcagggcgggcgcgtcaagacggactggtcccacgcccccttctccgcctcctaccgcgggttcaaggccgacgcttgcgtcgccgtcgcgggcggccggacccgctgcggcgccaccgtcggcaccgagggcaccggcgcccccgcctccgccgccggcgccggggactggtacaaccaggagctggacctcaccctgcagcagcggatgcgctgggtgcagcgcaagtacatgatctacaactactgcaccgaccccaagcgctaccagcagggcctccccgccgagtgctccatgcagtagcgcccggttattcctcgcccgtccaacaatggcgcgcgcgcgcgtgtgtgtgcatgtggtccgctctactgctaccgctacgacgatcggtgtcgatcaccggatcaaggcaagacgaaaggcatcgaaacatggtagataaataaaggacttgacgatttgtaacgcagtagctggtgcgtgcgtggtgtggtggtaagaaattcttctgctgcctgtgttcttgtagcctcctcgtcctcgcccaccctgttggtacgtgtacggtgtacgtagtctgccgccgcgcgctgttcgtgttcgtcgtgtctcgtgtctgtattatactcgtcctccccatc

SEQ ID NO: 3710 - DNA, 984 bp, Zea mays
  Clone ID: 700336078_FLI
gacattcctcgacgcgaacccgtcgcaagtggtcacgatcttcctagaagactacaccgcggtagggtccttgccgagagtgttcaacgcctccggcctcacgaagtactggttcccggtggcaaagatgccgaagagcggcggcgactggcctctgctcaaggacatgatcagccagaaccagcgcctgctagtcttcacctcaaagagagccaaggaggcgagcgaggggatcgcgtatgagtggaactacgtcgtggagaaccaatacggagatgagggcatggtagcaggcaaatgccccaaccgcgcagagtctccggccatggattccaaaggccagtcgcttgtcctgatgaacttcttcacgactaacccgagccagaccggtgcctgcgggaacaattcggcgccactcgacagcatgctgaagacgtgccatgacgcttcaggcaaccggtggccgaactacatcgctgttgatttttacatgagaagtgacggtggaggagctcccttggctacggacattgcgaacggtcatatggtgtgcggatgcgacaacatcgcgtattgcaaggcgaattcgacattcgggacctgcgtgatacccccaccgccgccgccgtcacctcccaaggcatccacccccggcagcagaggctcaacagcaggcggcgatgctagcgctggaacgatggccctgtcctcgcaatggagcttcttgctgggactggcttctctgcttcttttgtcgcgctcgtgagagccgagcggcattggtgactggttttgctgctcttgctacatgctctgcgagctgataggagcatcgtcccatgagatgagctgaggctgagctgaactgagctgtatatttgggtttactgcgcaacgtagttagttggatacgggaatcagttaaattcatcattcatttttattgattggcgtcgttatcgtgaatgttctaataagttcctt

SEQ ID NO: 3711 - DNA, 954 bp, Zea mays
  Clone ID: 700336084_FLI
gcatcaaggcgctgctcgagaaggagtgccccggcgtggtgtcctgcgccgacatcgtcgcgctcgccgcccgcgactccgtcggcgtcatcggcggtccgttctggagcgtgccgacggggaggcgcgacggcaccgtgtccatcaagcaggaggcgctggaccagatccccgcgcccaccatgaacttcacccaactcctccagtccttccagaacaagagcctcaacctcgccgacctcgtctggctctcaggggctcacacgatcggcatctcccaatgcaactccttcagcgagcgcctgtacaacttcacggggcgcggcgggcccgacgacgcggacccgtcgctggacccgctgtacgccgcgaagttgcggctcaagtgcaagacgctgacggacaacacgacgatcgtggagatggaccccggcagcttccgcaccttcgacctgagctactaccgcggcgtgctcaagcggcggggcctgttccagtccgacgccgcgctcatcaccgacgccgcctccaaggccgacatcctcagcgtgatcaacgcgccgcccgaggtgttcttccaggtcttcgcgggctccatggtcaagatgggcgccatcgaggtcaagaccggctccgagggcgagatcaggaagcactgcgccctcgtcaacaagcactaggcggcggaattcatgcgggagatggctccattgctcgcaaaaaatccttgtgagacacacaacatgctctgcatctgcaggcgttgtcgtcaccttggtggacgtagtacatcggtgcatggattatctgttgtttaatttgtacgttcagttcattctgtttcttgtattcttttggttcctttcctcttgtttattcatggatgatgaggtgtttctgttttattctctggttcagctgtaaccatgtaacatgtaaggtgcgcgttttgtc

SEQ ID NO: 3712 - DNA, 1875 bp, Zea mays
  Clone ID: 700336085_FLI
ttttggtgtgattgcagataggtggtcgcctgaatccgtggaatcaggagccttcacaggagatgcagtggcgagcctgatgccacctgccccagcaggatttcataagaatgcacccgaaatgtataatttgcttgattcaatggatgtggatgtcaagcctcctcctttggtcagctctgacagcaccggcgagatgccattgtatggcgataaagttcaccgctcaacctccttaccaagggtctcgaagggagtggggttttttgctgtagatagagatgatgacgacgataagtcctctgggtgcactcatcccagcaccaccactaacaaggatttcaggtccaattgtacagctgagtatagtagggtaaggaagttgctcaccagtaagtacaggaaagttgctccagcgagggtttacaaatctgatctttcctatagtgatgttgatcggaagccttctttccggaacaaaaaaatgcattatacacgacagaggacacaaaggagtacattcaagcgtaggaagctctttgatcgccattcagttctagcatctgaatttggtaccgcacatggaaagggaaacacgaagaaggttaccggaagagactcccatgctgtgtctttggaagcaaacaaggggactagttcaacgccattccagaaatctcgtgggtcaaatgattgccatgtgaaacttaaaattaagtcttttaaggtgcctgaacttcttgttgaaatcccagaaagtgcaactgttggctcactaaagaaaactgttctcgaggcagtgactgcgattctcggaggtggtctacgtgttggtgttcttcaccatggaaagaaagttagagatgataataaaacgttgattcaggctggtattggtcaggaggatatgctggacaaccttggcttttcacttgaacccaactgtacacaaaacccacaagtccaagctcctgaagatatcagtttcctggaaaccattgatactgctgaacccctcgcaaggattgcacctgctgactcgtcttctaagcatggtgaagttgacctatcacaggagtttgcattaaccccattagcaatgaactaccagggcagtgatcatgattctgtgcactcccctgggggcgtctcatcgcccgataaagtctccacaaactcgcgagctttagttccagttccagctgcagatcccaatgcaggagctatagttccagcgaataagtctaagaggtcaccagagcaggggcaacgcagaatcaggcgcccgttctctgttgctgaagtagaagcacttgtgctcgcagtcgaaaagcttggaaccggaaggtggcgagatgttaaacttcgcgcgtttgacaatgcgaagcaccgtacctatgttgatcttaaggacaaatggaagacgctggtgcacaccgcgagcatctcgccgcagcagcggcgtggcgagccggtgcctcaggagctgctcgaccgggtcctggcggcccaggcctactggtcccagcagcaagccaagctccagcctaagacgcccccgctgctggctgaggctcgcttgctcacctaataaattcgatgatcctggctgatggcctcctccgaggccgttgcagcctttgtataaagtcagtaagtcagtcagtcccttcacaggaggtttaaggaagatatattaggaaaaaaaaagaatacacatataaggtacaagaagcattgaccgatttgttgtaatatctactcaccaacagatattctttaagccaggattctctctccttgtgaatttaaccaaaggaaagggtatttctttggcaaattgtacatgttgatggtggaagaagaagatgatcc

SEQ ID NO: 3713 - DNA, 2690 bp, Zea mays
  Clone ID: 700336092_FLI
taggagcagacatgaggcggcgagagtccagcatcggagatctccgccgccatgtaggcactgcccagcaccttgcggcccgaaaaccgtcgatctaatgccctgccctccttctccgatgccttcgccctcgcctcaggcagggtccctctcccgccttgcctggctctacgtggtcggtcggttgtggcgggatgtgcagacaggacgatcgtgtccggcctcctcgagaagagctccagcaacatctagaaggtgctcttgatggaggacaagcttaggaaccttggatgcaaggtgattggaaagaaaactattgaggtggagatggacctgaccaaggccaagagcgagaggtacctatgggggaacaacactgcagctatgaactccgacaagaagcagcagtttacactgggtttggctccagtctcaaaagaaacgtctgtttcagtaagctgatggtcggtcacccaaaggacccattatctatttttattaatgttaatatattaaaaactggttagagtaaacatacatattatgctatcatgtacatatatgcctctatgagacataaatatatgtgtcatgtttcaactttcatgaatttttttcctcaacgagtaacatactagtgataataacaaaattatttaaaataataaccattatatataacttataaattatcatgatagatttggttatatattttaacttaaatatttgacatatggtataactataagttcataagtgcatatataaattctttgacatgaaaaacaagaaatattgatacatggggggcaattggtgtcgattgcagatggctacatctttctagaattcatatttctttgtagcaaatagtcattataataacaagtattaatatcctctccaggttagcaatactaaccattatagatctctgtttatttatattgtcccttcatacatattaatgtacatacacatcctttctttctcgttattccaatccctcctggacatagatacaacaaatatgatttgttccgtagaatcacaaactcttttgtacaggttgcaacttttaccagatcaggtatgatttcccacaaaaaatgaaccctgcttttttatagtccttgtcaatgcactcaacttaatagtttttcccatagcgccccttaattgggcagagaaaaagtagaatccatcactatgttttattaaacactatgtacgtatccatgtatgttgttgtgtaaacatttgcatatgtatataaccatacacacagacataatgtgttagtacacataatgcatgcacatggatcttattagttgtctcctagcctgcagcatcgcataatatgacttcaaattattttcattgcatttcaattaatagtatacttcattatcatttttccctttttcacatttttaataatctgtatattgggttgttcattttctagaaccaggctgagtattgatgttaatgttctctagacattgtcatttcagttgcttagatcagtaaaacttgataaataaatgtttgatgcaaatccaacaattagattgtttagtggtctaaatttaggagatttcatagacctacatctgtaaaggccataacttacatagaagattatctccataagatgtagcaagcactatccaaactaaacaaacctgtgcatgggtaaaacataatgctcgaatcagtggtcgaatgccttttctaaaaaatcattctttgtctgagaatggcattacttctatccaaatttactatagacttacatgtatatgtttatgtatgtattagaatttgtaggtgcctcgaagaagccaatcaaagtactaattactaaaggtaatagtatcctacaatgttctttttctatcttcttaatttcccatttttgaatgaagactggtttagtggtaatctaaatttctgattaatgcacatcaaaatgtcatataatagtgccaagtaactcataggatttgtcttttctttacaagtgaggatattgtgcggttcaataaagaactaacctatgatctatgggccaggtcacttgcaggatagcaaactcatacagtaatactgttgtttgtcgatcttaacaaatttcattcaagaatcaggccatgatgatgttcaaaagagttgtcagcagttcatgacatctggtatttattatatcttcttttgtagagggcttgtgtgttctgcttagcagtaggtaattttgctattgaaagattaatctattactgtaagcttggttctatgtgaatggatacatataattactcaggtagcacgacaactagcaatgtatggatgaattgaaggaaataaagaaggcagacaatcttatagaaactctgcatcttgaaactaccatggtttagaaagaagctggatgcatcctttatgttggtgtcttcttatcaccaagcagtaatgtgaagcaaggtcatttgttgactaagaacggttgaacacaaattagtgaagagttcattgcactagagatggaggatggaaaggtggtagatttcaatatggctttgatactatttccccccttacaatcttgtacggaacaaacaatgtatgtggatactattgtaattcaagaatttatttctaaataataaacatatttgttt

SEQ ID NO: 3714 - DNA, 866 bp, Zea mays
  Clone ID: 700336144_FLI
gggctctgggctctggcctagcctccactgtctcccagtccccaggtcctcatcggcctccggtcttctggtctccccagatctcccaccggggaaccctacccgagcatcagccatggcgatcgcggcgcgcgtcctgcgccgcctcccgctccacctctacccctcgctcgctcgctctttctgcgcagtttccccggccgccgcctcggccgccccggcgtccgcctcggccgccccggcgtccgccaaggtcgccgatcgcatcgtgcgcgtcctcgccatcgatctcgagggggcgcgccgcgaggtcgtcggcctctccgggcagacactcctccgcgcgctcgccaacgcggagctcatcgagccggcctcccaccgcctcgaggatatcgacgcgtgctccgccgagtgcgaggtccacatcgcgcaggagtggctcgacaagctgccgccaccgtcctacgaggagcggtacgtgctcacgcgcgcgtccaggaaccgcgagctcaacaagcacgcgcgcctgggctgccaggtcgtcctcacgccggagctgcatggcatggtcgtcgctgtccccgagcctaagccgtgggacatcccgtaatggcctgccgcgacgaatggcaaggtgcggctttcgacgctgtgagccttccttcattcccctggctcggtcaagcttgtgcgcctctgccatacccttttatgttacggatttgatgaagaataatagtttgatgggaaaaacctgccattggttaacttttgttcttttgaatgtggagtgtaatggatgctgtaatgtggaatcccgttgcaattaccgcagttcaatgtttaaaaataaaaaaaaaagg

SEQ ID NO: 3715 - DNA, 1616 bp, Zea mays
  Clone ID: 700336160_FLI
gacaagctaaaaatacttcgctagacagtagacacacaggagatctgcaagtcaaccgaacagacattcgctggaagctctgctcggagtgaggtcgctgcgcatctaccacacgatgccgccgcctctccgctgtctcctgctcgccttcgtcgtcgtcctctccggcttcccccgtctcgcccaccccttcacggctctcgagtctgaccagatcgcccgcttccaggaatacctccgcatccgaactgcgcacccatcccccgactacgccggcgccagcgccttcctcctacactacgccgcttcgctcggtctccacaccaccacgctccacttcaccccgtgcaagaccaagcccctgctcctcctcacctggcggggcaccgatccctccctcccctccgtgctcctcaactcccacatggactccgtccccgcggagcccgagcactgggcgcaccctccattcgccgcgcaccgcgacccggccacgggccgcatctacgcgcgcggcgcacaggacgacaagtgcctccccgtccagtacctcgaggcgatccggggcctccaggccgcggggttcgctcccgcccgcaccatccacatctcgcttgtccccgacgaggagatcggtggcgcggatgggttcgacaagttcgcccgatcggaggagttccgcgccctcaacatcgggtttatgctcgacgaggggcaggcgtcgccgacggacgtgttcagagttttctacgcggacaggctggtgtggaggctcgtcgtgaaggcggcgggggcgccagggcatgggtcgaggatgttcgacggcgccgccgttgacaatttgatggattgcgtggagaccatcgctgggttcagggatgcgcagttcaggatggtgaagtccggggagaagggtcctggggaggtggtctcagtcaaccctgtgtacatgaaggccggcataccaagccccacgggtttcgtgatgaacatgcaaccttcagaagcggaggtcggctttgacctccgccttcctccaaccgaagacatcgagcagatcaagcggagggtcgaagaggaatgggcaccatctcacaaaaacctgacctacgagctggtgcagaaaggtccggtgacggatgtggccggacgtcccgtatccacagcgacgaacgcgtcgaacccgtggtggctgacgttcgagagggccatcgcctccgcgggtggggagctgtctaagcctgagatcctgtcttcgaccacggactcacgctttgcgcggcagctgggcatccctgccctcgggttttctccgatgaccaggacgcccatactgctacatgaccataacgagtttctggaagacagagtgttcctgaggggcatccaagtgtacgaacatgtcatcagagcactaagctcgttccaaggctgattcgtaaaaacaaaaagaagaaggaaaagtgttgttgcgtggagtgtaacatagctggatccccaactctcatctgctgaatgaaggtgagagagttgcggcctagccagtacaggtttgtaataattggtccagtcacaaacacgccaaaggaaacattccgaaactattgggatctgtg

SEQ ID NO: 3716 - DNA, 1325 bp, Zea mays
  Clone ID: 700336177_FLI
tgtaatttcagatttcagagcgcgcaagaaccctcttgaccaccgccgccgccgccgcgaagccaagccaaactgagtaagcagctatggagggatccgccgccgctccgctccgcacgcgcatctgcatcatcgggagcggtcccgctgcgcacacggcagccatctacgcggcccgcgcggagctcaagcctgtgctcttcgagggctggatggccaacgacatcgccgcgggcgggcagctcaccaccaccaccgacgtcgagaacttcccgggcttccccaacggcatcatgggcgccgacctcatggacaactgccgcgcgcagtccctgcgctttggcaccaacatcctctccgagaccgtcaccgccgtcgacttttcggcctgcccattccgagttagtgcagactccacaaccgtcctcgccgatgcggttatcgttgccacgggagccgtcgcgcggcgcctccacttccccgggtccgatgcatactggaaccgcggcatctccgcctgtgccgtctgtgacggtgccgcccccatcttccgtaacaagcccatcgccgtcataggcggcggcgactccgctatggaggagtccaatttcctcaccaagtacggctcccacgtctacatcatccaccgccgcaataccttccgtgcttccaagatcatgcaggccagggcgcttgagaaccccaaaattaaggtcctctgggactcggaagttgtcgaggcctatggcggcgcaaacggcggcccattggctggcgtaaaggttaagaacctactgaatggtgaggtctcggatcttcaggtgtctggcctcttcttcgccatcgggcatgagccggcgaccaaattcctgggcggacagcttgaactcgattcagatggttatgtggaaaccaagccaggttccactcacaccagtgtaaagggtgtatttgctgctggcgacgtgcaggacaagaagtaccgtcaggccattactgccgctggatcagggtgcatggctgcattggacgctgagcactacctgcaggagatcggtgcacaggagggaaagtctgattgactatatttaggtgtagcaaccagcaatccatcgaatagtcagttgtcggtgctgaaagccgctctctgatgcgcgtttatgccatgggttgtcatgagctcacgattgagatacctgatgatttatgctgcttagtagcatgctattcttatcgttaggatccagaagtatgtctgaactctgaactatttactggatacctattcgtgattactgccttgaagtttttccttagatatctct

SEQ ID NO: 3717 - DNA, 813 bp, Zea mays
  Clone ID: 700336186_FLI
aggcaattgaggcccgggacagagattatatctgtacagagtactggcgatcaaggccccatgcaacaattgagaatcgagacaatcagaatatgtcacctcaggatccaccccttgttgcactgagggggctcttccagcgggctaattgtgatgaactgcgagcactacgcagtttgctgatgagcaatagaattctgggcgacaattctaggcagcaggcttgccaaatccttgatgaggagattgcgaagcaatggcactgaccagcgtaaatacaggatgttgtactaaccaattgtttggcatgattttgttttgacgggataaatcagttttaaggcttgcttcttccgttgcccttgtgcccattcttttcattcttgtgaccatacccaattctttattgcaagtggtgtcaacaagcatgaggctacagctgcatcacctgcaaggaagtcaaaagtaagaggcacatgcatttgtaatggcatcataatgttctttattcccatttcattatggttcctcactatttctgaatagttgtggctgattgttatgttacccaatgacaagggtgagtaacttattataagatgtagctgggtcatcatattcctttgttcttgaaatctgttaaccatgcatgcttgtctgatgtaaaccacccttagattccgggtactcggtcattattgggattattctagtagttgtattctttgtggagcaaataacgatttatatgtattgtatgcatggtgtaactataactaactctttcatataaactgtatcagcattccatgc

SEQ ID NO: 3718 - DNA, 1262 bp, Zea mays
  Clone ID: 700336191_FLI
cctcctagctcctctactcgccagtcgccatgggcaagattaagatcggaatcaacggcttcggaaggatcggcaggctcgtggccagggtcgccctccagagcgaggatgtcgagctcgtcgccgtcaacgaccccttcatcaccacggactacatgacctacatgttcaagtacgacaccgtccacggccactggaagcacagcgacatcacactcaaggactccaagacccttctcttcggtgacaagccggtcaccgtctttggcatcaggaaccctgaggaaatcccgtggggtgaggctggcgctgagtatgtcgtggagtccaccggcgtcttcactgacaaggacaaggctgctgcacatctcaagggtggtgccaagaaggttgttatctctgccccaagcaaagacgcacccatgtttgttgttggtgtcaatgaggacaagtacacctcggatgttaacattgtttccaatgctagctgcaccacaaactgccttgctccccttgctaaggtcattcatgacaacttcggcattgttgagggtttgatgacaactgttcatgccatcactgccacccagaaaactgttgacggaccctcagccaaggactggagaggtggcagggctgccagctttaacatcattcctagcagcaccggtgctgccaaggctgttggtaaagttcttcctgatctgaatggcaagctcactggtatgtccttccgtgttcctactgtggatgtctcggttgttgacctcaccgtcagaatcgagaagggggcctcctatgaggatatcaagaaagctattaaggctgcttccgagggtccactcaagggtatcatgggttatgcggaggaggatctggtttctaccgacttccttggtgacagcaggtcgagcatcttcgacgccaaggccgggatcgctctgaacgaccacttcgtcaagctcgtctcgtggtacgacaacgagtggggctacagcaaccgcgtcgtcgacctgatccgccacatgttcaagacccagtagaggggttttttccccctgcttctcatggatggttgctgcttgtgtatgccgagaataaatgtggatggcgcgtgcctctgggtcgccaggttcatgctgagtctggacatgttttgcacttttgcttcccttcctgctaccatctgtgacagaaccgctcgctaatatgggacctgagattagctttttgctgcttgtggtgaggttgcagttttgttc

SEQ ID NO: 3719 - DNA, 1710 bp, Zea mays
  Clone ID: 700336216_FLI
ctccggcgggccgttcatcgccaccagctacgactacgacgcgccgatcgacgaatacggtctgctgaggcagccgaaatgggggcacctgagggacctgcacaaggccatcaagcaagccgagccggcgctggtctccggcgacccgacgatccagtcccttgggaactacgagaaggcgtacgtgttcaagtcgagcggcggcgcctgcgcggcgttcctgtccaactaccacaccagcgccgcggcgcgggtggtgttcaacgggcggcgctacgacctcccggcctggtccatcagcgtgctgcccgactgcaaggccgccgtgttcaacacggcgacggtgagcgagccgtcggcgccggcgcggatgagccccgcgggcggcttctcgtggcagtcgtacagcgaggccaccaactcgctggacggccgcgccttcaccaaggacgggctggtggagcagctcagcatgacgtgggacaagtcggactacctgtggtacaccacctacgtgaacatcaactcgaacgagcagttcttgaagtccggacagtggccgcagctgaccgtctactctgccggccactccctgcaggtgttcgtcaacggccagtcctacggcgccgtgtatggcggctacgacagccccaagctgacatacagcggctacgtgaagatgtggcaggggagcaacaagatctccatcctcagcgcagcagtcggcctccctaaccagggcacccactacgagacgtggaacgtcggagtgctcggtccggtcacgctgtccggcctcaacgaggggaagcgggacctcagcaaccagaagtggacctaccagatcggcctccacggcgagtcgctgggcgtgcagtccgtcgccgggagctcgtccgtcgagtggggcagcgcggcagggaagcaacccttgacatggcacaaggcctacttcagcgcgccgtccggcgacgcgccggtggccctggacatgggcagcatgggcaagggccaggcgtgggtgaacggccgccacatcgggcggtactggtcgtacaaggcatcctcctccggcggctgcggcggctgcagctacgcggggacgtacagcgagaccaagtgccagaccggctgcggcgacgtctcccagaggtactaccacgtcccgcgctcctggctcaaccccagcggcaacctgctggtgctgctcgaggagttcggcggcgacctgcccggcgtgaagctggtgaccaggacggcgtgatcaggaatggagaggggagggcatgccgcacgcacacaggatgtgaataatttgctgggaagagaagcgagctgagggcagggcgcgcgcgcgcagacacgacaccgattctttcttcctcgtgaagtatctatagatacggcgtacatacggtcacaattcgtgcccactatacgtacgtacaaaaaagattagtacactagcgtttactgtaggtctgttcttggagttggccgtcgccggcacggctgcaggaactgcggctcacggccggctggtaatggtactagtagcatggtttttgctctgcagtccgcatgaatctcaaggcgcacgcaggcttaattttcttagcacaaatttgcgaaactgagttgtaaatgaggttatttattcctacgattaagtaggatacaagacgaataattattatgtgagttcttttt

SEQ ID NO: 3720 - DNA, 2558 bp, Zea mays
  Clone ID: 700336269_FLI
gaataatagagtcaaagttcaaggaccttgcagtaaagctagagtcagccgaaagatctaactcttcacatagatatgaggtttgcatgctgcagaagcaacttgagattcgaagcgaagaaaggaaatttagtctcaaatctgctgacgctgcacacaagcagcatcttgagaacgtaaggaagataaccaagctcgaatcagaatgccagaggttgcgttcaatggtacgtaaaaggttaccaggtcctgctgccattgccaaaatgagaagtgaagttgaaacagtgggtatcgatacaggaatcacacgaatgagaaagtcgaattcagtgacatcacagaacccctgtgctttagtacaaaactctcatgatacatcacatggaaattctccgttacttgcaaggctacatgcaattgaagatgaaaataaggtcataaaggaatctctttctagaaaggatggtgagcttcagttttctcgcactatgcttgctcgtacaacttccaaactttcccaggttgaagcccagcttgaagatttgtcaaaaggtcggtctactgcagaattggtaaaaggtagccctactgttgttgaaaaccctctttcatctatctctgaggatggctttaatgaagataatgtgagttgttcaggctcatgggcatcagccttgctgtctgaactggaacacttcaagaaggggaaacacacagcacactctagtaagagcacaggagtatcagacatgagtttcatggatgactttgcagagatagaaaagttagcatctttatgtaatgataaacatgtggaacaatatggttcaaagagagaagccacagagtcatctggaaaggagctagttccagttgatgtctccactggaacagctgaccaaattcgccaaccgagaattgagaaggctgtccggaagttaattgaacttattgagggagttatccaaagatcatcaaaagattgtagtagcacagttgtgctatctggcggcgatgaggaaaacggacaaggaacactatcaggctatgttgctcgtgcattcttgtggaatacatcagaacttacttctgtactgcaaaattttgtttttgcgtgcaacgagcttctgtatgggagtactgatgtcgaaagctttgttcatgacctacaagtcacattagattggataatgaaccactgcttctcacttcgagatgtatcagacatgaaggaagccatcatgaagcatttggaattaaacaacagtgatggacttgaaattgttgcggtaggcagtcacactggaatccatacaacagatgagcctaaaacgccggaaaatgttcagacgtcattattaactgactcaagttgtgtagatattaagcctgatgttagcaaacagaggacatgcaatgaagtagctatctctaaatttgaagggatagaagaaaaggcttcacatttgcgggcagaacttaatgagctgaaagaatccagaaaagtaatggtacacgtcgatggtaaatcaacaatgactgaatgcattacacatgaatccatcttcatatctggacaaaatacgggcaagcaagagggggttagttgtcttgaacccaagcatcagcttgaacgttgctccgctaaacaaggctcaaaaagtgtcaccgagaatgaagataaagatctgcaggtggagcttgagatctcaacagcgtcagagaagctgatcgagtgccgggagacaatcataaacctgggaaaacaactgaaagcgctcgcgtcgccaaaggacgccatcctcttcgaccaggttcttcagaccgctgttcgttctgagcggaaaccccgatcgcagtcactaagcgagatgttatccatggaggacggaggattctattactcaggctccccgaaaaccaaggagatcatctgtactgaaccaagtgcgccaggcgaaggaaaccgtcctgccgacgacgagggagacggtggttccgccgcagcatgtagctcttcacacccaatgccggtggctccacacgtaaagcaggcgtgcagggtgaacaggacctgcaagggagaagccgacgtgaaggtagtgacgcttgccgttgtcccgagaaagcagaaggggaacggcggcctgctgaagaggatcctgacgggcaggaggaaggaggccatggccaaacagcaggtggtgctgagttcttagctgaccgaaagaatggaggttttggacatggcaagtcatcgtttcatgtgtagatggagtttgttcgtttgtgtgtggagccatgttcatgtgaggttagtaataaagtcgcaggctgctgcgtagatgatgtatgtattagtgtggtgtgtgtgtgtgtcagtgtgaggtagcgctctgtcatgaactcatgaccctgttttctgaagactacctccttccttgtgtgttctggggaggttcctgaacctgtttgagatagtgctagttgcctagtatgttggcaatggtacatgttagtgtgcttcgtctgacgaaagaaccttgttctgaatg

SEQ ID NO: 3721 - DNA, 1115 bp, Zea mays
  Clone ID: 700336272_FLI
gttcctcttaagactgtaaacaggcagtgctcttctggccttcaggcagttgcagatgttgccactgctattaaagcagggctctatgacattggtattgctgctggtttggagtccatgacagtgaacaaagttagtcttgatggccaagcgaatcccaaagttgagctgttttctcaagcacgcgattgtcttctcccaatgggcctcacatctgagaatgttgcacaccgttttggcataacacgactggagcaagatcaagctgctgttgagtcacatagaaaggctgctgccgcagcagctgctggtaaattcaaagaggaaattgtgccagttcatacaaagattgttgatccaaaaactggtgaggaaaagaagatcgtagtctctgcagatgatggaatccgagtggatacttctcttgcagtcctgtcaaaactcaaaccagcattttcaaaggatggcagcactactgctgggaatgcaagccaagtgagtgatggtgctggggccgtcttgctaatgagacgggatgttgctatgaagaagggtcttccagttcttggtgtctttaggacctttgccgctgttggagttgatccagctgtaatgggtattggtcctgccgttgcaatccctgcagcagtgaaagctgctggccttcagatggatgatatcgatcttttcgaaatcaacgaggcttttgcatctcagtatgtctactgctgcaagaagttggaacttgatcctgctaaagtcaatgttaatggcggtgcaatggctcttggacatcctttgggtgctacaggtgcacggtgcgtcagtactcttctcaatgagatgaagcgccgcggcaaggattgccggttcggagtgatttctatgtgcataggttctgggatgggtgctgctgctgtgttcgagcggggagacggcgttgatgagctcaccaatgctcggggaatctcgacccacaactggctttccaaggacgccatgtaaagctacacccaccaaaatttgccggaactggtagcattgtttccagatcgctgtagggagcgaattggggaataaaatgattttgtatttgtcgcccctgctggggattt

SEQ ID NO: 3722 - DNA, 1985 bp, Zea mays
  Clone ID: 700336462_FLI
cctcccgtccccttcgccgccgccgccgccgcggatgccgcggaagaggcgttcgaggcagcgaggtcaactaacgacatgctcgctgcattctcccgcctcgaggccaccgtgcccgccaacgacaagcgcctcgccctcgcctgcctcaagctcggccagcacctcgaggcgtccggctccgccgacacgtcccgcgtcctcgcgcttgccctccggtgcctgggcatactcgaggccagccccaacgcctccaccccctcctccgcctcggacgccgtctcgctcgccatggcactccacctcgccggctccgcctccttcgacctctcccgcttccacgacgcgttgtccttcctctcccgcgcgctacgcctcctcgccccgctcctccccgaaacaggcgtcgcgttcgaggttggggaggaaccgggagggttcgacgtcaggcccgtggcgcacgcggtgcggctgcagctggccaacgtgaagacggcgctggggaggcgggaggaggcgctcgccgacatgcgcgcctgccttgacctcaaggagtccattctgcctccgggcagccgggagctgggagtcgcgtaccgggacctcgcggaggcgcacgccaccctgcttgacttcaagcaggcgctgccgttctgccagaaggcgctggagctgcatgagtcgacgctcggcaagaactccgtggaggttgcgcacgacaggcgcctgcttggtgtgatatacactgggctagagcagcatgagcaggcgctggagcagaacgagatttcacagagggtgatcaagagctggggtgcagctagccctgacctcctcctacatgctgagattgatgcggcaaacatcaatattgcattgggaaagtttgatgaggctgtcagcgtgttgaagaatgtcgctaagcaggtgaagaaggatagcgagacgcgagctctagttttcatatcgatggcgaaggcgctcgctaaccaggagaaggctggggacacaaagaggtgcttggagattgcttgcgacatcctggagaagaagaaattcgcgacacccgacaaggtggcagagatgtacatagaggtatcctcactgtttgagacggtgaatgagttggaaaaggcaatatctttgctgaagaagagcctgggaatgcttgagaggatgcctcaggcacagcacctggagggcaatgtcgcagcgaggattgggtggctgttgcttttgactggtaaggtctctgaagctgtcccgtacttggaggatgcagtggagaggatgaaggacagcttcggtccgaagcattatggagtagggtatgtgtataacaacttgggtgctgcttacatggagatggaccgtccgcagtctgctgcacagatgtttgcgctcgctaaagaagtcatggatgtctccttagggcctcaccattcggataccatcgaggcttgtcagagccttgctaatgcctacaatgctatgggaagctatcccctggctatggaattccaaaagagagtgatcgattcgtggcgaaaccatggcgccgatgccagggacgagctgaaggaagctatgagactctacaaccagatcaaggcaaaggcactggcatgcctatcgcccggaggttcagctaacgcgttgcctgaatctcaggagcaggaaacagattctgatactgccaaagctgctcaacggtagaccttcgctagttttgggttgaaggatttggagttctcttgctggttggtacatgatgtagtgttagatatttggatatcagaaaatcaacgtctggtgaactgccggctccctccctgcagcgcaaggaaaggaaagacctgattagtcaagatatgatgtgttcatcaaggcagaaatgtccgcgtgccatgtgtgtgtgtgtgttttaatgaaccagtatttggtctggtgaggcatttaggtatagtgttaagcatttttttttc

SEQ ID NO: 3723 - DNA, 1364 bp, Zea mays
  Clone ID: 700336510_FLI
gtgagaagcaacttctttggactaaaaaaatccaattttctccgcgacgaaggagaggcatccctcccttccgcgtggtgtgctctctgttcctacgccgtttcctctcccgactctctcctcgccggcgacgccgcggagtaggtgcaacagaaactgctcgaggcggaggcggagcctgcggctgcacagacatgggtgatcacgaggcgcgcggtgatgacttcgagaagaaggcggagaagaagctctcgggctggggcctcttcggctccaagtacgaggacgccgccgacctcttcgacaaggctgcgaactccttcaagctcgccaagaactggagcagagctgcatcagtttacatcaagattgctaactgtcatttgaagggagatagcaagcatgaggctgcctcagcgtacgtcgaggcagcaaattgctacaaaaagttttcacctcaggaagctgcgcaagcgctaaaccagtctgttaatcttttcttggaaattggtaggttgaacatggctgcaagatacagcaaggacattggtgagatatatcagcaagaacaagatttagagaaggctacagattacctggaaagggcagctgacctttttgacagtgagggacagtcgtctcaatcaaacaccatcaaacagaaagttgcagaaattgctgctcagttggaacagtacccaaaagcaactgagatatttgaagcgatcgctcgtcagtcaatcaacaacaatcttcttaagtatagtgtcagaggaattcttcttaatgctggcatctgtcaactatgtagaggtgatcctattgccatcacaaattcattggagcgataccaggaaattgacccgactttctctgggacacgtgaatacaagcttttagctgatcttgctgcatctatggatgaaggggatgttgccaaattcactgatgcaatcaaagaatttgatagcatgacacgtctggatccttggaaaaccaccctgctgctcagggcgaagaacgagctgaagaaaaaggaggacgatgaggacgaccttacataagtattgtagtaaaaagaaatggtacgatatgttttggtttgtgcctccattgcattggaggcatcgtgttccttacaaacgagcatgatgaaattaatcgctggtctggttgtacagaacgtcaatttgggttctactgttgatgtgactgccagtttcgttgacttgatgccagagtgaaaattagtaccgagatgcttgtttctggggttctgttcttttcaaatctttagaccttatttcctattgtacttctatacctcgtattaataatctaagcggtttccaatggattgtatc

SEQ ID NO: 3724 - DNA, 787 bp, Zea mays
  Clone ID: 700336546_FLI
cggagagaaggatgatgaagggctttggcaatcgccgctgcactcaacccacttaccgctgttaattttgcactggatattgcaagaggaatggcatatcttcataatgagcctaatgttgtgattcaccgagatttaaaaccaagaaacattcttctggtgaattctgctgccaaccacttgaaggttggagacttcggccttagcaagatcatcaaagctcagcatgcgaatgatgtatacaagatgactggagagacaggaagctatcggtacatggcccctgaagttttcaagcaccggaaatatgacaagaaagttgatatcttctcttttgccatgattctatatgagatgctggaaggtgattcacccttctccaactacgaaccttatgaggctgctaagtacgtggcagatgggcatcgtccggttttccgtaaaaatcataccactgagttgaaggatttggttgagctatgttggtctggggatatcagtctgagaccatctttcttggagatcctcaagaggcttgagaagctcaaggagcattattcacacgagaaccactggcatttgttccagtagcagtgcgcatataatcatacagtatatttttttactatgactgttgtcatgattggggctttctcgggagatctgacattgatgaatgtacaaaattgggtgcctctagaaaggtccactgagactgaaaaatcttcttgctgttttacgtcgatgctatttctggtaaaaaaaaaaaaacagaagctctctttgt

SEQ ID NO: 3725 - DNA, 1680 bp, Zea mays
  Clone ID: 700336578_FLI
aaaggaaaaaggaaaaaaagaaaacagagagaggggagagtgggagacggtcggagacagaggcctcactcctccacactctcagtcgtcttccagtcccagcgctttcttggatcgcgaggaaaccactcggggagtttgcagttgcagagaactgtatcggccgaagtggttgcacggtgtgttggccttggccatgcgccacggcagggaacagagacgagcagcagggaggcagcaatggaggcgctcattgaccctgctctcgctgtaaagatagtcccgcggtgccctccgaattccacttgatccaactctcgacatgaagcggccacgcggcgctactccctccctgtctgcgatgcccaatcatcaggaagatgacggctacggcgtggtcgggatggaggcggacgtggacgtggacgtggacgaggagatgatggcgttcggcggcggcggcggcggggagaagaagcggcgcctgagcgccgagcaggtgcgcgcgctggagcggagcttcgaggtggagaacaagctggagccggagcgcaaggcgcggctggcgcgcgacctcggcctgcagccccgccaggtcgccgtctggttccagaaccgccgcgcccgctggaagaccaagcagctggagcgcgactacgccgcgctgcgccgctcctacgacgcgcttcggctcgaccacgacgcgctccgccgcgacaaggacgccctcctcgccgagatcagggagctcaaggcgaagctaggggacgacgaggacgcagcggcgagcttcacgtcggtcaaggcggagccggcggcctcggacgggccggcccccgcgggggtggggtcgtccgagatcagtgactccagcgcggtgctgaacgacgcggacccgcccgtggcggaggcgccggcgccggcgcccgaggtgcagggcacccttcttgtcgcgccggctggccccgttgccggcgcagcggcggcgaaccatggcggggtgttcttccacgggagtttcctgaaggtggaggaggacgagacgggccttttagacgacgacgggccgtgcggcgggttcttcgccgtggagcagccgccggcgatggcgtggtggaacgagcccgcggaacactggaactgaaccgaggtggacgcggcagtgcagcgtagtagaatcgggatctcggacgagcggtggaggaataaccgaatagaggaattcggagcgataaagaaggggcttttctgcaaattttgtaaaacggggttttacctagccctactttttgtcaattctcgagcgtattagcagtagacagtagtagtagtctgggtcggaacccagtcaagctcagcgcctgggttgcgtttggactccagtgcagaattgcgtagaggatttagaggaagagcggagctgagctgagcgaggcaggagtaaaggacaacctgtatgtcactgttagtgggcccagtgccacgtgaaagtcaggcactgttggtgcccattgacggccggacttgccagcgacgcggatgggcgacgtgaacgtgtctggccgagcagtgcgctcgctccctccccccaatgggccatggcctcttccgcgaaagcgtgctcccctgtaagtatctgatttggatgctagccaaggctgctggatgattacttcgatt

SEQ ID NO: 3726 - DNA, 560 bp, Zea mays
  Clone ID: 700336605_FLI
gtgaacaacggctgctcgtctacgagtatgtgcccaacaagaccctcgagttccagcttcacgggagtggcaggccaacattggactggccgaggcggtggaagatcgcggtcggctcggccaagggcctcgcctatctgcacgaagactgtcatcctaagatcatccatcgtgacattaaggcggcgaacatccttctggattataactacgagccaaaggttgcagattttgggttggccaaataccaagcagctgaagtaacctctgtttctacgcgtgtaatggggactttcggatacttggcgccagagtacgctgccacaggcaaagttaacgaccggtccgacgtcttctccttcggcgtgatgcttctggaactgatcactggaaggaaaccaatcatgacatcttcagagtatcagcctgagacattagtttcttgggctaggccattgctgacaagagctgtcgaggaggaaaactatgacgaactgatcgatcccaggctggagaccaactacgacgcgtacgacatggcgcggctggttgcgtgcgcc

SEQ ID NO: 3727 - DNA, 1682 bp, Zea mays
  Clone ID: 700336611_FLI
cctataggctatagcggcagggagaaagtgagcacccacctcaacccgcccgccgccatggcgctccgccgcatcacaccgcggaggagacccgttctccccgtcccccgtgccttctcctcgagtccgccgtttcctccacccccgcctccggcgaacgaccccgaccccgacgccgcccaacccccatcctcttctccgccccctaattccggcgcgccgcggaacccggagtcctcgttcttccaggacatcaaagatcgcctccgttcgtctcccacgtctccgtctccgcgccggatcccgacgaccctgccccgccccgaccctgcgcgcggcgctccttcttcgggaccgcccattggagacatccgccggatgctccagaacttccgcttaaccggctcaaccagcgacgcgccctccacctccgctcccggatccaacccctccttcatggacctgctcaagaaccacttggaccagggtgccaacgcccggcaggcggagctcggcttcaatgccatcggagagagcctcaagcgcccccgtccgccgaagccttttataaccccttcgtcgagaaacatcttctgccgggagctagagaggacctcgaaggctttaggtgcgcggcaggaagagaatggctctgccattgagcttaaggggagctacagctacgaagagcttgggaagagactaggggagctgcggccggcgggtgcaggtaaagacggtaaggagtggttctcgctcaaggagctgcaggggcgtatcgccaagctcgcggagcaggagagccagcttgccgggccgttttcggaaatgcggcggggcattaggaacctgcagaaacaaggaaaaccgggtcggcctgtaaacatccaagcactgctgaaccctgtcggtcagccgacgccagactacatgagtgggcctccgcaggtggaattgttagagaagtacttccatccagatcatatgtcatccgaagagaagatgaaattggagctccaaagggtgagggacgaattcaagatgtccgagaatgactgtggttctgcacgagttcaaattgcccagctgactctgaaaatcaagcatctgtcaactgttctacacaagaaggataaacattctagaaaggggcttcaggagatggtccaaaggaggaagaaatacctgaaatacttgcgaaggaccgactgggactcttactgtcttgttctgtcaaagctggggcttcgcgatgtgcccgagtacaaagctcctgactacaagagcaaagcaaccaccaaggccaaatctaagaagaagagcaagagcaagggcaagaagaaggtgaaggcataaaagtagtgaacaaatatgccctgtttctggtcttgaattgcatgctcagaaaataaatcgagaagacgctcaggcctgagatggcttgatccaatcttgcaatgctgtttttttttgcatggtcagaaaatgaatcgagaagacgctcaggccccaattggctcgatccaatcttgtaatgttgttttcgaagctgtttgtaataaccatttcactgattcggtccagccttcgaacaatgccttttagttctccccctcaatttgcgagaacggaagtggactaaccgacactagtactataccgttgcattatcaccagtttgt

SEQ ID NO: 3728 - DNA, 1751 bp, Zea mays
  Clone ID: 700336683_FLI
agctgcacgtgatgtcgccggtcgtcccgacgcgcgagttctgcttcctgcgctactgccggcagatcgagcgcgggctgtgggcgatcgcggacatctcggtggacctgcagcagcacgacgcgaggttcggcgcgccgccgtcgcgatcatgccgcctcccgtcgggatgcctcatcgccgatatggccgacggctcctccaaggtgacatgggtggagcacatggagatcgaggacagggttcccatccacctgctctaccgcgacctcatcctcagcggcgccgcgctcggggcgcaccggtggctcgccgccctgcagagggcgtgcgagcggtgcgcgtgcctcgtcccggccggtatgccgcaccgggacattgcagttgcaggagtgacgccggaagggaaacggagcatgatgaagctgtcgcagcggatggtgagcagcttctgcgcgagcctgagcgcgtcgcagctccaccggtggacgacgctgtcggggcccagcgacgtgggcgtccgcgtcacggtgcaccgcagcacggacccggggcagcccagcggcgtggtgctcagcgcggccacgtccatctggctgccggtcccgtgcgaccgggtgttcgccttcgtccgcgacgagcacacgcgctcccagtgggacgtgctgtcgcacgggaacccggtgcaggaggtgtcgcgcatccccaacggctcccacccagggaactgcatctccttgctcagaggcctgaacgcgagccagaacagcatgctgatcctgcaggagagctgcaccgacgggacggggtcgctggtggtgtacgcgccgatcgacatcccggcggccaacgtggtgatgagcggcgaggacccgtccgcgatcccgctcctgccgtcgggcttcaccatcctgccggacgggcggcccggcgcgccgtcgtcctcgagcgccggcggcccgctggtgggctcccccgcggcggcggggtcgctggtgacggtggcgttccagatcctggtgagcagcctgccgtcgtcgaggctgaacgccgagtcggtggccacggtcaacagcctcatcagcaccactgtggagcaaatcaaggcggccttgaattgtgccagccattgatggagccccggctgatggatccatggaatttggtgcgggcgtgcgtgcgtgcatgcatgcgcgcgcgttggtctcggtctcctctcctctcgtcccccagccggccgcctgccgcctgcctggtggctgctgcgaggagtgaattcccttcaaggcgttggttcgcgacggagctcttggttggtcgggggggcttcaatgctggctggccattcaaggaggcgggggctgctgccatggtgtcgcccgcttggggttcacctgccgctgttactgcgccgtccgatcaccggcccatgatcattcagctctgtctctctctctctacctctacccctttctctgcatgcatgataacttttcctgttacaggatttgaagcttgcttgccggcgaggctttgcacgaaacgggggagtcaagaacgcaccatgctcgtctcattcctcttgctgccgtcacgctcatcagttgttaattccattcctctttgtgtctcccctcccctagtttctgccgccgatttgcagtctcgctcccattctgtagtttgcagcagaggatgatgcatggttcgggtattgacttctatctaatggtgtgaagccttcaatgatc

SEQ ID NO: 3729 - DNA, 252 bp, Zea mays
  Clone ID: 700336687_FLI
gtcgatgatcactcaatgcgaagtgactgaaagcttcttgtattggttaatgtgactggaccagccatatatccaccggctttgatgatactctttatcctgataggatatgttttttttggttaatcgtgatatggagattgaaacacggagcagcatgaaaacaaatggaaaagaaaccatgaaaactatgaaaacttatagatttcgacaaaagaatacatgcaaactatgtcagtggttggtttcggc

SEQ ID NO: 3730 - DNA, 2315 bp, Zea mays
  Clone ID: 700336725_FLI
ccaaacttcaaaaatgatgggaatccttttaataccagcatagctccctctacctcaccctcttcaacacctacaggctctagaccaacacaaacaccatcgtcttcttcatccccttcaggatctccgccaccatctagtgcagcatcaaactcttctagtggatctactgctcgaaatagcaactctccatcatccaagaagaacaagtcttcacccctcagaactgttggatatgttcttcttgctattgtactattcatagttctagtgctgttggtaatcttttgcctgtccaagtatcaagaaagacagtctagacgtgattattccacgtctcaattaggtagggtgcaccagagggttgaggagccaaaaagcaagcaagcttcggtgcagtctaaacatgaagccaaaaaaggttcatctgaggttcctgaaagaaagaagccccgagaaataaatttagctgtaccagttgccattgagaagcctcctgaaaagagacaagagcgtgtaattaatttggaacgaacagaatcagagatctttgctgcagcaccacctccacctccgcccccaccaccactgcccccaacaccgccacctctgcctccacgactgccatcaccacctcctgttgaaaaagtaactgtaaatcccattgtacttccagaaaaaagagttagcacctcgccaaggactggtccctcgacatctgcaacatccttttcggtggcatcacttcagcaatatacaaatagttttcaagagcaaaatttgataagagagagtagattggggaaagtgtatctggcagaacttcctggaggcaaattactggaagttatgaagattgataatgctaatggaagaataccagtagatgactttctagagttggttgctcgtatatcagatattagacaccctaacattcttgaattagttggatattgtgctgaatatgaacagcggttactcgtgtataactacttcagtagaaaaacattacatgatgtactacatgaaggggaggatctagatgaaccattatcctggaatgctcgcctccacattgctcttcatgcagcaaaagccttagagtatctccatgacacctgtgaacctcctgtagtacaccagaattttgaaccagccaacgtgctcctcgacaatagatgctcagtacgtgttgctgaatgtgggctggcacaattgatggcgtctggttctgttacacagctatcaggccgtatgcgagctctactcaattatgaagcacctgaaatccatgaatctgagccttttacttgtcaaagtgacgtatatagtttgggtgtggtgatgctagaacttcttactggtcgtaagccatatgacagttctcgtccacgtgatgaacaacatcttgttcgatgggctgattctcagcttcatgacatggagtccctgtcaaagatggttgatccttctatccgaggagagtgttctgtgatactgttgtcacgttttgcagacatcatcagtcagtgtattcagccgggaccagaattcaggccagcaatgtctcaaatcgtccaagacctagctaggattgtaggtgctagtggtgtggtatcaaagtgacagataaagggggaacagtgaacatctagcttggctgtatgcacttgtgcagacgccagaacgtttgtttcctttatctaaaaaaaaagtaaaacatctagcttgtcagtcgtgtggccagtgaagattcatacatcctcagcgcagtgccaggggcactctcagtatttatattggacgatatcgcggctagtgtacatgccattttggagccccatttgcttctgaaagatgtagtggtactgtggtagtatggcacaaccagtgactcagtgagatatggcttctcattgttgctagcagatattcctgagctcctctagatatgataatttcacctgcaggcagtatctcttgtaactaattccaattttttattactttattactacattatagctagttatgtcaaacatggtgcttttagcatgtcttgagacctatgtttctcctgggaaaagaactggcttgctgattctttgcagaggcaaagcaacctttttctgacctgtacatgaagattctcctccttgaagcgaaagcacctctgctaggtatgcgtggtgtgcttggttccttacttttcttcgtgtgatttcttcaagatgtagaataagttatgacagtgttcaactatgctgattggggattagatgaacttttgtattgatccgttcttaactgat

SEQ ID NO: 3731 - DNA, 1691 bp, Zea mays
  Clone ID: 700336783_FLI
actgaacagatcagatctggagaaactgcgagagccggctgaagttgacgtcgctcctgttcaggccatcacgtcaagcaaccggtcacagatctatctgacaaaatggtgaagatctgctgcatcggtgctggctatgtcggtggcccaaccatggccgtcattgccctcaagtgcccagacattgaggtcgtcgtcgttgacatctccaagccccgcattgaggcctggaacagtgacaccctgccaatctacgagcctggtctcgatgatgttgtgaagcagtgcaggggcaggaacctcttcttcagcactgatgttgagaagcacgtcgctgaggctgacattatctttgtctcggtgaacacccccaccaagacccgtgggcttggagctggcaaggctgccgacctcacctactgggagagcgctgcccgcatgattgcggatgtctccaagtctgacaagattgttgttgagaagtccactgtccctgtcaagaccgctgaggctattgagaagatcttgacccacaacagcaagggcatcaactaccagatcctcaccaccaacctgtggtctgctgagctctccaagctcgctgccaacgcgttcctggcacagaggatctcctctgtgaacgccatctccgccctctgcgaggccaccggcgcgaatgtgactgaggtggcttacgccgtgggcaaggacacgaggattggccccaagttcctgaacgccagtgttgggttcggtgggtcttgcttccagaaggacatcctgaacctggtgtacatctgcgagtgcaatggcctgcccgaggtggccaactactggaagcaggtgatcaagatcaacgactaccagaagagccggttcgtgaaccgcgtcgtgtcgtccatgttcaacaccgttgccggcaagaagatcgccgtcctcggcttcgccttcaagaaggacaccggcgacaccagggagaccccggccatcgatgtctgcaagggcctgctgggtgacaaggcccagatcagcatctacgacccccaggtgacggaggaccagatccagcgggacctagccatgaacaagttcgactgggaccacccgatgcacctgcagccgacgagcccgacggccgtgaagcaggtgagctgcgtgtgggacgcgtacgaggccaccaagggcgcccacgggctgtgcatcctgaccgagtgggacgagttcaagaccctggactaccagaagatcttcgacaacatgcagaagcccgccttcgtcttcgacggccgcaacatcgtcgactccgagaagctgagggagatcggcttcatcgtctactccatcggcaagccgctcgacgcctggctcaaggacatgcccgcggtcgcctaatcccacccccctcacccatggattggattccgggaaggaagaggagagaagctggttgaccgttctttattacagtttgtttttgcaggctacgctaccgattttctcttgtgtcaggcataaaaaaaggttggacgggctgctagtattccctgctgtttggtgttttcgtatcggaggacgtctgtagatgtacaattcctcaggccccttgtgttcggcttgaggaagtttccgttgtaccctggacctgctatagccggttgattcttcaattgtattcctaaaagttactacac

SEQ ID NO: 3732 - DNA, 422 bp, Zea mays
  Clone ID: 700336806_FLI
gtggcgccgggcaacttcgagcggcactggggcatcctccggtacgacgggcagcccaagtacccgatggacctgagcgggcaggggcagaacgcgatgctggtgccggcgcgcggcgtggagtacctgccccggacgtggtgcgtcgtcaacaccaacgccggcaacatggacaagctcgccgacaacatcaactacgcgtgcacgttcgccgactgcaccgcgctgggctacggctccacgtgcggcggcatggacagcaacggcaacgcgtcctacgcattcaacgccttcttccaggtgcagaaccagaaggaggaggcctgcggcttccagggcctcgccgtgcccacgcagacggacccgtccaccgccgcctgcaacttcaccatacagatcgccaccacctcggcgggtcaccg

SEQ ID NO: 3733 - DNA, 728 bp, Zea mays
  Clone ID: 700336826_FLI
gggcaagctatttcatccaccggctcttcctccattcagttgcagagtttaccggtactacctgtcgtatttctgggcaaacgacaggcgcacccgggatgctcttgggatcaaggagggcaccgtggatgagtgggtcagatgccacaacgacgaccaagagttgccttacgagagcgagctgaagagtgtcgtcaagtaccaccggaacctgacgtccagaggctaccgagccatggtatacagcggcgaccatgacctgctggtgccacatctgggcacccaggcctgggtcaggtcgctcaacttccccgtcgtggacgactggagggcgtggcatctcggtggccagtcagctggatttacaataacttactcaaacaacatgacattcgcgacgatcaagggcgccgggcatacagcacctgagtacgagccggagaggtgtttcgccatgttcagccgttggatcctcaaccggccactctaatccatcggtgaatgaagagattcgtgtgtaaatctttcttcacgaaactactggctataagatgtacgtggatggaataaaatgctggctatgaacccttgatgctgatgatatatactccatcagtgtggtgaagccagatatgtattgtaggaataaataaaagtacaaaacggatgtacaaaggtacgtacagtgccctctagctacgctacattagcaatatacacgttcatat

SEQ ID NO: 3734 - DNA, 2067 bp, Zea mays
  Clone ID: 700336827_FLI
gagtagtagaaactaggaagggccgttcgtgtcttgcggagaagatggagaacctgaggaggttcctgaacccgctggtgctcaacctgcagaagatggagctggagctcacctgccccgtctgcctgaagttgctcacctcgcccacaacgctgccgtgttaccacacatcctgcagcaagtgtgcccttacaccgacttcaaaaggctacagctgtgccatttgcaaatcaggctattgttctcaagatttaaggccagcttctcaccttgagtcgatagtgagcattcataggagcctcagctctaccgtcagcaccatgattgaacaacaggattctcaaattaacattcatgttgcaaaggcagcatctcatggaacaccagaatcaggaaacagaagtggggtggaggagaaatctgaccagatgaaatcttacaaccctgttgcttcaaagctagtatataaccaaccaactggacctgcatttgggaacattgatagtgttcaagcaaaagatcctgcatttgagaacaatgctggtgccgcagctgttgcaccaatggcttttgtacgaaagggtcattctgggtcacaatcttctgatggccctggagatttggactgtgacagcaatgacctcgaaggagaactgatgacaagcctatcacctcttcaaactgcattgaaacgagaggcaaatgcaatggatgatcataccagagaattgaagaagcaaaaatcaaatgatcaagttcaaagacaaacaaacatggccagtgcttggaaatgtgagttctgtcattcttcccaagttactgagtgtactggccctttgtcacattatttgaatggggagccagtagaagctgatcaagcttggaaatcaagtgttcagcatgtccatgagaaatgcattgaatgggctcctcaagcattctttactggtgacaccgcaaacaacttggggcctgagttggcccgtgcttctaagatcaaatgcagtgtttgtggcttaaaaggcgcagcacttggctgccttgtgaagagctgccgcaaaagttttcatgtcccatgtgcctacaacatcaaaggctgcaaatgggatcaagagaactttgttatgctgtgtcctacacattcgtcaaaaaagttgccttgtgagagattaaagccaaaaaagaaggccaagctgcagcaaccatcttccgacattgatggtccgatttcaccctctccgatgcaaagggctgaactttggactgcctcaccttttctgactagtgaatgggtgatatgtggatctgcgctcgttggccatgagaaggaaatcttggatcagtttgagtgtcacactggcatcacagtaaccaacacctggagttcagatgtgactcatgtgattgctaatacggatgaacgtggggcatgtgcacggacactcaaggtcctcatggctattttagctgggaagtgggttctcaatgtgaattggctgaaagcctgtatggaggctagggaaccagtcccagaagagccctacgagataaggtgtgatgttcatggctctgtcgacggccctcgctcaggaaggctccgagcgatgcagcaggcaccaggtctgtttgctgggttgaccttctacttcagtggccatttcatgccgggatacagggccaacctcgaagatttgatcgccgcagcaggggggtccgttctggagaaggccgagctctctagcacgtccttgatcctctacagcatggaggcgccgccgccccacaacaacctagacgccctcgagaccatcaacaagagattagccgaggcccaggaactggcgaccacggctggctgcaaagccattcctcatacatggcttctggactgtatcgcgtcgtgcgcggttgagttgaacgtgtcgtgttctactgcctaggttcaaacgtaggaatgtgacatctgctgctgtttttttttgaaaaaggagattaagagacgattggcttgttgtcttgatccaaagtatctttagacgttgtagcatgaaagcggaatttagtcgg

SEQ ID NO: 3735 - DNA, 2685 bp, Zea mays
  Clone ID: 700336954_FLI
cgcccacggacgcaacctccctccctccccgtccccgttcatgtcgcccccgtccgtgatcccctccccgccctcctctccgcgaccccatccatcctgtcgccgtccacgcccagcagcgctcaaaagcaaaaaagggtacgaatacgaatcccaatccagggccggagggcgagcgaactcaaaagcaagctgttccagtccaatccgccccagtccaaatctaatcgccgggtttaggcagaaggggtgggacgcggcgaggtttaggcggggtttgttttgtccctttcgtgcgattctgctctccgcgcgggaggcaagtactgacggaagcgaagaccaaggcggaggagggggtccccggcggtggaagtggaacgcgccgatgcgcaagtttcaggactccatcaaggccctccaggccgacatcgatcatgccaatgcgatagcagggtgtcggaattcttgagggactacgatggctcggtcatccagatgcgggtggcgtacagcgccgtcgcgcatttcctcctgcagtggaccgactgcaagctcgccggcgcgctcggcctcctcaaggttatgctatacaaggtgtgcgcggacggctcgtcggcgcttcctgattgggacatggaggccagcatcagggagttttacggcgtcattttcccgttgttgctgcagcttccgagtggcatcaccgagctggacgacaggaagcagaggaagctctgcctcaagaaattcaggagcagggatgagcagctctgggaggtggacacggagagggagcttgagtgtgggatctgcctcgaggaaatgacacctactctactccgcagcttaaaacctcaagatatgtcggtaatcaaacaagtacaagtttcaaggaaatgggaatttcatggaaatacagacattgggtccatattacacattgatatgattttggctgacaaagagcgctgtctgaggtgcgtggtcaagtcgaggcgaagatgagcaaggaggatgtgctcaaggtgcaggtgagttcgctccactcttcttcttcttcttcttgccgatcgacccaaccaccgcactccacctacacacaggcacatgttcattgtttttgctgatttcaacatagtactgctcagtggcggatccaggatgagatgcaaggaggggctactagcctactaaaataaagctaaaaatatttagatataactaaatgatctaattaatatagaccaaataagtatgaaaataactaataagttgtgttaaaaagtacaatactcaaaacatacccctaatgagttgtgttaaaagtatctttgttccggttcttgatgagaaatttatccattctatccctataaactaaaaaataattttatcaattaacctagcaaataattgaccaatccaaaataccaaagtataaaacctaatctcttggtgaaaagcaatctatgtttagcaagttaagaattatatagagtaaagtctagattctagagggaagataaatgacgtcgattgaaaataaaaagggcaaggcacagtcttgaaatgacactacacactacaccgatcctccagcccttgccacgctttttcttttgtatctcgtgggtcatggcttgcagtgcagcctatagcttgcactgcaggacagtgtgtctggcgtcttgacctgcttacaccaacacgtgactctctgttggctgctgcatactcgccttgttgccggcaccgcgaccggggctgcagcccaggcagtcccaggttcaaatccgcccctggtactgcttgtttagtagtgaagacagagactgcagtgaaaacagaccaccacctgtattctttcaggtgttagaaatgtaaaattttgctttctggttatgtgtgttcctcttgctgcatggttattaccccacccccatccatctcgcctgtgcagaaataataaacatcactagtgtgcgttaactattttcttgatactgttgtttctattgttctcaaggtcttggattcaacatagtactagcagtttggaatcacccgacggggatgctttccatgtaataaatatttttggaacgtttcggatttaacttatgttgtttctattgcaatcaacatggtgtcactatttggattcaccagtaagaatatttgccatttgggcttgttaattagggtgaaattttatataaaacatgcctcgttcacttgctttccagttcttgatttcagatctctgaagccaattacgtacacattttcctaccacgacttttattctgctttccgtttctcaacgtcttggacattgccggcgagcgcggtctcctcgacaacttctactgctaactcgggtgcaagatgcccagcaaacttcccaatccagctgccggcaaggagatgaggttcccgacggcgacaattttccactacacaaccggattcttcagcagcatatggatccgttgaagcgccgtgtgacaatgccaccaaagagcagcaacaaacaagctcaaagtctccgctaaccactaatctcataaagcttgaattttctcattgctatgtttccttctcctagcaaagttaagatgtttgcacatttctagcttattaggtccttgtgtggaatgtgtttgaacaatgatctcattt

SEQ ID NO: 3736 - DNA, 260 bp, Zea mays
  Clone ID: 700337055_FLI
ctttgcaacgaagaaaacgaccaaccaaatctggagggaaatatggagggatcatgatgtggttcaagtactatgatgatcaagatggctacaattcttgagtgaagagtgatgtttaggttgttgtctgtggtgtgtgacaatatctgtgtgttacttgtgtgtatgtgagaaattatgtgactctggagtctggatagtgcaataagtattactcaagtatatgattgaatcttatgtcatactattcaaattatgtc

SEQ ID NO: 3737 - DNA, 543 bp, Zea mays
  Clone ID: 700337056_FLI
gccgccagtgcagatattcacactccacccagagaggctaaagtggagttggcatccaatgctaagagcccatatgagcaaaaaccccagaagcagtacaagatgatggacgtgaacactgatgaggaggtgaccatggtctccaccttggaacaggatgagacacaaggcaagactgtagcccccgtaccgtcagcaactgcagaaacccgcaattcaagttcagacgcggtgatgaaggatgcggaggcttcgtccgtggctcaagacgatgatgaagtgcaggtggttgacaagatgaaagaggggtagctttttttcgcactttttgtgtttggaggacttgatgttgtcgtacagagttttctaatttagtttgtagtatatgtttttctaattaagtactccttccattcttttttatttgttatggtttagtttagaaatgaactaacgctcgttcttttttatttgtcacgttagtttaaaaatgaactagcggacgacaagtattgagaacggaggtaatacagtacttgtcgt

SEQ ID NO: 3738 - DNA, 356 bp, Zea mays
  Clone ID: 700337079_FLI
ctcgccgtggaggacatggaggagttccacgacgacttctccgtcgtgcccagcgagcacccctcgctgcacaggctcatcaagtcgcaatcgtgcaggctggccaagcttaggcacggggtcggggaggaggccaagcggacgctgtcggtgtgcgccgccggctcgtcctaggaacgaccgacgagcggtgctgcgcaggcagaagccatttccacgcgtccccctttcagctttgttgcgcccagtccgagggttttgtctttgtttctgtcgtccgaatggagcgagtggtgatggtgaagtgtgtcagaaatagatcggagaaaaatgaaatagaaagcagcaacagcacc

SEQ ID NO: 3739 - DNA, 565 bp, Zea mays
  Clone ID: 700337153_FLI
atccagcaatttatgttactgagaatggcatggatgaagaggacgatcaatccgcaacgcttgaccaggtcctaaacgacacgacgagggtcggttacttcaaagggtacctcaattcagttgcgcaagcgatcaaggacggagctgatgtccgcgggtactttgcgtggtcgttcctggacaacttcgagtgggcaatgggctacaccaagaggttcggcatagtctacgtggactacaagaacgggctgtccaggcacccgaaagcatcggcgctgtggttctcgcgcttgctcaagggcgaggctggcactggcacaagctgagcgaactgcacgcagcatgcaagcacagaacgtcgtcgttattacaatataaatattccacacaactagacgttttctcctgttgttgtatcgtactactgtacagtaagcgccaataagctagcctcagatgtgtgctacctgcctatacctctagtgactgccattgatccagcactagctgaaatgtacccggcctccatgaatcagcaccagaatatatgctttgaattgaactc

SEQ ID NO: 3740 - DNA, 537 bp, Zea mays
  Clone ID: 700337210_FLI
gtcgacgcctcacagcctccctcgacgcgacgccgctggccactcgacggagtcggcgcctcagtcacagcgtcgggaaaccagtgccaatgtggcggcgtcgtaggccgcggaagccatctcgggcgtcgagtacgtgacgaggcagatcctgctgggtttgcgcagctcgcggccggatctccgataccacttgatgaacgtatggagagaagagaggggcatcctcacttctagtattcgtagcaagagagagacagagagagagacagtgattaatggcctgcgtcctaaatttaagctagggcctggcagtaattcaattttttttttgtaatctagcaaatcttgatacggaccattgctagtacctccttgcattgcgttgataaaggtgtagcattgtagaccttgagggtcatggtattattactcctggatttctagttgttacttgacaactgaatatgctttgttacttttcttgtcaaacaactgaatatgaaatggctgtcaaacaagatgttttgttgattt

SEQ ID NO: 3741 - DNA, 717 bp, Zea mays
  Clone ID: 700337336_FLI
aaatggtacaatggttacagtcgaggatttgcatcaggaactaaaatgcagtatcaacatcaaacacagggatgagttcgatgaagaaaaggagcctgacagaatggttcttgttgggtggtctggcccagttgataagcaaaccactagtaatggtgagactaaatcagttccatcttcatccaatacagaagatgtggatggtactgccgaggacatatcagcaacttctggaatgaagcgtaagctgaacgaaatattagagacaaaggagaattttgatgctctcgaaaatctttcgggtgttgattccagcagcgctcaagttgttgaagatgacaatgacgatggccttcttatgtttgatgaggacccaaggcaaagtaagaagaagagattgcagtagcatcctgctgcggcgataacagctcttgactcccggcatcgtggctaacacattgttcgatcgtaacatctttgataacttatttatgcggttatgtaccaggttgatgttgaaacattagtaacaatgcccagggcaccttttggcctcagatagtcagataccctgtagggttgtaatttgtaggatttaggaacaagagcaactaatgctcagctgacagcctgctgcgagatagaatttgtatctcaagagccaaggtcctgttttggttatgttttttgttcagttgaggggtgaccgggtgaacc

SEQ ID NO: 3742 - DNA, 726 bp, Zea mays
  Clone ID: 700337382_FLI
gaactgttgattgtgctgtatgttggtgttctgtctgcggttgaaactattggtcattggcatggcttttcttgaacagccgagccaccatatactcgtgatgatggttttctctcacgggaggcgtttctcaaagactgtgctaaggcttttagtgtccccccaataaactctgaggaaaatccgcaagtattctccaaaaagtttgtgaatatagttgacccattgaagcagagtaacaatcttggacgcagtatcagcaaaggaaaccttggccggatacgcaaggaattctattttggtgcttgcaagctcggcaagattcttcaggcgcccgcgtgtttctctgccaacgaaatcaaccggtttttcaggaacacattaagcagggcagatgttccggtgagctctcctgatgatgttctacaggccgctagtgtttctgcgtcaccgggcaacaagggcgtggaaggagtcagcaagggcagttcacccaacaactcgtgtgacgttctgtgcaatcagttcggttacattaaaatctcagattccaacaatgcgctgcagaatctggtcgtggacaggcccgcttaggctgtacctgcacatggtcatagaacctccagcagcttactcatcttactttctaccatattttttttaaaaaaaacttccacattataaagaatacagtctatggtataaaataatgttttacatggctgt

SEQ ID NO: 3743 - DNA, 227 bp, Zea mays
  Clone ID: 700337383_FLI
ggctgtttattgatgccttcaagcttgctagctgagctgcactatgtcctgcttggctacttctttgcacgctcttgatcaccacaaacatgactatatatgacatacatcatttttgtattgttgtatgtgaagattgaatccagtttacatagccttttagtttacatggaattcatctctgctgtgcaattttgcaaacttgaggttaatccaagctaattctg

SEQ ID NO: 3744 - DNA, 449 bp, Zea mays
  Clone ID: 700337389_FLI
cacaaactaggaaagtcagaaaagacggtttgggaaaaaaatgacgaacccggtgatgaggtcgatgttcagcaaaatggctggggaacatggaaacaaaatagtacgtcagcttggtcttatagagcccttaggagcagcgcccttggcccgacgatggcacttctacgagggaagaacaaccagaggggtaaaccaccctatcgaaagaagggcaagtaattgcctatgtgtttagtgtttaagttcaacgatacctatgtaatcctgtgttggtccaatcttttagcagttgatcttatttatgtaaaatttggcgaggaagagtgactgccgttgctgccctggtcattttgaagtctggccaagcgaattgttatcgtttgcaaaggatcgttatgatttgctccgacacttgtcaaatgctggttttagagttttgcatgtgc

SEQ ID NO: 3745 - DNA, 1129 bp, Zea mays
  Clone ID: 700337421_FLI
atgacacttaagggaatatactgattctgtctccatgctctcctcaccactttctgcacagtggaccctggaaaaaaagcattcatcaacaaatatcacaagttcacggcgatcatttcatatttgttacatacttacatgaacacccaatctaccagttgttatgacaaataccaaatggaaacagaaggactgtttggtttgttgcctaacttgccacactttaactaactttttctgcctaaggttagttcttcaatacgagcgactaaccttagccaaagtgtggcacagttagccgcgaacaaaacaggcacagaatacggaacacctacacaacaattactcgatgacagcactaaaacaatcataagttcataacaggctttacaggcacagacgcccatgtatttgatatgcagacatcaaaagtataggaggtgcagtttgtatcatttaccgttctggacatgcattgggaaataatgtttattgtattcagctaacaattaggtaaaggccaattataaacataaaataagatactgttgtatgttggaactgtctgtgtactgtttaagatatataaaacaggataactagccttatgtcagtatagcagggttctttttggtgtgtgtctaattagcacatggcacatctcacataatcttttgctggtttgaactggacctgtaccatatttttcttctataattatatgctattctatgcacctctcctgcctgtttgagtaaaaaataaacggtcgcaccaaactacaattgtagaacaaaaagtaacatatacatatatagggcatataatacaagggagggggggacagaacctgctcacgagatctatcccaaatagttgcttcatcggaagagctgcagattcactatagaaaaaaaaagtaggcaaataattttaggcaaagtagccaaacattgccataaaaattacagggaagacaaagataatacgataaatataaatggttacaaggtgaagagccattagttgacattttgacaacaaacaggttaccttgaatctgaggtaagagtttgagaaagcgtatacaccaactgtgtccagcattcttctgcatcctgtatttttt

SEQ ID NO: 3746 - DNA, 296 bp, Zea mays
  Clone ID: 700337462_FLI
ccaaaacaaacatatatatagtagagtaggcttacataacgcatccaattattcactttcattaggcttacaaataagagtcaaccttatatatactagtgatgatgtaatgtaactctagcaatgtccataccgtaccacacactccatgtatcgctttttaatttcatggcatgcacacactcaacgtgcacgcaccaagctcccgccacctctacagtccaccaccgatgccaccacccgaacctccaccacctccgaagccaccacctgaacctccgccaaaaccaccaccc

SEQ ID NO: 3747 - DNA, 503 bp, Zea mays
  Clone ID: 700337474_FLI
gtgttgtccaaggatgggtatcgatcttccatggaggtccaaccggccgccgctggaccttcatctaatctggatagtgaaagtcatctagtgcaacggaggaggaaataagcaaccaaagaagacatcaaggtttctaagagctcgttcaggtgacaactcgttagccatgcttggtttcagacggccaagtgcaagccctgaatgtccacaaagggaattacaaggtccagagacgtggttgccagcgcgaggtgcttggaagacgaaggatggtgggggatagaaactctttttgatcaatggacggaagagtcattgcaactacatttagacgtgtccatatacttatgtattttttgaattttgagataaagtcgtggtattgaaaaatattatagtatttttccaagtgtttggctaccttgtaaaagctatcttttgaatactataatttagtagttccatggtttagtagataccatggtatttatttttgaagt

SEQ ID NO: 3748 - DNA, 201 bp, Zea mays
  Clone ID: 700337505_FLI
caatgctggcgctggtgttatcgcgcacgttgcggacagcatcaagcagcaggagtcacggccatgtcttcctgccaatctatagcagtagcattcagcaatccatttgttcaaattatctgtcgctagcaaataaacccatgaccaaactctgttcgtcagcatccactgagcggcgaaatatttgggactgggacacac

SEQ ID NO: 3749 - DNA, 430 bp, Zea mays
  Clone ID: 700337519_FLI
agaaaagttacccagcctgagaaatggaaaggacagatagagaaggttgttttctgcaacagttcgaatttagaggaagcatgccatggttgacaacctctagtgtttctatacacttgatttctgtttccattacaggatttgccacgaacatttccaggacaccctgcattagatgaggatgggaggaatgctttgaggcggttgttaaccgcatatgcaaggcataatccatcagttgggtactgccaggtaaattgatgccaattgaaggaattttgttttttttatctagcctcttgttggcttaattgtattgaatgagatagattgtaatcctaattggtgcatgcaaactatgaaaggtcatgtctctgatgttcagttgagcatttgagcaaaattgtaatgtatgaccttaaattttgag

SEQ ID NO: 3750 - DNA, 642 bp, Zea mays
  Clone ID: 700337559_FLI
gtgccgacctggatcggcgcccagccgtcgctggccgtcctgagcctgcggaacaacacgttccagggcgtcgtgccggagtccctgggaagcgccccctcgctgcggtcgctcgttctcgcgtccaacaacctgtccgggaacctgccggacatgagccagcaggccaacctccaggtgctcgacgtcggcggcaactcgctcgagccggcgttccccaagctcgggaggaaggtggtcaccgtggtcctggctaggaaccggttcgtcgccttcctccagaacccgcagctcgtgcaggagttcaggcccgacaaacagtacaacatccacatgctccaggagcgatatcagatcggtcctgaccagattgaagctctgtatcagtgtgccaaatttcagtttgagtgtggtaactactcaggagcagctagagtgatgtagttgtgggcttttgaacaatagctggagtaatatgaaacattagtgatgtagttgtgggcttttgaactgcttcaagctggagtgatgtcgttgtggtgcttttgtgactgatcatctctggagcttttgtgaatgatctagctagctatctataaatgatctagttgtgaatgatattataattgtgatgcttttgtg

SEQ ID NO: 3751 - DNA, 610 bp, Zea mays
  Clone ID: 700337561_FLI
gcttagaaaaagtacaatactttatgtatgaattcagaaatcccaatgatattcattctgaatatgtgcaaatgcagaatgttgcatttgacaaatgactactctcaggcctgcaaactgcacattacaacgtgaagttggttattgaaagggcgcccatagctgcaaacatagctgtgaccacatgatgatgacgatttactacagcaggcacttgcaatgtcaatggagggtggtgcttcaggatctgcagctgtgactgactctgctatggcagaagctagtgcagttgaccctgacttagcgttggcttcctggtgttgatcccaatgatccatctgttaaagatttgttggcatcattgcacaaccagggagagcaagagaagaaggaagacaagtaagacaaaacagaagacgagaagaactgcttcaagctggagtgatgtcgctgtggtgcttttgtgactgatcatctctggagcttttgtgaatgatctagctagctatttgtaaatgatctagttgtgaatgatattataattgtgatacttttgtgaatatataattgtggtgcttttgtgtttatgtgatggatttatgactgtggt

SEQ ID NO: 3752 - DNA, 802 bp, Zea mays
  Clone ID: 700337594_FLI
attaggtatagatcgtaccaattggtggattttgcagagtaatgttccatttacgtcgtagtgaagataactagcgtagacgagaacttaggagagaattttgggtccaattcgctgtcttggatcgttggtctggcagttagggatgtcaagtaagaattttgggtccaattcacggtcttggatcgttggtctgacagttaggaatgtcaagttgacagatgcatgtattcataatccgtttggaacgctgcaggatcggggaatatatatcaaaaaaaaaaaaaaaaaataaaattaagaggtaaaagaaaacggaattaatggattggtttatattaattagtatttatatttttttgggtggggggggttttagtattgttcggcttcccgagacttaatatctgaccgggccggaacgttgtagcagtttcacttttgtgtagacggatatagttaggcttatgcttggacttagcttgatccctgtcgagagttgttttggttcatggtttgaatatacaaggtgtgcagtgcttaaatgtaaaatattgtggggcttaagtcatggttcaatttaaacaatttgatttgccctgcttttctcttttccttatataatacgaaaatatacgatgatgagttatatatagtagatcgtacgtgaagggagtagagtaatttattagtcttccatgtacatgataaatttttatttaagtgatggggtgtggggtaacagtaggttaattggaattggactggacgagaagtataacgattgtaattatattgagct

SEQ ID NO: 3753 - DNA, 317 bp, Zea mays
  Clone ID: 700337606_FLI
ccgaggggaggctgcagaaacctctcgtcgagtacatggcttgattgcatgactgttcgataaggcactctgaagcttgaggaagactgaagcttggagcgaagtaactgctatgttttcgtttgcgtttgtctgccgtgaagcggaatcgcgatgtctgtctcgtcgtgtgaaagaaactcgtgtatcggatgttcgtctgtcgtcgtgacttagaactctgtcgtggtcagttgtcttgcgcttgcgcttgggtcgaagttgataaatggcctctttgacgaactagcttggaataaagttcgagttgtgtggtt

SEQ ID NO: 3754 - DNA, 582 bp, Zea mays
  Clone ID: 700337643_FLI
gaaactgatagtgacagtgttcctccagcgctcgaggaaaaccaggctgttgcatttgcaaccaaagctgcagagtccctaggtgattctgccatgaatgcagagcattatgagggtcctgaggaggctgatgctactgaaaaaacaatgaaagtggttgaggacattgtgaagtccctggatgaatcctccttcaaggagggagaatcaaaggagacgcaaaagaagcagccgcaggattatgatatcatgagcctaataaagcttagaagcacgtacaagaaatgtcttattgcccgaaaggaggggaagaggcctcctctcgaggaggtggatgggaacgcctgcattgaccactgaacagaacaagctgtgtcagtcacaaaattttcgtgaggatggcagctgccacgacgggattgaatagaggaatgctctggttgtgaagtgataactaaggctaccttcaaggcttaatgatcaagggttaatgaaactgtggtttcagccaaccaacctgcaattcctgtggtttttgtccatgttgattaactagtacgaatgccaagttccttgaaagtt

SEQ ID NO: 3755 - DNA, 335 bp, Zea mays
  Clone ID: 700337712_FLI
cagatgctctgtattttcctcagggttattggcaaaactttacgatcggcattgttcctgggtttcatgaattgcagcatcttacgtcttctctggcttcataatcgtgagagatgatgcctgtgtggtggcggtgggtgtactgggcggatccggcggcatggacggttcatggcagagcgccccttgtttgtggagttcctcgaggcatatttataataatattatatatttatattatggtgatattttgtatttgtgaatgatctagctagctatctgtaaatgatctagttgtgaatgatattataattgtgatgcttttgtgaatatat

SEQ ID NO: 3756 - DNA, 246 bp, Zea mays
  Clone ID: 700337730_FLI
cagcagactgccgtttaattactgctcaaatttattccaatttattgttccttgtcgacaagttggccagtgtgatgtgggccgtgtactagtacaagcttgatgatgattagtatatctacaattcttcctttccggaagaagggcggaagagttgttagagccgtcttaatacaaagtttcgtcacattagtcggtttgtttggctttaatctgtaactgcttatataataattttgtctctat

SEQ ID NO: 3757 - DNA, 567 bp, Zea mays
  Clone ID: 700337862_FLI
gtcaaagttgcactaactacatggaaatggatcgaagggagaaagtacctgattttctggatgttcttgatgaacttctggccgtacttcttccactcgtacccgtcctcgggcaccaccatcagctggctgccgttgccggcctctgcctccgccgccgccgtctcctcgtcgtcgtcctcctccctcctttggtttctctcttctcctccgctcactctgcatgcatcactacagttgtggctagaaacgttagctacgcataaatcgtcgtcgtcgagaacctaacctatctgttgggtgcttaattactttataatccgcttcgtctacagtgatgcagaactagtagtatatagcagcgtaaactaggcggttcatacttagatctatttatttgctccaagcagccagggatgatatttgagacgtatacataggaaagtgagtctatatatagttcatatatagtattaggccacgcatacatatatcatgaacttgaacgacatctgtttgtggacgacaatatatatacatctccatgttgctgcatgagaatttgac

SEQ ID NO: 3758 - DNA, 745 bp, Zea mays
  Clone ID: 700337916_FLI
ctaccatgctggtttttggggtgtcatgggacgggaatgtattggcattgtccctccatttattagagaatttaattatccgatggccaaaaattgtgccggtggggatacaggtgtttttgtcaatggcagagaactgcatcaaagagatttagatttacttgtaggaagaggactaccacggacatctggcatgtcatattctattgagatgtcaggcaatgtaatcgatgaagcaactgggaaaaaactgcgcagtcttggaaaacttgctcctacgattgagaagttgaagcgtggttttggcatgcacgtccctgaagagttcagataagctggttctagtgctgaatattggctttgccaattatccactccacaaggctgaccatggggtgccaaaccaacgatttctgcgattgtgatgttaaatcctgcgattgtgataaatcgcaggtttctctgaattggactggggctctgcgagccaagataatgtggtccagtgacttaaccaccgattatagtatccctcctgctaatttcatcacttcaatggaagcgacgtttgctagtgactctagcctgccaggcagttcttaacttcactgctctgcctgtacatgttatattcctcaaatgtgtcgtctttatcagtacattgccccatcacaggcacagacatactgttagatgtatgagcaattgtcggcttgtaatttattggtagagctatgcttcccct

SEQ ID NO: 3759 - DNA, 250 bp, Zea mays
  Clone ID: 700337918_FLI
gaagaagatagtcttgtttcctagtgtagtatatttgatgagaagttagggtggcggtttcttcttgcgtggtagcccgcgtgggagatccccagtatgtggaggaaatgcggttagtactcttgacctgcgtgaggcttgaggaagttcgcgttgtgcttgtgatgcttcgtatgtatgtcaagatctctgaattctgggtgcagaatttgtatcgtcaggcatctgttttgatgctctgttctgcttc

SEQ ID NO: 3760 - DNA, 278 bp, Zea mays
  Clone ID: 700338048_FLI
ggggcgtcggtcctcgagtgtcccctttagggcaattttcaaggtccacgatgcagaaaaccttttgacaagggcaggcttcacccctccaggagttgatgttgatcattataccgttagatacaataatggtttgtagaaaaagaaagcttcagtttcttactcgtaggacactgactatttcctgtgatgcgaaagtgatgtggggttcaagcatcaagcaacaatctgtattatgggaggaaactgatccttttgtattcattttgttcaccttc

SEQ ID NO: 3761 - DNA, 256 bp, Zea mays
  Clone ID: 700338067_FLI
acataaccagcttggccatcttggctggaccacacaatccttttgagattttggtgtgcttctatggctggataagtgaaatttcggttccgtgtggagagagaacctaattgaagtgtcatgctataatatgcaggataggcctgatgaataccaggtttttctttgttttaattataaaaggggaaccgatttttcgtgccgttgtgatttgcaagaacatcgtgtttaatgttcacttccagtttcttgttcc

SEQ ID NO: 3762 - DNA, 359 bp, Zea mays
  Clone ID: 700338078_FLI
gtacgacgtgggcatgttcgaccgccgcagctgcaggctgtacctccgctcctcgccgacggcgctctgcgccgcgcccttcatcccgtccaaccccaagctggggctcaccctcgtgagggaccgcgcggccacggcgcccaggggcgcgcgcggcatcttccaccccaagactgcgctcatgtacgcgccgggcaccggcggcaagtgcccgccgtactgatgtgatggtgcgtacgtggtctggactcgggagtcggagcggcgccatgagggggtgttcactggtggtgcatgggcggcatgcatggatcgtcgtcgtgggtttggactttggtcaagaggacaatgtcagaggc

SEQ ID NO: 3763 - DNA, 416 bp, Zea mays
  Clone ID: 700338259_FLI
tggaacctctgaaagaagagcagtactatgaggttagggagcctttctccgtcatgtcacttttgaagagccccatggggttgatggttggttttatggtcttaatggtctttgtgatgcccaagatgatggagaacatagatcctgaggagatgaagcaagctcaagaacaaatgaggaacaaccccgtatcattgtctggcttgctagccagagcgcagggctagaagtagcacatgaggatgctacaagggtctagattctataatgtgtttaagggcagtactgaagtgcttgacatgccatgtcactcagagtaatttccttgggacaaggtggaaactctttcccctgtttttactgtattttaacttgcagtttttctgttatgtataaccttctgaaacctctagctg

SEQ ID NO: 3764 - DNA, 446 bp, Zea mays
  Clone ID: 700338347_FLI
ggcctaccatggtggtgacgggtgacggagaatttcctcagcaagagatcataggagtgttcaacaagaactgcatgataagctactcccagtacaggaacatcttcccgatttgggctctgggtgagtaccggtgtcgagtcttgggggctggcaagccttggcggtgaacgggaggtgtgtgtgtgtgtgtgtcatggatcagcttttgtgagtagccatgtggaagttggaataatgtagctacgttacgttcagggggttgcgttactagtggtcctagtaataatagtgatggtgatagtaatgtactcctcattattacaatctcaaagcggttcatgccattgccatgcacatctcagatccgagtcacgcacttgagagagttcaaggattgcaagtatagttgggagaatcaaatccaatcggcttattgtctgctc

SEQ ID NO: 3765 - DNA, 378 bp, Zea mays
  Clone ID: 700338423_FLI
ggatgatgaaacaaaagccctccaggtggagttgacaagtcttcttgatgctgtccaagaaacggagacaaagatgatagaaatgtcagcacttaaccatcttatgtcaacacatattctacaacaagctcaacaaatccagtatttgtatgaccaggctgttgaagctacgaataacgtggagcgtgggaacaaggagctatcccaggcgatccagcgcaacagcagcagtagaacctttctcctcctcttcttctttgttctcactttctcggttctttttcttgactggtacaacaactgagttagcatatgaagacattgtatgctgttcatgggaaatggttaaattatgaaagctggtctgtcttgaagtcc

SEQ ID NO: 3766 - DNA, 556 bp, Zea mays
  Clone ID: 700338620_FLI
ggctctcggaaacaattattattattattattggaaggtgaggtgatctccgagaagtacgttctcgagtacgggactgattgcctggagatgcgtgtcggggccatcgagcgatccggcgagcgggtgctggtcatcgacgacctggttgcgaccggagggacactctgtgctgcgatcaggcttctagaacgtgctggagccgatgtggtcgagtgcgcgtgtgtcattgggctcccgaaattcaaggatttgtacaagttgaatggaaaacctgtatacgtgctggttgagtctcgtgaataatcggagaaatgacaacttattctcaggtgtcagagtgatcagggatattggctgtttactccttgctactgcgattgaacagtggagggacgacatggacaaggacaagtatattcggtgcatcactaagtcttggtgaggggagagattgtagtgttttaggctgagtagtgaagagcctgtagttctgcacggaacatgatggttattagttgatgcaacagcgttgctgttctattattgtttgttg

SEQ ID NO: 3767 - DNA, 113 bp, Zea mays
  Clone ID: 700338635_FLI
cttgacaaatgaacgttgtatctgccgtgtttgttaagtgacagtgcatgtcaatgctggttgcattggattggtggatgataagtgagtaatgacgattactgagttagaag

SEQ ID NO: 3768 - DNA, 558 bp, Zea mays
  Clone ID: 700338726_FLI
caaacgaagctttaacttcatttatatttctcgaatcttttagagagcgagcattacatggagtacgtacataatactactgtgaaggatgtcaccatcacccataggcatgacaaggtacgaagcatgaacgaatacaaaagtaagtgatagaaccataggagacgtatgctgcatgctgacgtatcaatggtgatcaccgatgccgccgccgcccccaccgccgccaccaccaccgaacccgctgcctttgccaaacccaaagccaaatcctttgccaaacccaccgccgccgccgccaccacctccgccgccgccgccaccaagaccaccacccttgccgaatccggcacccatgccatgcccacttccaccgccaaggccatcgccgccgccaagaccaccacccttgccgaatccggcacccatgccatgtccacttccaccaccaaggcccccgccgccaccagcaccgtagccactaccgccgccaagaccaccaccgcctttgccgaatccaccacccatgtcatgcccaattccaccacctttgccatg

SEQ ID NO: 3769 - DNA, 242 bp, Zea mays
  Clone ID: 700338792_FLI
agagaagagcacctttacacagcattccagtatttcgacaaggacaacagcgggtaagttgaacgttaaaatgatacagctggtacctgaattctggacgacacatatcataacaggacacatatataattcgtttatctcacaggtacattactaaagaagagcttgagcacgccttgaaggagcaagggttgtatgacgccgataaaatcaaagacatcatctccgatgccgactttagg

SEQ ID NO: 3770 - DNA, 256 bp, Zea mays
  Clone ID: 700338918_FLI
gaagcaaggaccatgttcttaaacgtcttgtaggccgggagcccgggatggtacgcgtacgttgttaggtgatgttgttagcatgtaggcttgccatgaaacctatgagaccttgggttgtgctgtgagggtttatgtcataagaagcctactttgttagagagttgaagcacgactgttctgcagctgtgaattcttggtgttctgctgtgagatctgttaggtcgttcgaatggtcatctgaatatctgatcac

SEQ ID NO: 3771 - DNA, 268 bp, Zea mays
  Clone ID: 700339004_FLI
ggaggcgcggcggtctgccacgcggcgctcggcgcgcaggtaatcccagtcaagaacgacagtggctcctccttggtgtgaaggaaggctcccacgtgttccgtttgtcgtcgtcgtcgtgatgcaacgtttctagtagtagctatgtatgcatgtggtgaagcaagtgctcgtcggtgtgtagtgttcgctcttctgatccattgtctgtgctctgtactgtagtgatcagcgtcaaaataaagaaatgcatgtccttgtttaaaat

SEQ ID NO: 3772 - DNA, 364 bp, Zea mays
  Clone ID: 700339079_FLI
gccaaccagctcgccgaggcggacgagttcgaggacaagatgaaggagctggagagcctctgcaaccccatcatcgccaagatgtaccagggcgcgggtgaagacatgggcggcgctggcggcatggacgaggacgcccctgccggcagcggcggccctggccccaagatcgaggaggtggactaagcggtttgttgtcagtcttgagtgtgctgcagttgctggctggcccagttgctgccgagagttatcgtcagttggtgcggtgtgtccgcttaaactttatttgtggttggttggtacttttgtggtggttatttttttggacctcgtgatagtcggtcggttcaatgttatcgcggct

SEQ ID NO: 3773 - DNA, 513 bp, Zea mays
  Clone ID: 700339286_FLI
cgacgacgacgaggaggaggacgacgaggagggagaagaagggccggagggagaggaggagggcgatgaggatgatggagaggaagaagatgatgaggacggtgaaggggacgacgaagaagaaggtgatgaggaggctgaggacgaagacggcgaagctgaggatgacgagcttgacgcagacgcagaagacaaggagaacatcgaaagcaaggcaggatcttccctgccaaataagaggaaaaggaataacgaggatgatgccaatggatacaagtaaaacggtgagggaaagtagtattttcctgaacttcggaaacgttcctgtgcactgattattatttgtatgcttttcgagtcttttttttcccgcacttgtaatagactagagcatagttttttttaggcggttccacttctgaagtatcgtttggattctggaagttgtctgactctgaaaccatgagtaggatgtgtccccagcacgtatatacgctttgtttggtgtgtttt

SEQ ID NO: 3774 - DNA, 312 bp, Zea mays
  Clone ID: 700339304_FLI
tttttatatgcacatggagaggctggatctgtgcatggagaccgaacctgggtgtgctaatgttcatgtcgatcaaaagttgttgtccatctcagatctttgctatctatatattaagagaagtttgctataattatatattactatgtattatggactacattatatttatcaacatggatactgttttactatggattaatatattttaatctatgtgttgctattgaattgttggtcattgtatattgtggtgttcaggctgttgcaccagcagcacaaaggatacaaagttatttgtcacaactgacc

SEQ ID NO: 3775 - DNA, 237 bp, Zea mays
  Clone ID: 700339319_FLI
gctggagccttgctacctatcttgcttttagctcatccctgatgctaatattctgtggattgtggttgaacaatcacacttgtaagactagcttgggaatactatttttctaagagattttcatttttccaaggaaaaataaactaattttctttggaaatttcaaatgaaaatactatgagaaaatgtggttcccaaaccagcctgtaatgattaatcgatgctttttttctgaat

SEQ ID NO: 3776 - DNA, 418 bp, Zea mays
  Clone ID: 700339376_FLI
ggaaaaggaggagggcgttgttagtggaggagaagagaagccatgaggacgatcctgaacaaccaaccaccggcaccgagacgagatttctttctttctttctttcttcttcttcttcttttctttccttttcgttctgtctcctttgcgggatctgcgtgctgttttcggtcgtcgactcgatgaggagagtggtggtgatcttattagtcttttgcggattaaagaccttttttttttggcgcccgctttcgtaagaggctgaagattggtgacctgggcctgatcttgttcatgcaacttattttcccagctggttccgatgttatgatgcgcttcgatgcttgtccatgtgactcgctcatccagtgtggaccctagcctgaagtaaattgaaagaggggaaaaaatacttgtc

SEQ ID NO: 3777 - DNA, 423 bp, Zea mays
  Clone ID: 700339668_FLI
cttgacagacgcaagcttcaagaacgaggaggccacggagcaggtgggcaaggtgaagattgtggcatgtgattccaaattgctcggacaataggcctgtgtaccctcgaggtcaaggaaggaagcttttaagtgcggcgaggcggggtctgtctgcgcgtcagctgtacacgcctaggctaccgcgaggcggggtctgtctgcgtcagctgtacacgcctaggctaccgcccgaacggcatttcatttgccttcttcgtactgtatgtgtatcttcttttttccccttgtatacaatctgctgcagctataccggccaagagtatggcatggtatggcggcaggcagccgcaaacttgtttttacctacttggtgtagcgcctgtgtaacagttttcgatcgatcttgcttgttgtgttgtc

SEQ ID NO: 3778 - DNA, 582 bp, Zea mays
  Clone ID: 700339851_FLI
gctaaattagtcactaactctttgttactgaactaaggttgctgatgtgtggtcatgcggagtgatgccatacgtgatgctgacgatcaccatccctgagataagaaaccatccatggttcttgaaaaacctcctagctgaccaaatggatgacaatacgatgagtaagcagtacgaggagcctgaacaaccgatgcagagcatgaatgagttcatgcagatcctggttgaggcgaccattccagcagttggttcacgtggactcaatcagtttctgaatgatgacattgacctcgacgatgacatggaggacctagactcagatgccggtcttgacctggaaagcagtggggagatcgtgtatgctatttgacaacattgaatactttgttgtgtcgtaggttaccaagataattagagacaaggggcaggttgttgtgcttgcaagtatctgttgcagctgttgttcatgcctgatgttgatgcctcttttcatactgttgtgtttggatggtgtaccaccagtgttttacaacagtttggcccttggaattgctattgctaaaacttggttcctctgag

SEQ ID NO: 3779 - DNA, 548 bp, Zea mays
  Clone ID: 700339924_FLI
gagcaacaaaccagacttctctcagaaaggaaacagtaagaggccaaaatctggcaacgcaacttctgagaaccccctgagtgaaggtgctagtgctagcatggtgttcttgaagggctctgtcaagaggaagtccccaggtttcctttcagataaaccgagcttcaagaaacaaaaacctcacaaacccgattctggtagaccagacggcaaacgttttgttcgagatagtgatactagcgcaccgttcgtcaagaatgccggcaaacagaaacagtccattgctgagctcgcggacctggctggtaaggagaagctgactgcgtctgaagttcgcaaattgctgaagcctgaaatgtcaggcaagagctaatgagtttagggtgagcagaggcagcaattttgttggtcgtttttcctcgtatgttgcggaaagaaactgtggcacgtgatatgggtttgtttcagtagaaacgtattcgtgatacctgtcctgataccggtttctcttgctagcgaatctctttggctttgcatatgtttgtttg

SEQ ID NO: 3780 - DNA, 420 bp, Zea mays
  Clone ID: 700339971_FLI
gcgtagtgatgttggcatggaaaagggactggaatatggttgagattcagactagacgtgacctgggatgctgccacaggcgtccaatccgaaagaaccggcggcctatcctgagctcacattcagaacgatgcgacggcgatgatgggtgactccggccattcacccatcctcttgtccagctagcggaggcggccttttgtttgcattgcaacgcatggctgtgtgtgaatccagcttcctcaaaaaacctttctttgcaatgcaatgcaatgcaatcgagtggtggttgtttttctttctcttcttcttcttttttttaaaaaaagggggagagagagataaatatttgctcttgagaaagcaatgtcaatggctggtgagatgcaacgcatggaggagggtgaaaatgtttttttt

SEQ ID NO: 3781 - DNA, 241 bp, Zea mays
  Clone ID: 700340033_FLI
aacagcttcaaacatatccgataggatgagtcaagactattattggatattgtctatacttgacttgatgatggcctgtcgttttcggaaggtcagaaatcaatgacacagggtttgcttcagaaatcagatgtaatgttttttcctcatttttggttggaacatcaagggcgcttgtttgatgtaccaattattgtaaatcaagacagcaatatatataaattgatattttgtcggttgg

SEQ ID NO: 3782 - DNA, 486 bp, Zea mays
  Clone ID: 700340187_FLI
cacgagccaaaccaatttgcggtcgggctgtcagatgggtccgtcaaagtgctggagccattggagtccgaagggaaatggggagcgcccgctccggcagacaatggcatcattcccaatggcaagacgccagcttcgtcggctactagcaaccctgctgcggatcaaatccaaagatagattgtattccctaagcttttctttttctgcaaactttctaattacactgacttatttgtatgtggatgccgttaggatattatcgtcatttgttgtaaaaaggacagaataggttttatgttcaggtgtggttaactttcaggtactaccctagttatcctgttcatggaagattatgtttgcgatacggggtaatagtgtctataaagtatgtcgcctaaggttttctcaggtttagctcgatagctcaaatgatgtaagctatatatttcttcatgaatgtaaagcaatacatagtttttgctc

SEQ ID NO: 3783 - DNA, 400 bp, Zea mays
  Clone ID: 700340195_FLI
gacttgacccttggtgacaatgaggatgatgaaggggaagaagctgtggaaggcaacactcatgctggaatggtggaatgagcctcatgctggaatgattgagagctacagggagaagcatggccagaaaaagctcaatgcgttgtttggcctctagtttcagtttattctaggtttgtaagctatgtttccactgggatcgacagcaccgaattgttggtaggaaccgtgttttttgtcagttttactctattggtagccaaattttcagtttcatttttttttgtgataggcatggtgattgctttcaagtaattatatcgattcttatgtgtgttcttctaattcagtggttactctctagttgaacaaatttaagtcatgtagtaattaagctttt

SEQ ID NO: 3784 - DNA, 446 bp, Zea mays
  Clone ID: 700340259_FLI
gatcgttcaggcatttcaagtcaaatggcaaggcacatcgtcctggaccagataacatcattgactttgagcttctttctcactatgagatgatgtctttagaagagcagctcgagattgcgcagcagattggaactacccgctctcagattctttctaactttagtgacttttcactgggcactagtttcttgtaagtggtaacctgtggctaagtaacaccatgcttctgatgaaagtggtgcttgccattcattagccacgtcaagaattaggcccaattccatcaacatggtcacttccaccagttttattgtaaagatggctgctgtaatttagatattaatggtgtaactggaagttgggcgcttggcaactgattgcaaccatatttgtttcgttggactgaagtagtattggaaactgcactgaaaatgaactatctg

SEQ ID NO: 3785 - DNA, 422 bp, Zea mays
  Clone ID: 700340315_FLI
tgccgcggttccacccgatggcgcagatgtcgttcaacgacgactcgttcgtgttcgtcgggttcagcacccacatggggcaaaaccacccgcagttcctggccgggaagggctccgtgctgcaggccattgggaagaaggtgctggcgctggcgctggggcagcgggacccgaccgccgtggacaagctgctgtccgcgcagcgcgagtcgacgatactgccgtgcgtatcgtgcgctgaggagctggcggagaaggccgaggaggagaggaagcgacgggaggaggaagggggagggaaagggaaaggaccgggagaacgtgagaaggaaaaggagaggagggaacgggaggagaaggaaaaggaggaagagcgggagagggaacgggaggaaaaggagaggaaggaaagggaacgggag

SEQ ID NO: 3786 - DNA, 538 bp, Zea mays
  Clone ID: 700340355_FLI
gggtgtcgacctgcccagatgggtgcagtcagttaaccgctcggagtggggttcactagtgtttgatatggagctcatgagacatcagactggtgaggagcccatggctcagctcgtgctgcttgctatggactgcacagcacaagtcccagaagcccggccgtcaatggcgcatgttgtcatgcggatagaggagatcaagaagtcaagcgtgaccccgaacattgaacaagttgatgatcaatcttcaagggctgaatcggaggcggcgccgaccaatccgtttgctacttgatatgagttgacctgagagagagaatctgctataactctagcctgcattcaatcgattcacacattcgatgaatcctatcttcgactgagtcgactgtttttttctgtgcatcttttagcctgttggatttaacggttaacctgatcgtcactaagcagcacgggtgttcggcagtcgcaccctgtgctgcggaaggtgattggtggtgtgtttagggaccagttttaaagtgtgagattgctc

SEQ ID NO: 3787 - DNA, 247 bp, Zea mays
  Clone ID: 700340357_FLI
agattttgtgccaaatatgcgatctggttggttactccgccctgctgacgttgttttagcccaggtgtttctgctgctcattccttgcattttttatggcactgtacatacaattggacaacctaatttttggcagttcaactcatttagaagttagaagggtttgagaaacattctcccctagaaatacatggaggtgtatctgatgattgttttttttgttacaaagtttcctagtttaatttgt

SEQ ID NO: 3788 - DNA, 278 bp, Zea mays
  Clone ID: 700340421_FLI
cggtgctgctagtggtagtagggcaggacgacgtacgaataacatggtgatggcctctcttcctccactccgatgcgatgcgagtgtgcgacgcaggggaggggagaagagtttttgaaggatgtgaccagttgctgttgtagttgttgtcaagtacgtagtaatgaaacgagaattgctgcgtggcaattcaggcctgttttttctttttgcatcaaggaaaaataagtgctggtacagatgagattattttaactagaaccaagttacttgccagt

SEQ ID NO: 3789 - DNA, 127 bp, Zea mays
  Clone ID: 700340431_FLI
agcgttgtgtaaaaactgtaacccggatgctgtttcttcttcttcttcttggttccttcttttttctgagtcgtcctttgtggattcaaataataaataaagtcttgtatactgctgtttgttgatc

SEQ ID NO: 3790 - DNA, 583 bp, Zea mays
  Clone ID: 700340634_FLI
ccaaagcctccgacccccttcctctctccctccgccgccgctgcgcacgcagggaacaagcgacatgggcgtctacacctttgtgtgccgcaacaacggcggcgagtggaccgccaagcagcactccggcgagatcgaggcttccgccgctaccccatacgagctgcagcgccgcctcgtcgctgccgcctccgcggccgactctgcctacggcgtccagtcgtccttctccatggtcacccccagctccgccgtgttccaggtgatcgtcggtgctgtcggtggtggtgcaatgatggtgagcggaggtggcggcggcggtgctgctgcatctggtggtgctgctgccgaggctcccaaggaggagaagaaggaagaggagaaggaagagagcgacgacgacatgggattctccctgttcgactagagttgtgtgtgtcatctggatctcagaagtggtggtttggtcctgttgccgtagttaattttgctgtcctgtctgtgaacctgaagaactcttggtaattgttacaagcgacctgttccagtttatgtgagaatttgatatgttgtttggaatcat

SEQ ID NO: 3791 - DNA, 439 bp, Zea mays
  Clone ID: 700340726_FLI
ggatgacacagtgatggaggaaccagatgacattgatgaagagaatggtcggaaaaagaagaaaaaaaagaagaagaagagaaagagggaagcagagggtaagcggaagcccaggtccaacttccaggaatatcttgagatggagatgggtggacctgtgagcatggaggaggatctagagatggagaggaagcttgcaaaaaagctcaagttgaagaaaggaaagttgggaggtcctgatgatggtatggatgacctttttgcggaccttgggtttggtggtgactttggttcagatgatggtgaaacaaaagcatatgattggaatgtggtggaggacactaatttagacaagagaaaaggtaaaaagaaaaataaggagaaaaaggatgacacagtgatggaggaaccagatgacattgatgaagagaatggtcgg

SEQ ID NO: 3792 - DNA, 364 bp, Zea mays
  Clone ID: 700340742_FLI
ggcgatggcgggtgaggtgattcgcaaggtagaactgggatatacgcaacttcgctgtagtaacttattaggagagcaagttgttgtttttttgtttctgttgctagatgccctatttgcaattttgtttgctagtagtcacaatcggtacaaaagcaaaaaaggaagaacaaaatcgagtacacgagctacagtttcactagtgatacactgaaggtttgacagaagtcaagccactagctaacattatcaataactagtgttgcctcggacctggggaagagtgcgaattccacggagctcagttagcgtgcgttggacaagatagatgtaaagttttcgcgataatatcgttctctcttac

SEQ ID NO: 3793 - DNA, 193 bp, Zea mays
  Clone ID: 700340971_FLI
tgcaagccttggtgtcttttgttggctctaagaaatcgtgatgttcaccatcactatcctgctatcgataattagtattgagattagtacgtaggttgcgtagttagctcgatgcacgtactattgtcgagaactcgctattctgtgatgttgaaaatgtctaatgatcctgcagtactgtcgcattagaccc

SEQ ID NO: 3794 - DNA, 390 bp, Zea mays
  Clone ID: 700341194_FLI
gttgtacccgttcaatggcgagctggtggcagcgatgtaggagatgatccatgccgaggtgcacaagtacatgttagtggacggcacctgccaaagatacaccgtttctactggtgcgagctgcaatcaaagttaaggcattagtcatcatttgcttcacctcttctggacaggctgcaagggtgttctggacaaagaaagcttgtaccttaaaacaagaggatacaagaagctggagtggttgtctaaaggcttttgaactgcttgaagcattagtgtagctttggtgattttgtgactgatcagctctggagcagctagagtgatgtagttgtgggcttttgaacaatagctggagtgatatgaaacattagtgatgtggttgtgggc

SEQ ID NO: 3795 - DNA, 689 bp, Zea mays
  Clone ID: 700341257_FLI
agccatctcacttatgagaagtggacagaggtggctactaaccaacatcaagaattaattattaaatcattgttggctgcaagggatgcttgccttgagataaggcttcacatgcgagagatgggcatagcagccggtgttccgattgagccagattcacaaacacggctacttgacgccactatgaatatggagggtgttttacttgctggagttccgggagctggtggcttcgatgcagtattctcagtgactttgggggatgcaagtaatgctgtagcaaatgcttggagctctgctggcgttctgccacttctcgttcgagaagactgccgtggtgtctcattggaagatgctgacccaagaacaagggaggtatcggcagctgtatcgtccattcagattaattgattctactgttaatattctatttatgtattgtgccgaatgctaggaggtacgtggttaaaataagtgctgcacttgcagcaagttagcacgttgtttacaatgactgttcatgagtgtagaaaataaggaattcaatggatttccatggaattagtgcttgtagttatagctatggaatgtacgtgagaaaatgtcaaggtatccaacaaactcatactgtaaaccttgtatttgtaacttttgcggtttgtatgataattcggcatgtgttaatgttt

SEQ ID NO: 3796 - DNA, 270 bp, Zea mays
  Clone ID: 700341263_FLI
gctggtggtcgtcacggggcctcgtctccggttgctgaagccgaggccgagcacatcagcacgcgccggtttgtgtggtggaaatggaaagcctcgttgctctggtaggagctctgaagatcgctgtcgtctgcttgtagtctgtaaatagcttctccgtcggcgagaagcccagggtccacggccattgtagaaccgaacctgtatgataaaactagaccgtgttggcgccccaccagcgtttagtagtttccgttgccctttgaactc

SEQ ID NO: 3797 - DNA, 205 bp, Zea mays
  Clone ID: 700341281_FLI
attgtgcatgtctagtgcgatgttcagttcacaggagggtgaatcgtggcgcgtgcgtatgtgtttgttgctgtagtgtgtatgttgtccaattgcattcgagattgatcatttgcttgtcaactggtcattcactcgttgtccctgttatctattatcaacaattcttcagcatttttaagataatggaaaaagttgacttcat

SEQ ID NO: 3798 - DNA, 192 bp, Zea mays
  Clone ID: 700341421_FLI
agatgcacacaccatattgcattgcagttgcagcgaacatctcaaaaccacctgacgatacacgagtttggtcaccgagacactcgaatcgccgccaataaacaaatcacctccccctctcctcaccttcagagtctctacacggctgctgctgctgccttcctgtccctgtacataggtcatagcatagca

SEQ ID NO: 3799 - DNA, 272 bp, Zea mays
  Clone ID: 700341469_FLI
cccgagtgcagaagtccacttcgtgcagaactgtctcagtgatgtttgtatttctcacggaatagctctatttatctcaagattgagcaagctcgcagcttactcggtgtaccggcgttgtatccttggggcatccaggatcttgtacgatttgaaacagtctgaaccaatgatgtaacccaagatagtacaaaaagaaagtttctttctttttagcagtacttgtacaaaaagttactaccctctccgtctcaaaatatagcttttctagt

SEQ ID NO: 3800 - DNA, 447 bp, Zea mays
  Clone ID: 700341516_FLI
tgaggttacacaaatggctaaaggaaaagaatctgctcaaggtaatgacttctccatcatgagatgcatttatgttcttagatccatgaacgtgacagaagatgagaagataaaagcagctgaggtgttcgacataccaaacaacagagagactgttattagttttagtattgatgagccaaaaactgccctcctatggttaagacggaagatagataagctctaagtttggacttctgtagcaccgttggtctgaatctgaaaatctacatcgtgctagttgctagttgacgcattgaactatgttgatttgtgctccaggatcaatggtgttctacgatctaaggataaagaaactatgttgatttgtgctctaggatcattggatgttatgttgacttatgtttttttatttaatctggattaaaaatgtgttcaatctgaatg

SEQ ID NO: 3801 - DNA, 538 bp, Zea mays
  Clone ID: 700341642_FLI
aaaggagccgcgtgccaaaccacaaggaggtttcgacaccaggcagcaaatctaatgaaggcagtgacaaagccaaacgtaaagcatcagtgctgtcgtatcaaggcctgaggtcgagcaaatctggtgttgtgaagaaggtgaaagtgacccagcaacccagcaaccaagggaagcagaggaaaactgatgaaactggagcaactgctggcaaagctaagcgacccgctgtggctgcaagaaaagcaaagcagctggccaagaaacgcaaggtggatgcatcaacccctgagaatacacacaggagcaagaaaccaaggaagtaagttgtccattgcgctggtcatttgcccttgcttcgcattgtaacaggagtttcactaaatcaaattctggacgatcttgtcagatgattgtgttactaggtagaggcaatgtgcgacctcaagtcaggttagggcaaatacaagagcgctctcgctactgtaaaccttgtaaccttatctggcacttgttttgttttactatttccctccac

SEQ ID NO: 3802 - DNA, 137 bp, Zea mays
  Clone ID: 700341644_FLI
cacgtacggatgtagctgttgggccctttcgcgtgtaccgtcgtgtgcaccggatcgtgtttgatccttcctcgcttgataacgtcggacccaaagtaattatcttcgtaataaaaactcaaaaagtatcgttatct

SEQ ID NO: 3803 - DNA, 193 bp, Zea mays
  Clone ID: 700341710_FLI
atgacacatgtgaggagccaaaatatcactagtgtcttctagaatatcgacgtcaacattactctggtcttcaacaaaaccaacatttagttcgagcttgttacactttgttgtataattaacaagtctatttcacattccttgtaatctgtacaactcaagagtcagtatctagctatcaagttattgtgtc

SEQ ID NO: 3804 - DNA, 399 bp, Zea mays
  Clone ID: 700341749_FLI
attcactgtcctcgtcggcgctggggagctcctgaaggaagagctcatggacaggactgtgttgcagctccacaaggcctcggtcagtgatctcctgatcccctccaggcctccggcgcagaccgtctatgatgtccagctggttcagacactcatcggcaggtacatgagccatgccggggtatctcaaggtgggatttttctcaacgaccttgaccaggagatgtttgagacgaacgtggacggtgaatctttgctagcgttgtgcaagctggtcgataggtacttggctgaagttgcctctgatccaaatctctctgtttcgagctttgtggatttggcgacttccatgcctgaaacagccagtaatagtaatctgcaactgtgcgttaaatggtc

SEQ ID NO: 3805 - DNA, 433 bp, Zea mays
  Clone ID: 700341757_FLI
agcgaagaggctaaggatggatgttggcacgttcgatatcaagtatctcgatgatgaccatgagtgggtaaagttggcgtgcaatgcagacttggaagaatgcatggagatctcgcggctttctggcagccatgtcattaggctactggttagcgatattgcagcacactttggcagttcttgtggaagctctggttgatatgcgtgtcagccttttgctttgatcaatgtagactcgaaagttcagttccacttggtagttttgttgctagttagctttagctgtttcattgtgtttgataaatgtatcattgtattttacccccaaaaaaatacatgtaattgtgcagaacgcacttgtagtcaactttgtatatatcatgtgctggaaattctatttcaagttataaaaactgaatttgttattgtctag

SEQ ID NO: 3806 - DNA, 383 bp, Zea mays
  Clone ID: 700341881_FLI
cttcggggctgagaaagggccttccacacttgaggccgtcagacctcccggccagccactcgtcgatgattgggactgcttgaagcaaatggtacggatcttcgaatcccattgcggatcgctcactcagtacggtatgaggcatatgagggcgttcgcaaatatatgcaacagtggcacgcctggcgcttcgatgaagcgagcgagcatgggtgcttgtggcggctacaactcggcgagatggagcccgttggctcagggctacagcgcttgatcttctgaaaggttccggggatatggatgtgtatagtcttatctgtgaagtactgtatactgtaaaagttggcctttgtgcctctgtaatgtacgtagcagttgtcttg

SEQ ID NO: 3807 - DNA, 500 bp, Zea mays
  Clone ID: 700341886_FLI
gtaaacggcgacgaagacaatcctctaccaagaagaagactggtcgagtgagagagatggacggcggcaaaggcagcgggattggtggcaatgtcgtaggaggaggcggtgatggcaagagcggcggtggcgctgtcaagggaggaggctccaactccgtgggaggcgcaggctctggcaactcaggtggcggcgttgcggggcatggtgatggtgcagggaagtcgggctccggcgccgacggcatgatgaaggctcccggcggcggcggctacatcccccgctccgacttcgaagccaacccgaaggaattcttccagggcctccaccagcagggaggaggaggcaaaaagtagatccatcgagctagatgttagctagctagctgcttgttgcatggcaagctagcgtgggatttgtgatcctgaatgaatgtatggaccgtagtcagtctccgtagcctttaaataaaatgttaagctgctcgatcgtttctgggt

SEQ ID NO: 3808 - DNA, 755 bp, Zea mays
  Clone ID: 700341893_FLI
caaagttcctctagtgattcagtctgtcttcattcgatttcgttgaccgtgctttgagtgtccaatgttcagagaaaaagacgccgagacacgggagttcttggaagctgccaaggcctgtgtggaaatctgcaagtccagtggagtgccgctactgatcaatgaccgcgtagatgttgctctggcatgcgacgcagatggcgtccacgttggccaatcagacatgccagcatgggaagtacgacggctcctaggacctggaaaaatcatcggcgtctcatgtaaaaccccggcccaggccgagcaggcatggaaggatggcgcagactacatcggctgtggcggtgtcttcccgaccacgacgaaggcaaacaaccctaccttagggttcgagggcttgaggactgtgtgcttagcttcgaagctacctgtggtggccatcggcggcatcaatgctggaaatgcaggctcggtgatggagcttgggctcccaaatctgaaaggtgtggctgtggtctctgctctgtttgaccgggaacgtgtcgcggctgagacaagaaacctcagatccatcctgatgaagaatgcttactcaaggtcttagagcaagttgggatatgccgcctgttcatttactttctttgtttaggcccgaaataagtttgtaatcaatcactttgtcataaggagaaaccaaacaggcgctgcaatcttcaataaaccggagtcattatttctctggaaaagaacaattc

SEQ ID NO: 3809 - DNA, 186 bp, Zea mays
  Clone ID: 700341920_FLI
tttgggcacacttgtggactgattcagatcgcgggcaagcgggtggtgagatgcgtaggatttgaagctgggaacaaactccagaaagaactgtgccctgtcgtgatgtcataaatttgtggtgaaacatcatatcatgaggataaaacttgttgcttttttgtgatgcaattgagaaaactttcg

SEQ ID NO: 3810 - DNA, 721 bp, Zea mays
  Clone ID: 700341946_FLI
ggcaagcaggggcaggtggcggcgggggcgcagcctccggcgggcgggaagaagcgcgggcgcacggcgggggacaaggagcagaaccggctgaagcggctgctgcggaaccgcgtgtccgcgcagcaggcgcgggagcggaagaaggcgtacctgacggagctggaggcgaaggccaagggcctggagctccgcaatgcggagctggagcagcgggtgtccacgctccagaacgagaacaacacgctccgccagattctgaagaacacgacggcgcacgcgagcaagaggtccggcggcggcggcggcggtggcggcaagggcggagacggcggcaagaagcaccacctcgccaagagctagtgagaaacgagagagggagctggttcgtgccctgctcgcgctcgcctgatctgaccattgctggcgtgttgctgttcctgacgacgccttctctttttcttcttttctcctactgttacccgtgggtttcgtctcttgcctcgctgatgcactgttttaactgttagccatcccgtctactcaccagtgaacactgctgctagttaatttctcggtggtttagggtgccgtgccagaacgccgtgtaacttcgttcttgtactgtcttgtagttcagccttgcggtttggcaattcgattcaagattactgtacgctgccagctcttggagagaaaaaaagaagttttcggtgcatgt

SEQ ID NO: 3811 - DNA, 482 bp, Zea mays
  Clone ID: 700341991_FLI
cggttgctcgaaggttgcaagggatcacaaagtcgatatcaaggtaccccacatccaagcgtcgcttcgacgcccttgtgaaggctctttcagaagagcttgcaaggacaatgggtggtaatcaatctgccaatgggtctcaggtccggaagataagaagtggtatcgtccgaatgcttagtcagagatcactagggaaaacaacaggcatcccgggcgatgatcatgaggctcagctaacaagcgatggtttcacttcatgatgttctggaggtgttcaactgtaacctcagtttgaaaaggagatactacttttctgtgttattttgctaactggatacaaagaactgacacttctgtatgaagagtttaacctcaaccatctcgaggatgagttgtttgttttcaggactgtatctggacaacactgtagtaatacttcgtaacagaaagcaaaagatatgattcgccctagtgccacc

SEQ ID NO: 3812 - DNA, 527 bp, Zea mays
  Clone ID: 700341996_FLI
cggagctggtcttcaggggtagcttgaactggcgaccggattggtttggagaccggtttgtccctgatttggtgccccaagtgcaagatggcccgagtgattgaactgagggtgaagagggagaatgagaacctaggccaagtgtttatcaagtgccctaggagtgttgacgctttgattgccattactttgtgtttttcgaaatctgattttggattatttgatttgcttttgtatgtgtagatgccaggaaggtgcccatactacagatggcagagggagtattttgagaaattggtgaaggagaggttgattgccttgttattcgatgattgggaggaagatgatggagaggtggattccaagaaggtttctgaagtaggaactagtgaagacattgcaacttctgtttgtaatggttgtagtacctgtggtagtagtggtgatgtacatgttttaatgatctgtctgtaatgatgtatatgaacaattgaagaagttggaagggaatgttgaactttgtcaat

SEQ ID NO: 3813 - DNA, 333 bp, Zea mays
  Clone ID: 700342151_FLI
caagtttcatgattttctgacttttgtttgtgttttatacaatttttaaacatgtggatggcaagttcacggccatgtttagtgagcatgttgctcgaagtttttggtccgctcctggaatcggtcgtaacttatgctaagtaacatgaatatcattttttcatgcacggttttccaagtttcaagtgacctgcagttcaaatctaaattttccgaagaaattcaaataaacgaactaaatctactaacgattgaaactctgttaaaattgtccacaaatgatacatgtaggtctacatagtgtaggaacataccacaaaaagtttgggagac

SEQ ID NO: 3814 - DNA, 217 bp, Zea mays
  Clone ID: 700342185_FLI
ccctcccccctcggttcgcgagggcacctagggtttactgcaacagttgctgctacttggccgtttccaattagctgcaaccctgcatgggcgtgtgtttgctttgttttaacttgtttctcaattgtgtggtgttagatatgtactgtcgaactgctgtagttcaactttgacccatgcaatatccttttggatggaagtgaaatatgtttcttcc

SEQ ID NO: 3815 - DNA, 817 bp, Zea mays
  Clone ID: 700342196_FLI
gcgccgggtgctgcgctgggacggcctcggcggaggctgcctctcgggcgccggcgcatgcggcgccagcgagttccgccgcctgcgccgctcactgggggacagcggcgagtgtgaccctcgcgccatggtgtttcccggcgatggtggggacgaggagcgggtggggtggaaggccgacatggacgtcgactcgtcgcggcagctcagcccggtctccgtcctggacctgcactccgacgatgacgacgacgagtcgctggcgcattcttactggggcgacgagaagccgtccacctccgggagctcacctccgtccgagcctttcctcgggccgacctctccgtgcttcagctactacagccacagccacatcctgcacgacaagttccgcgagatggaggtggacgagggcgaggaggagacggcccggaccggcaggtccgtcgaggagcagatctcgtcgtgggagaagatcgcgggtgacatctccaggatccccgcgatggtggagctggacctggcgcggtccgcgcggcagtggcgggagccgaggctggaggccagggaggtcggcgccaggatagagaccctcatcttcgatgacatcaggagggagaccgtgtgcgacatgctcgcctcgcattgtagatcggcggcggcggcggcggcagcagcaacgtcttgttgatcgaggtagtaggaggaggaggggttgttgtgttggtcagaagctatgcagcggatacgggtacatttatcgacagttttcaaaaataaaatggagaataaatagcgtatatatgttgaaaaggtt

SEQ ID NO: 3816 - DNA, 2150 bp, Zea mays
  Clone ID: 700342210_FLI
ggctaaatctatacatctgaagcttcagcgcgttgttgaagcagactttccaggacgaaaacgaaggggcctcctccggaaagataaaagcatttctttgtttccagatttcccaagctgctatttgcacaacaagtttagtaatgtatgtatcttgtactatgcaactaggattatcgtgcttcagttgtattattattttaccttgttacctcttatttataaagttaaatgttcttatccctgaacttctctgccactgcagatgataggaggcaaataagttttgtctggaataaagctcctgttagccatcctttcacttctccatgggacagctcatctgagctccctcatgcaaaggaaataagagaggtgtcaacgaaagttgggacaattactggacaagttcatttggataaatcttacgtgtccaatgctgttccatcacttacccatggcaaagatgagccttggccaatgaaaggtttgatttcccaaacattattcttgcctgctgcagaaatgtgttcatcaaggaagtagctgttatttgctttgttaaggggttcaccgtatttgttgacaaagggttgcaaagaatctctggtgtagttgaaacttacctaaaacatcttggacagttgacacaaaaggaacctttaagccgttccctcatatctacaaagttttgcagacatggggaagctgattattattaaacgggtactttgaattttttgcagaagcttgtgaacttacaagtcaaaatatttttgtagttcatatgatttagcctacatagaatgtatggtggaacaaagaatgccgaactccttgccataactacattcatactgggcagctgtatgttttgttgtaggtggcatgattctttagtcagtaaatttactcccagaaaaagaagaatactacaagaattggaccatcggttgtattcacgtattagtctaggatccaaacacttgattatgttagatttaagggaaataaaatgctgcagggactgataccattttctccaaaatggtattcggacttggttattagcgatgatgaattttgagtgccaggaaaaacgtttttctatcaatgtcagatttagtagcttttgtttgtttgtttagtttcacctattctaggtttctgaagttctagaccactgttgagatagttactccatgacccgcttatggatgacatataaacttcatttttcttgctagaaattactaataaactgcaggtccatttgacactcatgcacacctacatttttctattctagtgaccaatgtaataattctgagcatcagagttagaaattgtaattgactgttgtacagtcctgcttgtttttcatgctagttcgttgaaccatgtgatttcgtttgccatgttgtgcctgcaacttctgcatattgatgttatttgttgtcccgacgggtgtataacatagtctgaacgattggttgtgcaggtccggacatgtctatagctgcttcaaaattcgatggagcaccggatcttcagcgtgctctctctcttctgtcagttggcgcctgcggattgcccgatcctgtacaccaaacatcttgcgtcatccaattcactagtgccagcgagaacagtggcgaccttcatctatcacatggagcgaactctggtctagcgtcatgcggtgatggacagcatatagcttctcagcctcaggctcagctggttcggtttaccatggataccagcaacagtgtctatgagcccagtttcttcagtgtaaaccagataaattaagcgttgaagacacacgccacttggtcatttggataaatagccctgaagatggcctgagcttgtgcaagaagttcttcaaccaaccaccggacataaggatctatctgttaatgttatctgtgtatttattagccatacctgaattaagttgaacccaatctaggccagcttatgtgcaatatgcagttccaacctgtgattgacccattttttctgttgtttctttgcccgtgatgtgactgctctggaacttaagtgtgatactgttgtagttacactttactgccctgacaatcatgtcaaacggctggatatctttgaaactgtccttgatg

SEQ ID NO: 3817 - DNA, 1474 bp, Zea mays
  Clone ID: 700342215_FLI
cgagtacaaattctttgtggacggggaatggcggcatgatgagcgtcaacctaccatatctggggagtttggcatagttaacacactttacttgacaagggaatataaccaaataaacaccttatcaagtccaagcacacctggaagcaggatgaacatggatgtggataatgaaaattttcaacgtacggttacgttgtcagatggtaccgtttcagaaggtactctgagagtttcagaggctgcaatacaaatatctaggtgtcgtgtttctgaatatctgagtttgcatacatgctatgatttactcccagattctggcaaggttattgccctagacattaatttacctgtgaagcaatcattccatattctccatgaacaggggattcctgtagctcctctctgggactcattcagaggtcaatttgttggtctccttagcccattggatttcatactcatattgcgggagctagaaactcatggctcgaacttgacagaagagcagcttgaaacacacactatatctgcatggaaagaggctaagcggcaaactaatggaagaaatgatggtcagtggcgaccgcaacagcatctagtgcatgccaccccttatgagtccttgagggacattgcagtaaagcttttgcaaaatggcatttctacagtgccagttatttattcatcatcatcagatggatcattcccgcagttattgcatcttgcatcactttctggaattttgaaatgtatttgtagatacttcaaaaactcaactggtaatttgcctattctgaaccaaccagtgtgctccattccgctgggttcctgggttccgaaaattggtgatctgaacagtcgtccattggctatgttgcgacctaatgcatcacttagctctgcccttaacatgttggttcaagctggagtaagctcaataccaattgtggatgacaacgactccctgcttgacacttactctagaagtgacatcacagccctagcaaaagacaaggtctacacacatgttcggctggatgagatgaccattcaccaggctttgcagcttggacaagatgccaatacaccttttggattctttaacggccagagatgccagatgtgcctccggtctgatcctttgctgaaggtgatggagcgactggctaatcctggggtgcggcgggtgttcattgtggaagctgggagcaaacgtgtggagggcatcatatcactaagtgacattttcaagttcttgctgagcttgtgaggagagaggggcatggcggagttttttttaacagtagcaaccctctgggcctttgggtccttgcggataattggctatcgtcagggttcatggtctgtaaagttcctttttttgtttcgttttttaccatttggccctcccgttgttaacaaaacatacatcaggtgatttttatttattggattgtttccttgcttggcc

SEQ ID NO: 3818 - DNA, 925 bp, Zea mays
  Clone ID: 700342238_FLI
cttcaaagcaacacttgagctgcttgttgcttacaaggaccaagttgcagaagctaagaagcaaaatgaagaggctgctgatgatatggatggttttgatgctgatgaagaagatgatgacgaagttgactctgataaggagatgggtcttgatgatgaagacggggatgaagtaagcagtcttcagctgcagaaattagccgcagaggctagaggcttccaaccagccgatgacgatgactcagatgatgatttcagcgacgatgagctacactcaccaatagacgaggtggatcctttcattttctttgtagaaactgtccaaggtttgcaggcatctgatcctgccaggttccagaaccttatgcatacattggatttttcttatcaagcgcttgctagtggcattgcacaacatgccgagcaaagaaaaaatgaaattgagaaggagaaatctgagaaggcaaatgcacagtgacgtcataaagcatttctggttcccttcgattgttttgccattttgccggtatagcattggtggacggttaatttcctgcgatttgcaggccgcaggtaagagtttttgcagccttagccaaagtgtaggacaaattcaatcttgtgagatagcatcttggataacctgtcacctcgaccatgttcgtcgtggccagttgtagacgtcttggttgtgcaagaaagtttctctcgaggacagttgctcgttttgttagggccatcaatttttttgggcggcttgtaagttatttgagaatcccacctcaggttgaggggttgtattctcgagtcgtcaaagtttagtaccggtgcggtgtagattgtatatggtttcagttgtctagaacgttgtggcttcatggacgggctgtggtataagtttttattattttttaatttttttgtc

SEQ ID NO: 3819 - DNA, 1244 bp, Zea mays
  Clone ID: 700342248_FLI
gggactgtgatgaaatatcgcgatgaagcaggggtgtagccacgattccttccgttccatctccaccggctaaactgccctcgcctccgatcgaacagacgttcctcctccgtcgccgccgcggccgtttgatcctccttgcgagtccgaacctccccacgacggcacgcggccggatccagatcgggagtactccccactccccgcgcttctccttcgcatcacaagcggccccggccccagacccctagccggatcggatctcgcgcggcgccgtgccggagatgatgtcgtcgtcgtcggacgcggcagcggcgctggagctgcaggagtccgggtgggaggagctgcggcgggaggcgcgcaagctggagggcgacctcgacgtgaagctctcctcctacgcgcgcctcgccgcgcgctcctcctcctccgcctcgggcgccgcctcccccaccgccgaccgctcctcctggaagtccatggagttcgagatccagtcgctgctcggcaagctgcaggacgtcaacgacgccatgagccgctgcgccgcctccagcgccaccaccacctccgtctcccagaagctcgcgcgccaccgcgacatcctccacgagttcacgcaggagttcaggcggacgagggggaacctgagctccatgagggagcacgccgatctactcaactccgtccgagacgacatcaccgagtccagggcctccggtggcatgtcgccaagagtgcatttgctcagggaacgagcttccattcatggcagcatcaaccagattgatgaggtaattggccaagctcaaagcacaagagtagctcttaacaatcagagggccatgtttggagacattcaagggaaagtgaagcagctgggtgaaaagttcccggtaatcagaggtcttcttggtgccatcaagcggaagaaatcaaaggacaccataatcctctcggcagtgatcgcggcctgcaccatcttcctgatcatttactggctttcgaaatgatgggtcgcacctgagagaagctcccgatctcccttggcccggattagctggttgatatcagatagctgtatcgtctgcctcaccgagaaagatggaacgaacgagagatcagtttcttcagcttttcattgattttgttcgacaactgttgtgccctgtatctgagattccacatgtagagaatttttgctggttcagtaaatacacatatacatgcatggtaacatc

SEQ ID NO: 3820 - DNA, 1896 bp, Zea mays
  Clone ID: 700342274_FLI
gtgctctgcttcgagtgaggcctggttcagattttacgggggttcggttcgatctggtgtccgacggaggcggcggctcctctgcagttcgattgggagaggggccatggaaaacccggcgccgccgaccaacccggcctccgccacgccgtcgccgtcgcggcagctgccggacttccagcagtcggttcgtctcaagtacgtgaagctggggtaccattacctcatcacccacggcatgtacctgctgctcaccccgctgatggtgctcgtggccgtgtacctctccacgctctccccgcgcgacgtcgccgacctgtgggcccacctccgcctcaacctcatctccgtgctggcctgctccacgctcctcgtcttcctcggcacggcctacttcctcacccgcccgcggcccgtgtacctggtcgacttcgcctgctacaagcccgggccggagcgtcggtgcacgcgcgacaccttcatgcgctgctccaggctcaccggctgcttcactgacgccagcctcgagttccagcgcaagatcctggagcgctcggggctgggcgaggacacgtaccttccccccgccgtcacgcgggtgccgcccaacccgtccatggacgaggcgcgcgcggaggcgcgggaggtcatgttcggcgccgtcgacgagctgctcgccaagacgggggtcaagcccaaggacatcgggatcctcgtggtgaactgcagcctgttcaacccgacgccgtcgctgtcggccatggtggtcaaccactacaagctgcgcgggaacgtggtgagctacaacctcggcgggatggggtgcagcgccgggctgctgtccgtggacctcgccaaggacctgctgcagacgcacccggggtcgtacgcgctggtcatcagcacggagaacatcacgctcaactggtactcggggaacgaccgctccaagctggtgtccaactgcctgttccggatgggcggcgccgcggtgctgctctcgaatcggcggtccgaccggcggcgggccaagtacgagctggtgcacacggtgcgcacgcacaagggcgcggacgaccggtgcttcggctgcgtgacgcaggaggaggacggcgagggcgtcgtgggcgtgtcgctgtcgagggacctgatggcggtggcgggcgacgcgctcaagacgaacataacaacgctgggcccgctggtgctgccgctgtcggagcagctgctgttcatggcgacgctggtcgccaagaagctgctcaagatgaagaaggtgaagccgtacatcccggatttcaaactggcgttcgagcacttctgcatccacgccggcggccgtgccgtgctggacgagctggagagcaacctggcgctcacggattggcacatggagccgtcgcggatgacgctgcaccggttcgggaacacgtccagcagctcgctctggtacgagctggcctacagcgaggccaaggggaggatccggcgccgccaccgggtgtggcagatcgcgttcgggtcagggttcaagtgcaacagcgccgtgtggagggcgctccggtcggtgaacccggcggaggagacgaacccgtggatggacgagatcgacaggtttcccgtggatgttcccaaggtctctaaggtttcaagcgactgaaatgcattgctagttgcgtgaatgatggagcttgcaattgtttggatagaagatctggttggaatttttcatagttcattactatatagttgtaggagataggaaaggcgatcgacttctctaatcttgaattatacatctgttaatgttgtttctgtatggcactcggtccctggcctatctatatagttgactgctcggtgttctgacagttctactatatctgttcattctcc

SEQ ID NO: 3821 - DNA, 2537 bp, Zea mays
  Clone ID: 700342321_FLI
gcctgccaagcaggcccggcgtccaactctggtggcaactgccagggcagcccggcattgctggttgtcttgaagaagaagatgatggtgggctcttcccgccaccagctgctgcagaggaaggggaagtccgtggctgacaagggcgccgccgccgccaccactgtggcggcagagaaggtggtggtcgcggtgagggcagccacgagggagatctccaagacggccatcatctgggcgctcacgcatgtggtgcagccaggcggaagcatcatacttcttgtcgtcatcccggcacacagctctggcagaaagttctggggctttccgctgttcgctggagactgtgcaagtggccataagtctatgttggatcagaaatgtgatttatcagagttgtgttctcaaatgttgaagaaaattgatgtgtatgacatagacaagataaatgtgaggtataagcttgtttccggctctccttctggtgttgtagctgctgagtgcaagcaagcacaggcaagctgggttgtgctagacaaggatttgaagcatgaggagaagcgttgtgtggaggagcttcagtgcaacattgttgttatgaagcgatctcagcctaaagtccttcgacttaatcttgtgggatctcctgataaagagtctaaagcaacatgtgtagttccacctgtgctagatggttctaccagtaaaattgcaactgatgttaaggaggcacggagttcaattcgaggacctgttgtaaccccaaatagcagcccagacctggagacacctttcggaagtactgaagcgggaacttcctctgtctcgagttcagaccctgggacatctccgttttctgcttctgaaacaaatggttctctgaagaaagaggtgcaacaaacaaaggataaaattcagcattcagatgctaatatttctgattcagacagtgaaacattgagccctccagcaaatttctcacttcagccatggatgtctgatattctacagggatcagcatcgtcaagatcacttggaaaagttccacgaaaaactcgcactgcagatgttttgttggaaaagttttccaagctggatctcctgaatgaaattaatgctatgagaagcaggtcagacttaaacttccgaggagatgtcagggatgttgttttgttggcaaggaatgcacctcctggaccacctccgctttgttcaatatgtcagcacaaggcacctgtttttggaaagcctcctcgctggtttagttatgctgaactggaacttgcaactggtggtttctcacaagcaaacttcttagctgaaggtggatttgggtctgttcatcgaggtgtccttcctgatggccaggctattgctgttaagcaacacaagcttgctagttcccagggtgatgttgagttctgctcagaggtggaagttcttagttgtgcacaacatcgaaatgttgtaatgctgataggtttttgcgttgaggacagaaggcgtttattggtttacgagtacatctgcaatagatctttggattcacatctctatggtcataatcgagaaacattggagtggactgcacgacaaaagattgcagttggtgctgctcgtgggctgcggtaccttcacgaggaatgtagggttggctgcataatccatcgtgacatgagaccaaacaacatccttgtcacacatgatttcgaaccactggttggagatttcggcctggcgcgatggcaacctgatggagacatgggcgttgaaacaagagttatcggcacattcggctatctggctcctgaatatgcacagagtgggcaaataacagagaaggctgatgtatactctttcggggttgtgttagtggaacttgtcactgggcggaaggctgttgacattaaccgaccaaagggtcagcagttactaactgaatgggcacgcccattcttggaggagtatgcaattgacgagctcatagacccacgactcggagagcgctactctgaaaatgaggtgtactgcatgctgcacgcggcaaacttgtgcataagacgcgacccacattcaaggcctcgcatgtcccatgttcttcgcattcttgagggtgacatggtcgtggaatctggtggttctgttactggcagtagtgattctgggagcagaagctggaggatgctgaacgaacagcaacattgccaggagtacagtagcccggctcaacaagagtcgcaaagggcaggcgaggggaaacgctcctacagtgccttgagggcctcttgggaccgagacaagcagagtatctccaacagatattagtgccgtctcataatgcagtgcagctgagattgtttagtcctgtattattccttcgccctacctcccggtctcaattttttttggcttgctcttttgtcttcacttcgtagcaatttgtaggccgaaagcttttgctgatacattgccctggtgtatagtagaaatgggtaataggtttacaagtatattgagctgcaagttagaccctctcc

SEQ ID NO: 3822 - DNA, 920 bp, Zea mays
  Clone ID: 700342352_FLI
caccaccaccggcccgtgccccagccacaacaaggcgaaatcaggggtggtcacgccgagcgactacgcgaagacgcagtcggcgggggcgaagatctcccaacccacattgcgcgcgcgtctacgcccgaggatcgatggttggcggcggggcgcgccgcgcggcgctggggcgctggtgcctggtgatcctggccgtggcctccgcgctaggggtctctggccccgccttctactggcgctacaagaagggcttctcctcctcctccccctcgtccaccgcggcggcggtggcttcttccccgtcgtgccctccctgcagctgcgactgcccggcgcccctttccctcaagtccatcgccccagggcttgccaacttctcaataacagattgtgggaaaaacaaccctgagcttgccaaagagatggagaagcaatttgtcgatcttcttaatgaggaactcaagctgcagcaggttgtagctgaggagcatagtcaccacatgaacgccactcttgtcgaagcaaaaagacaagctactcaataccagcgagaagccgaaaagtgtaatgcagctacagagacctgcgaggaagctcgggagcagtctgaagtagcaatttcaaaggagaagaaactcacagcaatgtgggaacagcgagctcggcaactgggttggcatgattctcgagccacgagcatgtgacagctttagttctgaaatttcaggtgaaattatttctggtagctgcatgggttatgccttgcagccaaaccaaccggcgacgtttgtctatgtaatatcagtttccacgacaacattgttaattttgagtctcaacattatagttccagcttccttacaaatgtgactagcttgctgccgcctagatatctgaattttgtcatagtactgttg

SEQ ID NO: 3823 - DNA, 507 bp, Zea mays
  Clone ID: 700342353_FLI
acgatgaggaatacaatgacattgtggaggacatgagggaagaaggacgcaaatatggtaacttggtgaaagttgtaattccacgacctgaccccagcgatgctccagttgctggtgttggaaaggtgtttttggaatatgcagatgtcgagggctcgaccaaagcaaagacggggatgcatgggcggaaatttggcgggaaccaggtggtggccgtgttctatcccgaggacaagttcgctgctgagcagtatgactgaaagttgtagaacctgttctagagttgcaacacacaatgtgtgtgttttttttaaaatctttgagggtaccgttttctcttgaatttgaatcttatctagttataagtttggtgcaggaccagtcgataagcgataagtttgtgcaggaccattaggctttgtttgggtaattagtattgatcccaatccaaatctatatatgttaatgccttgttcagttattcttattccatatggattggagtgt

SEQ ID NO: 3824 - DNA, 806 bp, Zea mays
  Clone ID: 700342403_FLI
ggaagagcactgtctccaacctattcaaggacgccggcgtccccgtcgtcgatgcagacatcgttgctcgggatgtagtgcagaaaggcactggaggtttggaagaagattgtaaaaagccttcgggaatgatattttgttggagggtggagaaattaacagagcttacttaggacaaattgtcttttctgacccatcaaaacgtcaacttctgaaccgtcttctggcgccacatatttcttggggcataatgtgggagatggcaaaactatggatgaaaggatacaaggttatcatcctggacatcccgctgttgtttgagaccaagatagatcgatggacaaatccagtaactgtggtctgggttaacccagaaacccagattcagaggttgatgtcaagagacgggtgttctgaggaacaagctcagaacagggtcaacgcacaacttgcgttggactggaagaggtcggaagccgacatagtgatcaacaactctggatcactggatgacaccagactgcagttccaggatgtcttgaggaaagtttctgagccattaacatggaaggaacgcttgagatcccgagatggcctgatctccgttgtcgtgtgtacggcagtgggcgtattgcttgctcggaagaatctactatgattctgataaggttcaggaagctaagaacagtgatatgtcgttttagagtagaggacgtacacaattaagcttgtctggtgcctgtgcctgacaaggaaattgaacggctgtatgtggagctttgattgatgaaataatttttttgttt

SEQ ID NO: 3825 - DNA, 1458 bp, Zea mays
  Clone ID: 700342430_FLI
gacgtgcgcagcggcgctaggactgacagatgcaggggaacctcggtgtccgatccagagcgtcgctgcgggttctcctcccgcggcagctaaccgcgcgggcaagatggctgcagggcagcgggcggacagggggctcggaggaggacgaggcggcggtcccgtacgtggacgtgcctcgccctggtaggaagtgggagcggaagccgtacgtgacgccgatgaaggtgctcatccggcgggccaaggaggagaggcaggcccgccgggagaacccgtgccgcgtgctcgagcacccacccgacaacggccttgttgtgccgcacctcgtcgacgtcgcccggcgcgtgcacgccgcgagggaggggctcctcggcggcctgaccaggctcgtggagggcgctgtcccggtgaagcgatgcaggttttgctcggaggtgcacgtcggccgcgtcggccacgagatcaggacgtgcgaggggcgtaacagtggcgcgaggaactccctgcacgtgtggcggccggggaccgtgcgggatgtcgtcggcttcccctactgctaccacctgttcgaccgcgtcgggaagcccagagtcgtgcacaaggagaagtacgacgtgccgaggctcccagcggtcctggagctctgcatccaggccggcgtcgacgtccagcgctacccgaccaagcggcgcaccaggccagtctactcaattgaaggcaggatcgtggacttcgagcccgacgtcgacgacgacgaagcagccaggacgttacatgaaccgccagcgtgcacaccatcgctgcctccagcggcggttgttaacggagagggggaagaggcggagatcaccgtgcctgagttagcgtcgaggacactgcaatcgtggctggacatgaaatccggcgcagcgaagctgatgaagaagtacagcgtgcacacctgcggctactgcccggaggtgcaggtcggtcccaaggggcacaaggtgcggatgtgcagggccaccaagcaccagcagcgggacggacagcacgcatggcaggaagccacggtggacgacctggtcccgcccaactacgtgtggcacgtcgcggaccccgccggcgaggaatcgcctttggccaacgagctcaagcggtactacggtaaggcccccgcggtggtggagctgtgcgtgcaggctggcgcgcccgtgccggtggcgtaccggagcatgatgcgtctcgacgtcgtgccaccagcgcgcgacgagtacgacctcgtcgcctagggctgcttgcgcgttgtcgtcttgggccttgtgcgttggttgcggatgatctcccgtggccgaatgtactgtgtcagaacgaacagtttgcagaggtgttgagatatggacgttcaaggttgtttatgcaggagcgcacatggaaataactaaataagacataggaaagacttatcatcatgat

SEQ ID NO: 3826 - DNA, 1769 bp, Zea mays
  Clone ID: 700342440_FLI
ggccggtgcaggacgtgcgcatcccgtaccagcagaagcgcatgttcggcttcgtcaccttcgtctacgccgagacggtgaagatcatcctcagcaagggcaacccgcacttcgtttgcgacgctcgcgtgctcgtcaagccctacaaggagaagggcaaggtccccgacaggttcaggaagctgcagcacccgcaccacggcgacttcgccggctgcacgtcgcccaccggactgctggattccagggaccccttcgacctgcagcaaccgcagattggacctaggatgatgtacgggaacgttgctggccacgaagcattcctgaggaggaaactggaagagcagcagcaggcggccgagctgcagcaggccatcgagctggaggggcgccgcttcatggggctgcacctcctcgacctcaagagcaggggccaccaccacctcggctcctcccccgcggccatggccaccaccactctggggcaaggcgacgacggctgcaaaggccgcagcgccaacgggaatgacaatgccgtcgccttccatttggaggatgccaacatccaagatactcctaccaagatgaacagtaacagccttgcaatgagtggtgggcctgcagccggtgcaggaggcgagcacgaggagcagcagcaggatggggacggggatggcagtcccaagcaggcagtcaaccctgggaaagaggagaagacggaatctggtcctgtcacagccacgcccattgttgcctgtggattccaagaaagtggcgtggtggagcacatcttgcctgacagcccctttgcgtcccccagcaaggcctccactcaaaatgggagcatcatcagcaatgcggcttcatccctcttccccccgcctgcatccaccatggagctgcccccgtacagctcttgcttcttccaggcgcccaggttttctcctgggcatgaagccattgggctgtgaatacagagcaaggggagggagggggtctactttcctctaatctgtgaggactatcggtgaccccgtcaagtggaggcaagagttaggaagctttgattaacaaatactaggtgtatgttcagagagagggacagcaacaacatcaaccaaaaagagagagagagagacaaagacaagtctaggttgttttagctctaggccctaagtatatgatgatagcagtcgtataaataacagtgttttagtaagtatctcctgccgggtatgaagactcaagaacaaaggtcagatctcgcgtatgctcgtttgtagcagtgtggatctgatacaggtaattgaaacctttagatggtggtagggctagtagtgagcagtagacgacaactagtcctggcagccagttgtagtgaggtgacatggctgcatacagacatccaaccaaaggaaacagagggtgtggtgtggaaagaaggggagagtggacaaaagccagacatggctggcgctgctgctgcataggcacaggcacaggcacagggaaaggtgatgagacgagaggggtggggtggtactctgctgggaccggcgcactcacgggtgcggagaatcagcttcgcctcacgagcgatgcagcagcggagacacagacacctctcgtctgcgtactgtttcgcccatgctcttgtcttgtacgcatgcagcagcgctccttgtcctttggctccatcgatgtattacctgctcttcttttcaactaggagtttagcggacaaagaaatgaaaaagtaattagcagtc

SEQ ID NO: 3827 - DNA, 987 bp, Zea mays
  Clone ID: 700342458_FLI
atttaccagtgatgatgagagagatggaatggtcggggtaccaggggtctcaggaaatattttccaggagatagatgggaggcagttcgacagcccaatactggggagtagaaagcagaaaggtggatttggcaaaggcaaaggaaaagctaactttgcaactgaaagagagaggagggagcagtttaatgtgaagtatggggctttaaggtcactgttcccaaaccctactaagaatgacagggcctctatagttggagatgccattgaatacatcaatgagcttaatagaacagtgaaagaactgaagatcctacttgaaaagaagaggaacagcgctgacaggaggaagatactgaagttggatgaggaggcagctgatgatggggaaagttcttcaatgcagccagtgagtgatgatcaaaacaatcagatgaatgggactataaggagctcctgggttcaaaggaggtccaaggagtgtgacgttgatgtccgcatagtcgatgatgaaataaatatcaaattcacagagaagaagagagccaactctttgctttgtgctgcaaaggttctagaggagtttcatcttgagctcatccatgttgttgggggaatcattggagatcaccatatattcatgttcaatacaaagatacctaagggctcttctgtgtacgcatgcgcggtggccaagaagctcctcgaagctgtggagataaagaagcaggcttataatatcttcaactagacataccaatcataatgtttatccagacaacttagcatgctggtctgctctttagcatctaataaggtgcttgcttatcacttatcagagactgaccacattgataagacttctttgatgaatgctgcaaactttcttgatagcttcttcatgctgaacttcttgtcttcttttttgtacactttaacagtcatgttggaatatgtggtgcttctgatttgctggcattgccactc

SEQ ID NO: 3828 - DNA, 1569 bp, Zea mays
  Clone ID: 700342462_FLI
aataatccgactcccactgctgggtgccctgtcccctacctcgggttccgcgcagaggaaggtgagacaccaattccactcccaaaccccacgaaaaccctcgccgtcttcgtccaaatcactcgcttgatctctcctctccgaacccggcaaccccttgaactagggttccagcgacccaatgacggacggcgacgacgagtacaagcgcgaggagtcggtggccctgctggtcatcgtcttcctcgccgcgctctcgctcctttccgtcatcgctgccttcgcctactactgctacattactcgcaaggtctcccgtcgcctccaggcgttccatatccccaagcgttccagctcccatcatacgcttcctccccgggccctgccgccgcagcagcaggggacggacaacccgtccagtaactccaccagagatggtgtcggagcggcggcgatgtcggtggtggctgctggggagaggggcgtgcaggtgttcagctaccggcagcttcacgcggccacgggtgggtttgaccgggcgcacatggttgggcagggcagcttcgggaccgtgtaccgcggggtgctccccgacgggaggaaggtcgcggtcaagctcatggaccgcccagggaaacagggagaagatgagtttgagatggaggtggagttgctgagtaggctccgatcaccgtatttattgggcctgattggccattgttcggaaggtgaacactgtctacttgtatatgagttcatggccaatgggggtctccaggagcatctctatccaaacagaggttcatgtggtggaatctcaaaattggactgggacacaagaatgagaattgcacttgaagcagccaaaggtttggaatatcttcatgaacatgttaatccacctgttatacatagagacttcaagagtagcaatattctcctggacaaggacttccatgcaagaatttcagactttggtctagccaaacttggatctgatagagctggtggtcatgtctcaactcgagttttgggcacacaaggctatgttgcaccagagtatgcattggctgggcatttgactaccaaatcagatgtgtacagttatggtgttgtgcttttggaattgcttactggcagagtaccagttgatatgaagaggtctcctggagaaggtgttttagttaactgggcattgcctatgctcactgaccgagataaagttgtgcggatcttggatccagcatcggaaggtcaatattccttgaaagatgctgtccaagtggctgctattgctgccatgtgtgttcaaccagaggctgactataggccattaatggctgatgttgtccaatcgctggttccacttgtcaagaaccgttataatcagaaatcttgcaatcccaatgtgcaaccatcgaagccacttgactaggagaaaagctagtgtttgatctgcagtttgtgctcgtccttctggaacccttctcgagttctcgtctataacgaactactgttgagacagattcacacgcttcctaacaatgatttcgtctgctggtgccctcc

SEQ ID NO: 3829 - DNA, 1193 bp, Zea mays
  Clone ID: 700342482_FLI
gaaaaaaccaacacactctcgcttgcggcaagaattttccggcccgaaaccgaaagcacccgcaccaatctctgcgtctcttcgtcttcggctgcgcggcggcggcagcagcggaggaggttgaggagatgctgtccggcgacatccccccgagccagaccatctacctcaacaacctcaacgagaaggtcaagaaagaagaattgaagagatcgctttatgccttgtgctcacagtatggaaggatactggatgtggtggccctgaaaacacaaaaactgagagggcaagcatgggtggcgtttagcgaaattacagctgctaccaatgctttccgtggattgcaagattttgatttctacggcaaaaaaatgcgagtacaatatgcaaaaacaaaatcagactgtattgcaaaagaagatggtacttatgcacctaaggagaaaaggaagaagcaagaggagaaagctgctgagaaaaaacgacgaacagaagaggcacaacaagctggcctcaatgctgctgctgcccaaagcaatggaactggctatcaagcgtctcgtctgggcaaggcttcacaggagccacctgcgcctccgaacaacatcctcttcatccagaatctgccagaccagaccacgagcatgatgctccagatcctgttccagcagtaccctggcttccgggaagtacggatgatcgaagctaaaccaggcatcgcttttgtggagttcgaggacgatggccagtccatggtcgcgatgcaggctctccaaggcttcaagatcaccccggagaaccccatggctatatcctatgccaaaaaatgagaaccctaggggactctgtaccggctttgtttcggtactctagtattgatcccaaatccacatgtgctgaggtggattgtggtgtaaattagtttaagttacaccctaatctacctcaatacatgtagattgagctcaatactagagtatcaaactagacctaagatctttccgctccgcctttagaaatcgagccacggtacccactttccagtcatgtgtttttggaaagcactcgcttgatttcgaagttaaactcttaacacttttaaatcaggtttggtcctcagtctctgttcactcggcttttgctcttgtcaattacggtattgcaccctatgatatatataagctgtcttgatt

SEQ ID NO: 3830 - DNA, 1022 bp, Zea mays
  Clone ID: 700342511_FLI
accggccctgtgttcctctgatgcttcaccgggtgtcagagttgagaccttggagtccctaataagagcagaagcctgtaggagaagtagctttagaacactagaggaggaacacatgcttggcccaattggtgtgaaactgaagccagccaatttgctaatgcagcttatcacttgtggatctatatctgttaaagaacaccgaggctttgggttcatcccaacgtacaggcctcggtttacacaagttgagttcccttcgtcagtgttctccactcctgtggcattgcgacaccttgacaaaatcccctgcaatacaagaacaatcgggacgagagctccagagtctgaacgtttcagtgggagcttggttgagaccaagatgcaggacgagtcaaggagaggaatcagctcactcaaacgctcatcatcttatgacgaggatagagtttatagagcagcacattccaaaagtgatacagaaaactcttgtgagtcaggtagtttcaggtgtcttccgcagactatcagaatcatatcatgtaagcaatcgagaaatggaacaatactctcccctttctctgatgtgagaaacagctctagtcaacaagaatatagtactagatcctcaccactgggttcatcaaagagtgcaagcaataggatgactgatccatcactgggtaaagtagattcattccacaaggaaaaggacatgatcaagatcgaagaaaggcttccttctggagctcgggttataatccaatctgcacctttgtgtgaagatagtgatggcagcaatgaatcactgtaaggggctgtgttacatatgttttttttctttttatttcattttactgagaatgacatttgttggaatttggtgcttgtgtgtggcatagcttttggagtaggttcaaaggtattgattttgtaaactgtgaatgtgatagtcaacattttctcacaccttgaagaagagaatactttatcttgctttaaaaggtctgcttttgtatctt

SEQ ID NO: 3831 - DNA, 723 bp, Zea mays
  Clone ID: 700342564_FLI
tgcccaagcatattctctaccggcagaaagaacagttcagtgacggcgttggctacaactggatcgatggtctcaaatccttcactgaacagcaggtgacggatgagatgatgaacaacgccgcccagatgttcccctacaacacgcccgtcaacaaggaggcctactactaccggatgatattcgagaggctcttccctcaggactcggcgagggagacggtgccgtggggcccgagcatcgcctgcagcacgcccgcggccatcgagtgggtggagcagtggaaggcctccaacgacccctccggccgcttcatctcctcccacgactccgccgccaccgaccacaccggcggtaagccggcggtggccaacggcggcggccacggcgccgcgaacggcacggtcaacggcaaggacgtcgcagtcgcgatcgcggtctgacgagagtacgtgctcgcgcacctccctgctagcttctaccgggctgcagcctgcagcatgcactgtgcgagcacagccgatcagcgccaataaactggaggataagaacgactggtaggtgtgtgtgtgtgtcgtgcgtgcccaccggccatatcccggtgcggcagcacgtgctattgttacgtgttgtactgccgccagcgtacgtgtctgtgtgtctcgatcatatctgtacgtttttagatttagaagaaaaaaaaaaaggcatgtccgtgtctgt

SEQ ID NO: 3832 - DNA, 2007 bp, Zea mays
  Clone ID: 700342573_FLI
actagcgaaacagggggggcactgttactactagcaagcaccggtacaggcgaaacaaaaacaattcctttgataatactctaggacaagtggacaacaaagcagacgcccttattcatggagcccacggcaagcttcttttgcaagtaaaaaaaaaaggttgcaaacagagggacgagagagaggctctagctgggtctgctggtagcccaccaaagcaagcaaaagccactcgtggatggatggggaaatgacctgttattttcctatcacctccatgagcgataaatccctagtccaacattttttcaaatctcaacattcttgcatcagctaacacctctctctctcgaaccccttattattactgttccccgaaccaccaaactggatttctaagcttctcctccatctccaccaaagaaccaatatatcaccggatccaaaatgaacagacctaccactgatgctaacgctactactgtcttcctaactctgctgctaacacactacctaacaaaaggtactcggaactatttttttaattattaggaatgtagctggagcgacgaccacgcgaaggctggcttggctgtcgccggaatcttggtggtggtggttcccttcgtctgctccagtcggcggcgacctcactcaagaactgtggcacagtgcctgcgaggcagcccggcgcttctggctcgcaagcatggcgttgctccgactaatcaaggcctcgtgatcaagaacaaatccgcctgggtaacgaggctgcgcgccgaggtcgtcgaggttgaggttgagagcctggacgacgcgagcagggaccagaaccgtcgaacaccctgtctttttcttcggctctgccggggcgccagccggcctgggaagaaacacgccagtgccgttacgctcgcgcttggggccggaaggggtgaggaacacggcacgcatgccagaggccggagccgccggcgcgtggtggtggtgctgctgcggcttctgaggcgggaggcacgccgccgggttcagaccaagcagcgcgtcgccgcggacgcagccgacgggcttggcgcatgcgccctggcgcgcgctccacgccgcggcagcggcaagctgctgccgctccctctgtagcttgagcagttgctgttgcttcaggagatggaactgagcagcctgcatctggcgctgcgagaccaagcgcgcgaaggggtcgtagtagtgcccaccggcagggactttggcggaggagggaggtgcgattggcggtggcgagggcttgcgtggcggctgcgcgaacccgctctggccgtggaaaccgttggcggccggcaccggcacgctgttggcggcgcgcatgcgcgcaacctgtccggccgcctcgtagagcagatcccacgggtcggcgggcctctgctccaggggcgacgacggcggcgacgtgcccttggacgccccgccgctggggctctcctgccccgacttgggcagcccgcacagcgtcgactgcggcgacccaaccgtcacctccgccttggccgcgggagccttgcgctctcccccgtcgccgaggaggcccgcgaggcggcgcgagagccccgccaggctgtcctcctcgtcgctctcgctccgggctgccacggccgccttctcctcctcggagaagaagtcgtcgtccaaaaagtcctccggcagccagaactcctccccgaggtccgcgcactccgtcgtcgacatttcctccactctcgacaccgtcgaagaagcctgaaaagcccaccgccgaccggtggaatgagcacagcgcccaggaccctggcggaccagcggcaccaaaccactgcgtgcggctccctctccaaagcagagagaaaagcggcgggtggatggatggatggagtggggagtagcggcgtgcttatcagcgaaaagaggtgggagtggcacggcgagaaagagatgggggcgaggaaggcgaacggaatgtcgacgggcgacgaggcg

SEQ ID NO: 3833 - DNA, 1587 bp, Zea mays
  Clone ID: 700342576_FLI
gttcgcagcgcggggcgacgagcgcgctcctcctctcgcgcagcgccagcgccaccccgcaccgtggctttatatacacccctcctcccaaccctaccgaatcatcactaccaccgctctctcttcctctcctccatctctcaacgcctgaagctcaccgcacctcccctcctcgccgcggatcccccactactccggtagaaaatggctgacgctgaggatatccagcccctcgtctgcgacaacggaactggcatggtcaaggctgggttcgccggcgacgacgctccgagggccgtcttccccagcatcgttgggcgcccgcgccacaccggtgtgatggtggggatggggcagaaggatgcctacgtcggcgacgaggcgcagtccaagaggggtatcctgaccctcaagtaccccatcgagcacggaatcgtcagcaactgggacgacatggagaagatctggcatcacaccttctacaacgagctccgtgtggctcccgaggaacaccccgtcctcctcactgaggcgcccctgaacccaaaggctaaccgtgagaagatgacccagatcatgttcgagaccttcaacacccccgctatgtacgtcgccatccaggccgtcctgtctctgtatgccagtggtcgtaccacaggtatcgtgctcgactcgggagatggtgtcagccacactgtccccatctacgagggatacgccctcccccacgccatccttcgtctcgacctggctggccgcgacctcaccgactacctcatgaagatcctgactgaacgcggctactccttcaccaccactgctgagcgggaaattgtcagggacatgaaggagaagctcgcctacattgccctggactacgaccaggagatggagactgccaagaccagctcttctgttgagaagagctacgagctgcctgacggacaggtcatcaccattggtgctgagcgcttccgctgccctgaggtcctcttccagccatccttcattgggatggaagctgctggtatccacgagaccacctacaactccatcatgaagtgcgacgtggatattaggaaggatctgtatggcaacatcgtcctctccggtggtaccactatgttccctggcattgctgacaggatgagcaaggaaatcaccgccctggctcctagcagcatgaagatcaaggtggttgctcctccagaaaggaagtacagtgtctggattggaggatccatcctggcatcgctcagcaccttccagcagatgtggattgccaaggctgagtacgacgagtctggcccgtccatcgtgcacaggaaatgcttctaattctttgggcccaagagatgcaagccgagaggagccattatcgccagcctcccgccccgtttctttctccttttgttgctgtttcttcattagcatgaacaaagttttctgccggtctgtcggcagccgctttctcctattcatcaagactgtaatgtctattgttgctacctaatgcttctcacttgtcattttggacacatgttcgacctattcaattttaatgagatgcctgatgaggctacttgc

SEQ ID NO: 3834 - DNA, 612 bp, Zea mays
  Clone ID: 700342579_FLI
gcgtccgccattggcgcaaacacacccacacccacacacacattcagctactgatacccgggagcttccggccggtcgaggagctagagcagccgaggtgggcgtacgtggtgcagcgcaggcagcaggcctcagcagcattcagcaaggccggggtcgaaaggaaggaggagcgaggaccggaaccggaggcatgaacgcgggcaccagcatctcgccgcggccgggcacggactggggccccatcatcgtggcggtgatcctcttcgtggtgctctcgccgggcctgctgttccagctgccctcgcggacgcgggtcgtggagttcggcaacatgggcaccagcgccatcgccatcctcgtccacgccgtcatcttcttctgcctcctcaccatctttgtcgtcgccatcggcatccacgtctacgccgcgtaggcgtacgtagcccagccatgctaggtagcttaggctccatacgttcgtctggcttgcttcgcttcccacgatggtggtctctttgtaactttccaggtcttttgagtatgtaggctacggatggcgcaagatttagttgctcatctgctatgttgtgtagtgctcggcttttcact

SEQ ID NO: 3835 - DNA, 1783 bp, Zea mays
  Clone ID: 700342591_FLI
aaaaaacacccaaaaaaccaccttcttttcctgcgttcccctgctcgatccccgacgagaattcgctcccgaacccatcgatctgctctccgcagtccgccgatccgtggatcgatccgtgcgcgggctcggtccgccccgggttccgatctggtcgccgcctcgcctgaggagatgaacggcgccgggggcagccaccaccaccagcagcagaggctccggcagcagcagcagcaggcgctcctgatgcagcaggcgctgctgcagcagcagcagcagcagcagtaccagtccggcgtcctcgccgccgcggcggcggcggccatgacccagatggaacctgtttccaatggcaaccttccacctgggtttgatccttccacttgtcgcagtgtgtatgttggaaatgtgaaccctaatgtcacggagagccttttgattgaagttttccagagtgctggccttgtggaaagatgcaagctcatacggaaagagaagtcttcctttgggtttgtggactactatgatcgaagatctgctgctctagcaatcatgacccttcatggccgtcacgtatatggacaagcaatcaaggtgaactgggcatatgcaagtacgcagagggaggatacgtcagggcatttccatatttttgttggtgatttaagttctgaagtgaatgatgcaactctttatgcctgtttctcagcatatccttcttgttctgatgctcgagtcatgtgggacaacaaaactggacgctccaggggttatggttttgtctccttccgtaatcaacaggaagctgaaactgctataactgaaatgactggaaaatggcttggaagcagacaaataaggtgcaactgggcaacaaagaacaattcggaagagaaaccagaaactgacaatcataacgcagtcatactaacaaatggtagctccaacaattcagcaacggatgcaagccaggacgcaggaagtaaagagcccccacagaacaatcctgattgtactactgtatatgttggcaacctcggccatgaggttaaccgggatgagcttcaccgccacttctataacttgggggtcggggcgatcgaggaggtccgtgttcagcaggacaaagggtttggattcgtgagatatagcacccacggggaagcagcactcgcgattcagatgtccaatgggtcggtagtccgcgggaaaccaatcaagtgctcatggggtgtcaaaccaactccaccggggacaggctccaagcccctacctcctccagccgcaacgtaccagcccgctgtggcaatgcaaggcgtcccccaaggtttcacgacagcagaactcctagcctaccagaggcagcttgccctgagccaggccgcggccgggcagcagcatgctggtcttgcgggccaggtttctgcagcaggccttcttgctgctgccggttcccaggccctctacgacggctacccgaatcagtcgtcagcgcagcagcttatgtactacaactagtagagctcaagaggaaggaaggcgtctgtagtgttcagcttgtttttgcgcaagcttgggtcatcctcgccctgtttttttctttattattttgtggttcatgtactatttgtgagagctcttgttctctcttctcagccgcgggattgtgttacttactgtcttcttactgtaccattttccttgtctaattctgttgagtaagaggtgtattctatgtgactttgcgattgattaatgtaatgctcccctggggatcggcttt

SEQ ID NO: 3836 - DNA, 161 bp, Zea mays
  Clone ID: 700342601_FLI
cagagttgtcttgtgtctctctgacagtgctgtgtagtagtttggttggatgcgcgagaggagggaagttatcagcagcagcaggcggttggtcgatgaatagctgtaaaaggcactgtcaaaagtgttggggttataaaaaaagcggcgcttttaacttt

SEQ ID NO: 3837 - DNA, 2195 bp, Zea mays
  Clone ID: 700342623_FLI
attcctctccactgcgctgccatcgtctcgcgccggccccccgtggggaactagaactgactccctcgatcccagcggcagcggcggaagcgaacggtgaccgcgacctcccctgaggctgcatatactcggatcgggtttcacatctccggttttggattggttggttgcccgcggcgatgggaggagagctgtggtggtatccataggggatcctcggttgcgtccttgtgcgatggcttcgacctccgttcctgagttaaccgcggacaagaaatgcgacaaagccatcgcggatacggcggcaccacttacttctcagggacactccgaagaaccgactgggaaagtcagcacactagtgcctgctttgccggttgtaattgcagcaggcgatggggctgcatccagtggggtgatagaaaacagaaatggcatggacaattctgctgatggttctttgaagcgggatgacagtgaaggtgctgagaagagctcgctgcgggggagcgtcaaggatagctcggtgtcggctaaatgcagtgacagggcgagcagcctgtcgaaagccagtgggagcgccaagatcagcggtcaacctgctgacatgatcgagagtggcaagagtagtctctatcgggccagtggtggaagtgatctgagtgatgagagcacctgcagtagcatatgcagcagtgtcagcaagcctcacaagtcaaacgactcaaagtgggaagcgattcaggttgtccgaaccaaagaaggttctgtaggtctaggtcatttcaggctgctcaagaggctcggttgtggtgatattggcagtgtgtacttatcagaacttagtggcactaaatgctattttgccatgaagatcatggacaaggcgtcattagcaacccgcaaaaagctgcttagagcgcagactgaaagggagatattgcaatgcctggatcatccttttcttccaacattgtacactcactttgagacggataagttctcatgcttggtgatggagttctgccctggaggtgacctacataccctaaggcaaaagcagcctggcaagtatttccctgaacaagctgccaagttttatgtagcagaggtgcttcttgctctggaatacctgcacatgcttggtatcatataccgtgacttaaagccagagaatgttcttgtgagggaagatggacatatcatgctgtcggatttcgatttatccctccgatgtgctgtgagccctactcttctcagatcttctaaccccagtggggataaccaaaagggcaacccagcttactgtgtgcagcctgtgtgcattgagcctgcctgtatgcagccttcttgtgtcacgacaaccacatgcttctctcctcgctttttctcttccaaatccaaggagaaaaaagataaaaaggcaaaggcagacttggcaaatcaggtcagaccacttcctgagcttgttgcagagccgacagatgcaaggtctatgtcttttgttggcacccatgagtacttggcacctgaaattataaagggcgaggggcatggaagtgctgtagactggtggacatttggcatattcttgtatgagcttctcttcggcaagacaccattcaaaggttctgggaatagggcgacattgttcaacgtagttggacaacccttaaggttcccagaatcacctgtagtgagttttgctgcaagggatcttattaggggattgctcatcaaggaacctcagcatcgattagcgtataagcgtggagccacagaaataaaacagcacccgttctttgaaggtgttaattgggcattaatcaggtgtgccactccacctgatatccccaagccagttgagatccctcgttctgtagcttcatcaagccagaaggctacatcagccgctgagaaaggctcagattatcttgaattggagtttttttagtggtcacgcatgatctcccatgtgcaagttgtaaagctctaccttttccacttagacttcttttttttatgggttttaataactttatatgtagatgcatattgtcgtacgtagtgctgttctcttcagttgatttctcagttcattcctttagatgggatcctcaatctggtggagtctgtaatcctttattggctgccgttcactagattctctcaataacatggaaacattttcgttc

SEQ ID NO: 3838 - DNA, 895 bp, Zea mays
  Clone ID: 700342626_FLI
gcgcctcgggtcaaaccctaagcagggagttgatttatccgctgcagccatgagtaagttgcagtctgagtctgtcaaggatgccatctcccagattgttggggatgccaaggagaagaataggaagttcactgagactgtggaacttcagattggtctgaagaattatgatccacagaaggacaagcgtttcagtggctctgttaagttgccccatatccctcgtcccaagatgaaggtgtgcatgcttggtgatgcccagcatgttgaggaggccgagaagatgggacttgactacatggatgttgaggctctcaagaaaatgaacaagaacaagaagcttgttaagaggcttgccaagaagtaccatgctttcttggcatcagaggccatcatcaagcagattccccgtctccttggtcctggtctcaacaaggcaggcaagttcccgaccctggttactcaccaggaatccctcgagtccaaggtgaacgagactaaggcaaccgtcaagttccagctcaagaaggttctttgcatgggtgttgccgttggcaacttggcgatggaggagaagcagatccagcagaacatccagatgagcgtcaacttccttgtttcccttctgaagaagaactggcagaatgtgagatgcctctacgtcaagagcaccatggggaagccatacagggtgttctaagtatgctcttttgtgaagtctgctaggttctggcaccgaggttttattgaattaaacttttgttaagagtatgtttttggacgatcctatatttcgtcctggcgctactatgtttcagaatggtggtactactataagtatcctggcgctttaagtattgcttgaaaggatcaatataatttgcgtgtcataccc

SEQ ID NO: 3839 - DNA, 1139 bp, Zea mays
  Clone ID: 700342632_FLI
atggatcggggcacagagattccgtgtgatcggggcacagagattccgtcgtaaaaaaatcggtatggcgttggtattcgttctctcgccactagccgctagtgaaagaaggggatatatattcgtgtcctccgaattagtccttcctgcagtgtcctcgccgacagggaaagccgtgttgcaagaaggggaattccgctgcgagatccgtgaacggttcagagatggcacagacggtgttcaccccctctttggaagcgatgaagcatgtcaaggcagagaacggagtcattctcaccaagcccttccttgatgtctgcaagcaaatattgcctgtcctcgataaatttggaggtgctatggcaattgtaaagagtgatatcggcggcaatatcacaagactggaaaacaagtatacttcagaaccatcaaagtatgaacacttgtacagcatggttcaggaagaagttcaaaacaagaccgcaaaaggttcctcaagctgcacaaatgggcttctgtggctgacgagggccatggacttccttgttgagttgtttcgtaacctgcttgagcatccagactggaccatgggtcaatcttgcactgattcatacaccaagactttgaagaaatttcatggatggcttgccagttctagttttacggtggcaatgaagcttgctcctaatagagagaaatttatggaggtcattagtggaaccggtgacatcaatgcagatattgagaaattttgcacgaccttctctcctttcctcaaagaaaaccacaactttctggcgagcgtcggtcttgatgatctgaaggcttcatagatcaatctccatgctgattacaacaaaataagcatgtcttacgaaactcaaagtgttgccgagggtatacctgtttcccgtagccatctcccccttgaaaaactttaggagatggtaataatttgtcagcatgattgaccatggctacttacgcagagaattgacaccactcaacaaatttagttaccgaactctcgatcctgtgttacagcaaatcctatggttatgtggaactctggtgctgtaattctcttgtatgctacccagtatgccgcaggaaatcataattcggtgttccattgcagc

SEQ ID NO: 3840 - DNA, 963 bp, Zea mays
  Clone ID: 700342634_FLI
gagcaaggccacacacacacacacaccactaggctaggttagccttttaatcgtcgtcgagaagcaagaagggcgcgcacgcaagcaggcaagcaagaagagagccgatcgaccgagagctagcacgcgatggcgaggtcttccaagatgatggtggcggcagctctgctggccttggccctggccgtgtcgaccgccgaggcgaggaacatcaagaccacgacgacggagaagaaggacgacgcggtggtgcagccgcagaccttcccgcccttcgaccgcctcggcggcggcgcgtccccggcgttcggcggcctccccggcggcagcattcctggcagcagcattcccgggttcagcatgcccggcagcggcagcagcctacccgggttcagcttgcccggcagcggcagcatgcccctcttcggcggcggctccccgggcttcagcggcttcggcggcatgcccgggtcgcccaccgccggctccgtccccgagcacgccaacaagccctgaacgccaacaagcgtggtagtagagtggtgctactgttactgtagtacgtcgtcgtcttcatgcatgcgtggttcgtggtttcccctagctccatacgagcagtagttgggccttgcacgtaccgtacgtctagctagctatatatatatagcttgtgttctactgccttttagtttaattacctgcctgcattggagagttggatctgtttcatttggtggtgtttgctttactattaggtcagtatctgtttgtggagacttggtgtttaatttatttagccgtttgtgactggttgtagctagcggtggtgcggtggtgatgttcttgaggcatgaataatgctacatgcatgtgatgtatccatgttttgtgtgtggtaaacctgttgtttgtataagctgtatgcatgggtctttaatttgtttttgaagcagggttcacgtt

SEQ ID NO: 3841 - DNA, 961 bp, Zea mays
  Clone ID: 700342648_FLI
cttggtttggctagggaagagacactaacggagatgatgactgctgagacaggaacataccgttggatggctccagagttgtacagcacagtaacactgaggcatggagaaaagaagcattacaaccacaaagtagatgtctacagctttgcaattgtgttgtgggaactcctccacaataaactgcccttcgagggaatgtctaaccttcaagctgcctacgctgccgctttcaagaatatcagaccaagtgccgataacttgcccgaggagctgtcagaaatcctaacatcctgctggaaggaagacccaaacgacagaccaaacttcacacagataatacagatgctcctacactacctatccaccctttcgccacaagagaccttggcgggcccccgccgcacgttcagttcggagaacacaatcctgcccccagagtctcccgggacaagctcgctgatggcttcgcggggcgacctcggcgacacgcccaagggcaagaaggaagacaagccgaggggcttcttcttctgtttcagcgagtgctattagcacgagcccccccaaagggggaacactccgataagcttgcaaatactgaacgaacaccgtctctccccagctccgatgccctgcgactcaagccatgtccagccggtcaagtcccaggcatccatagtccgcaccctgaagaacggaagtgtagtcgaacactgttttgttttcttctgctaatcaaggtctcctgcatcgctgacatgctgatgacatataccagcagggtaaaacgacgggtaaaccttttgactccagatagtaatggtgggaatagcttacctcccctgtgttttctggcgcaccatggtgtaacggagttgctagagcgcgactatagattgccttcctgcctgcctgtctcgcccgacatcgtatagaaataaaaccaataattcgcatc

SEQ ID NO: 3842 - DNA, 771 bp, Zea mays
  Clone ID: 700342662_FLI
ccaaatcacccttccccttccccttccaccaccaccaggccgccgcctcgtgtcctcaattctcctttcgaatttagaatccccgtgctgagagctgagtgccgccttggttgctccgtactggactcgattcctcatcgcagcagaagcatcccgtcccctccgcttctccttgctctgctctgctaacacacagacaaaaaaaatagcagcatgtcggaggtgaaggactccaatgtgcctgctgcacttgatggaaatcctcaacctatggaccaaactgaagacaattctatgccctcagcacagcaacaggaagaagcaatcaagaagaagtttggaggactaatgcccaaaaagcccccactcatctcaaaggatcatgagcgggcctactttgattctgctgactgggctctagggaagcaaggtgttgccaaaccaaaaggaccgctggaggcacttaggcccaagcttcagccaacacgccaacaacagcaacaacgtgcaaggcgccctatttacacttcgtcagaaaacgaggacggagacggggctggtgctgaggatatgaacatcaattgaagtggactagtggagtggaatgcctgctcagattggttgatgagcaagtcgtcactatatgtcaagtgttgtagtttgctttgcaattattggaggaattaaatgatcgtctgctgggttcatgagtcgaacatttgatatatatggcctattatttactaatatatatttttattatctgtggat

SEQ ID NO: 3843 - DNA, 309 bp, Zea mays
  Clone ID: 700342723_FLI
atggattactaatgcatcacacccacatacacatcaatgcaggtttttttagcggtgaagttcatcttcactgtttagcggtgcaagttcatctctactgtattttgttcgatgatgaggtggttgtcaggcggatacagttttgagtctgcggacgtaggacctcacaatagttccaaacggaatagtgtgagaataataaatatgaacagtagttctttgagatatgaagttgtagatcaagattggcttccgggcattttgtgtcgaaccaactgtattctgatcgttacattttttggctggggt

SEQ ID NO: 3844 - DNA, 525 bp, Zea mays
  Clone ID: 700342733_FLI
gaaggttgcttgcaagttcttgcagcctggagcatatgatctggttggttacatagtgtatgagatcgaccagcacccttaccagaatgtattctacaatggcactatcgaggttgttgaggctggaggcttactcagtgttgagtctgtgttcctcatcacccttggatttgcacttcttggtctgtttggattgtgggcatatggccaggttcagcagctctcgaagaaaacaaagaaggcacccaaggtggagctcggaactggaacaactgatgccaacatcgatgagtggctggagggcacttcgtttgtgcagagaagcaaatccaagaagaagcagacctgaggctctccaggctagttaaatccttttgaggatctagaatgagacatttgagggtagcccttcacaagtgacttttgcagaaagatagatgcgtaaggaggtgctgaaaaccgtaaacatcttcgttgacattttcgaccttgtgtactttacatggaacaaaattttgttaaaag

SEQ ID NO: 3845 - DNA, 2095 bp, Zea mays
  Clone ID: 700342738_FLI
tcttgctgaagcacatagaggtgttctttatgttgatgaaataaatctattggatgatggcataagcaatctacttctgaatgtcttgacggagggagttaacattgtggaaagagagggcattagctttcgccatccctgcaaaccacttctaattgctacttacaatccagaggaagggtctgtacgtgaacacttgcttgatcgtattgcaattaatttaagtgctgatcttccaatgagttttgatgaccgcgttgaagcagtggatattgcaacacggtttcaggagtctagcaaagaagttttcaaaatggtggaagaaaaaactgaaactgcaaaaactcagataatttttgcaagagagtatctgaaggatgttactattagcacagagcagctcaaatatcttgtcatggaagctatacgaggtggctgtcaggggcatcgtgctgagttgtatgctgctcgagttgcaaaatgtctagctgctatggaaggacgtgaaaaagtatttgtggatgacctcaagaaagctgtagagctagtcattctacctcgctccatcctatctgataatccacaggatcagcagcaagagcaaccacccccacccccgccaccaccacctccagaaaatcaagattcttcagaagaccaagatgaggaagacgaagaccaagaggatgatgaagaagaaaatgaacaacaagaccaacagatacctgaggagttcatatttgatgctgaaggtggtttagtagatgacaaacttcttttctttgcccagcaagcacagagacgacgtggaaaagctgggcgagcaaagaatgtcatcttctcagaagataggggccgttacataaagcctatgcttcctaagggtccagtaaggaggttagctgttgatgccacgcttagagcagctgcaccataccaaaaactgcgcagagagaaagaacgtgacaaaacaagaaaggtttttgttgaaaagactgacatgagagccaaaagaatggctcgaaaagcaggtgctctagtcatatttgttgtggacgctagtggtagcatggctctgaatcgtatgcagaatgctaaaggtgcggcgttgaagttgcttgcagaaagctacaccagcagagatcagctttgtgccttggcatctctctcaggtttcaattattccttttcgtggagattatgctgaggttttgcttccaccatcaagatctatagcaatggcccggaaacgtcttgagaagctaccatgtggtggtggttctcctttagctcatggcctaagtacagctgtcagagtgggtctgaatgctgaaaagagtggcgatgttgggcgtatcatgattgttgcaatcaccgatggaagagctaatgtatcactgaagagatccactgacccagaagctgctgctgcttcagatgcaccaagaccttcttctcaagaactgaaggacgagatacttgaggtggctggcaaaatatacaaggcaggaatgtcccttcttgtcatcgacactgagaacaagtttgtatccacgggatttgccaaggaaattgcaagggttgcccaggggaaatattattacctccctaatgcttcggatgctgtaatttctgctgccaccaagaccgccctgacagacttgaagagctcatgattttgcagcagcggcacccgttttctgtaccttttgataggggtggtgaaccttcattcatgcagtagtttttgtgtaggcctctacaatgacagggggaaacaaacccgagcatggcatcgtgtaaagtgttaaggtccaatggcctcctgtccacgtttggcgatgtaaatcctccgtaacatagcttgaaccattgagtgtcacgtagtgccatggctagcagttaaaagtaccatgcgtcatgaatgacggggtggacagtggtggttaaaaatggcagacccatcgtgtggctcgaataaggaggtagtcgcggtacgtgctagaaactgaaaggaaaaagtatataaccctctagcctttaggttttgacaatagaataaatgaataataatccctccaattctattgtcacc

SEQ ID NO: 3846 - DNA, 735 bp, Zea mays
  Clone ID: 700342745_FLI
ggcggattcgggacagtctataagggaaccatccgaagcgggcgagaggtcgcggtgaaggtcctctccgccgagtccaggcagggcatcagggagttcctgacggagatcgacgtcatcagcaacgtcaagcaccccaacctcgtcgaactcatcggctgctgcgtcgagggaagcaaccggattctggtgtatgagtacctcaagaacagcagccttgaccgtgcgctgctggcttctaacagtgagcctgccgacttcacctggagcgtcaggtctgctatatgcctcggagtcgctcggggccttgcgtacctgcacgaggagatcgcggcgccgatcgtgcacagagacatcaaggccagcaacatactgctcgacaggaactacgtccccaagatcggggatttcggtctggccaagctgtttcctgacaatgtcacccacatcagcacccgcgtcgcgggaacaacaggctaccttgcgcctgagtacgcctggcatggccagctcaccaagaaagcggacatctacagctttggtgtccttgtcctggagatagtgagcggcactagtagctccaggagcatactcatggatgacaagattctcctagagaaggcatgggagctgtacgaagcgaagaggctcaaggaactggtggatccagcccttgtagactgccctgaggaagaagccatcaggtacatcatggtggccctcttctgcctacag

SEQ ID NO: 3847 - DNA, 439 bp, Zea mays
  Clone ID: 700342801_FLI
caggtatccattctttccttttctatttgcatatatgtagcaacccacttttctatttgcatatatatatgtagtgtgtcttcagatatattgaattgtggtaatattattattattatccttttcgttgcagagcattccattaatccaaccttattccagagtagttctgtgcactttaaagccgaacgtttgtggatccagaaagaagaaaattttgtatgtatatatgtgtagatccaggtgatcgctattgttagcttttgtttacaatggtcgccacccaaaaaagttgtaactcgctcatttctagacttgtgaataatgttgttagcactatgtttgcttttgcagtgacactatctgacgcttgtaatgttgcttggtcatgaactgttgtcgcgctatgtaaagatctagacataatcactttgtttgc

SEQ ID NO: 3848 - DNA, 1981 bp, Zea mays
  Clone ID: 700342811_FLI
gtcagcgttatgctgcaacatggactggtgataatctttcaaattgggagcatctgcacatgagtctaccaatggttcttcagttgggtctcagtggtcaaccattgtcaggtcctgatattggtggttttgctggaaatgctactccaaaactttttggaagatggatgggtgtgggtgcattgtttccattttcacgtggccatacagaaactggaagcattgaccacgaaccatggtcctttggtaaagagtgtgaggaagtctgtcgccttgcgctactaagacggtaccggctactgccacatatctacactctttttttaccactcacatacaaagggtattccagttgctactccagttttctttgctgatacacaagaccctgaactgaggaaagttgagacttcctttctccttggaccactcttagtttgtgcaagcactttacctaataaaggagctcatgaatatgcacataagttaccgaagggcatatggttgtcttttgattttgcggattcacaccctgatctgccggtgctgtatctacaaggtggagcaattcttcctgtaggtcttcctattaagcatgttagtgaagcaagtttggaggatgacctgtcactaattatcgcattgaatgaaaatggtaaagctgaaggtgttctctttgaagatgcaggagatggatatgcattcacacagggagactatcttttgacatattatattgctgaactccactcatcagtggttactgtcaaaatcttaaaatctgaagggtcatggaagagaccaaaacgaaatctgaaaataaatatattgcttggtggaggtgctatgataagtacagatggtgttgatggtgaagtaatacaccttacaatgccttctgaatctgtagtgtcaagcttagttgcaaccagcgaatttgagcacaagaaacgaatggagatgattcagcctatacctgatatagaagagccatcggggcaggaaggtgctgagctatcaaaaatacctgttgatttgaaaagtggagactggttccttaagattgtaccatggattggaggccgtattatatcgatggcccatattccttctgattcccagtggcttcacagcagaattgagataaatggttatgaagaatacagtggggctgaatataggtctgctggttgcacagaagagtacaaagtcatcaggaggcaccttgaacaatctggagaggaggaatctatttgtatggaaggagacattggtggtggtctggttctccagcgccagatatccattttgaaggacaacccaaagattgttcagatcgactccagcattcaggcaagaagtgtaggagctggttctggtgggttttcaaggttggtctgtttacgagttcatcctacattcaccctgctgcacccaactgaggtagtagttgctttcacggccatcaatggttcaaagcaagagatctccccggaggcaggagaaataacattcgagggagacctcaaacccaacggagaatggatgctagtggacaagtgtgtcgggctgagcttggtgaaccggtttaatcccagggaggttagcaaatgctttgtgcactggggaactggtgatgtgaacatggagctctggtcagaggaaagaccggtgtctaatgagacgccgttgaggatttgccaccagtatgaggtgcagcaaacaacctaaacacctgcccgaagagcagaaataaaaataccaatttggaggatacttcagttgcttgcacttgttttacggtctctgtattgacggtcgcgcaccataacttccatggtattttggagtcgtgtcgttagtcattaccctcttggaggactttgggtctgctgaaaacatggttactcagcaatatctgctactgttcacgactgacattcaaagggttactcagcaatatatggataaaatttgtgtt

SEQ ID NO: 3849 - DNA, 1509 bp, Zea mays
  Clone ID: 700342875_FLI
agccaggagaccgagggcgccgagaagctcattgaacggatgctgcaaacaggaacatttccagacgatgaatcctacaatttggttgtaggcctgcttatcagacagaacctcgttgattcatctctgaagtatttggatctgatgcttaaatcgggctacatgttatcactaactgttttcacagattatatccgagcatgtatgagatctgggaggttggacacgttgacatcaattatagagaaatgcaagacaactgataagaacaaagtcttgtgtccggaatggacttggtgcattgacatagcagatgctgcatttgaagctaacaacagcaaattagctctttttgctttggaatatcttgcaagatggattgctcgtggtgagaatgttaaacctcctgttcagctgtcagttaatgaaggtcttgtaatatcagctctgagtgctgctggcagaacttataatactgacctcttgaatgctgcttggtcgctattacggaaatccctgcgccagaaaagggcacccacccaagagacatatcttgccaagatctatgctcattcatcaattggccagcttcaaagggcttttggtacattgcgtgaatttgaaaatgcctatgggaactctgaggacattgatttagagctcttctcaccatttacttctttgcatcctcttgttgttgcttgctgcaaagatggctttagcacattggattcggtgtatggtcagttggagaatctgatacatgctgatccaccgtacaaatctcttgctgctctcaactgtgttgtattggggtgtgcaaacatttgggatattaatcgagcttatgaaacttttgtggctattaaggaaaaatttgacctcactccagacattcattcatacaatgctcttctgtgtgcatttgggaagttgaaacagacaggagaagcatgtaatgtgttccagcatgtattaactcttggtgttaagccaaatgcaacgacatactccttgcttgtcgacgcccatcttgcaaacaaagatccaaaagctgctcttgccataattgatgagatggttgatgctggcttcactccttccaaggataccctcaggaaggttcgaagacggtgctctcgtgaatcagacttcgacagtgacgagaaagtccaatccctggcaaagcagttcaactaccgaatgggtggtgagaaccgtagagagatgctttatagcatagaatacaatcctgtgtactgaaacagtaagtacttgttcatctgttggattttgccccatgtagtggttggttatgttttcaccctgacaattagtgttgcatcttgctagttatgctttcctggccgtttctcctgactggtgttgtcttcattttgataggcagttgctactgagtttgctagccattgggagagcacagacattgtagcttgtaaattacttggatgtaccaggattcttaagcaaattttcagtttctcgatc

SEQ ID NO: 3850 - DNA, 1276 bp, Zea mays
  Clone ID: 700342882_FLI
gtttaccattcctccccaaaacacatcctgcgatcctcgaagcctccgccgagcatcgatcatgtcggcctactgcggcaagtacgcggatgagctcatcaagaatgctgcctacatcggcacccctggcaagggtatccttgctgctgatgagtcaactggcaccattggcaagcgcctttccagcatcaatgtcgagaacgtggaggagaaccggcgggctctccgtgagctcctgttctgctgccctggtgccctccagtacatcagcggtgtgatcctcttcgaggagaccctctaccagaagaccaaggatggcaagccttttgtcgatgtcctcaaggagggaggcgtcctccctggcatcaaggtcgacaagggcaccattgaggttgttggcaccgacaaggagaccaccacccagggccacgatgacctcggcaagcgctgcgctaagtactacgaggccggtgcccgctttgccaagtggcgtgctgttctcaagattggccccaacgagccgtcacagcttgccattgacctgaatgctcagggtctggctcgctacgccatcatctgccaggagaacggtctggtgccaattgttgagcctgagatccttgttgatggccctcatgacattgatcgctgcgcttacgtcactgagacagtccttgctgcctgctacaaggctctcaacgagcaccatgtcctcctggagggtaccctcctgaagcccaacatggtgactcctggctccgactctaagaaggtgacacctgaggtgatcgcccagtacaccgtccgtaccctccagaggaccgtccctgctgctgtgcctgctgttgtcttcctctccggtggacagagcgaggaggaggccaccctgaatctcaatgccatgaacaagctcagcaccaagaagccatgggccctgtccttctccttcggccgtgccctccaggcgagcaccctcaaggcctgggctggcaaggtggagaacgtggagaaggctagagcggccttcctcgccaggtgcaaggccaactccgaggctaccctcggcacctacaagggtgatgctgccgccgacaccgagagccttcacgtcaaggactacaagtactgagttgcttctctttgcgatcccgttgttttggaactcctgcctgcgagtaggttgctgagtgttgtttgcttgttagagcttttatattcggacatgaaaaaaacatgcttcctatgtggatgatggttatctttatattcgtatatt

SEQ ID NO: 3851 - DNA, 1291 bp, Zea mays
  Clone ID: 700342975_FLI
acaccccgcttcacgttctcaataatggcgccgttcccacgtcgtcttccggccgccgtgccacttctcctcctcctcggcgccgcagtggccagcgccggcgcggaggacaccgatggcggcaactcccgccggcggcactcccgcttgctgttcgcgttcggcaactcgctcaccgacacgggaaacggggccatcttcccggtgactgcaggcgggccattcacccggccgccgtacggggagaccttcttcggtcgtcccagcggccgggcttgcaacggcaggctcgtcctcgacttcctcgtggaggagctgaaggtgccagagccgacgccgtacctggccggcaggacggccgccgactttgcgaagaacggggccaactttgcgctgggtggtgcaacggcgctcgaccaggcgttcttagcaagcaaggggataaagtcgttcgtgcccatctctctcatcaacgagacgagctggttccagaacgtttcgaagctactggacgcgtcacactacgacgagcgtaagatcatggcgaagtcgatcttctacgtcggggagatcggtgtcaacgactacttcgccgccctaagcaacaacgactccgtcgacgtcgcggtcagcctggtgccgcacatcatcgacaccatccgttcggccctgaccgtcatgatcgatgccggggcgaggacagtggtgatcacggggatgctaccgatcggctgcgagccgcagcagctggcccagttcgcaggcagcccggccggcgactacgaccctaccaccggctgcatcacgcggttcaaccagctcgccgagcaccacaaccacatgctgaggatgatgctgagggagctgcggaccaagtaccgcaggcgcaggcccctcaccctccactacgccgacatctaccgccccgtgatcgaggccgtcgcgtcccccgcctcgtacggcttcggcgacaggccgctggccgcgtgctgcgggggcggtggcggccccaacaacttcaacttcatcgccttctgcggcacgccggcgtcgaccacgtgcaccgacccgtccaagttcgtctcctgggacgggatccacttcaccgaggctaccaacaggcttctcgctcgtaaaatgcttcaggaactgctaagccgtggagcttacaatgttgcaatctgattttttctatgcccgcgagtcgtatcaacgtgtttcccatagcggatcggagctagcgtggaacctcttgtgcaataaaaaaataagtgtcatcacattcctcgcc

SEQ ID NO: 3852 - DNA, 622 bp, Zea mays
  Clone ID: 700342991_FLI
ctggtatccctcctgatgccatggaaccagattcagctacttacaaaaagatctgctccttagctgcagaattcaaatctggaaaacttccaagtgaagatgaggtagcaaagtggagtgggcaagaatgggaactttacttagaaaatctaccagcagatgttgaagcctcacaggtcactgctctcgacgagcggtacaagctatctgaaagccgtgactacgaggtcaaagtggcgttcctccagctggcgatccccaccgggtgcaagtgctacttcaacgaggttgagaaatgcttgaagcaggtgggaaggatgaagtacctccgcccgctctacagctcgctggccaagtgctccagcgaggagaagatgctggcccagaggatattctcggaggctcaagagttctaccacccaatagctcgaagtgttgcggaggccattttgtcgaagcatagctaagcaagccaagactcttgcttagcgattcacggttgatctggtgactgctgctcagtttgcttctttcgcgtaaaattatcgtctgctctggaaaagaaacttgaggcttgtattgcatctttgataacataatattataatatatgtagagactc

SEQ ID NO: 3853 - DNA, 1250 bp, Zea mays
  Clone ID: 700343020_FLI
gtaatgatttctttgctctttttctggatccgacgatgacttactcttgtggtattttcaaggcggaagatgagagtttagaagcagcgcagctacgtaaacttgacaatctaattaataaggctaaggtggatccggggcatcatgtccttgacattggctgtggttggggctcattggcaatacgtttggtgaagagaactggctgcaagtgcacaggaattacattatcggaggagcaactgaaatatggaaagagaaaggtgaaagaatttggattagaggaccgcataactctcctgctttgtgattaccgtcaaataccgaacggccagaagtttgataggattataagttgtgggatgcttgaacacgttggccatgagttctacgaagatttctttgcctcctgcgagtatcatttggccgaacacggcctacttgtcctccagtccatcgcggtcccagaggaactgtacgacaaaatgaggacgaagcctgacttcctgaaggaatatatcttcccaggtggctgcataccttctttagctcggattgcatctgccatgtctaatgcatcaaggctgtgcatacagcacgttgagaatattgggtaccactattacccgactctgattcactggagggagaactttgaggccaatgaagaaaaagttttggccctaggatttgatgaaaaattcatccgtacttgggagtactatttaaactactgtgcagctatgttcaaatcacacatgggtttagattaccagatagtgtttgctcgcgcaggcgatgcaaagttgccgagctatgtcgccattgcgtaaatggaggaggatgtcgatgtttatgtgagacagaacattgtattttctttgttagttaggaagtccaacattcgccaaataaaaatggtttgctagagatgactcgagggtgagacagtgtcaaagcctcatgatgattaggttatcaacttccgaaagtttttcttggcggggcaaaggtttcctatgatcctttttgtattgaatgtgataaagaagtttaaggttaagtttcatcatttgaatcctttgtgattttctttttatttttttgtgtgggtacgcaaagtctcaaaaggtagaagttaactagaacatgtttgtgcatacgtattgggtgcacattcaaccgaggaaggtgtctgtgtgtggtgtaaccttcacatgtcagttcagggtttataccttttgttggct

SEQ ID NO: 3854 - DNA, 870 bp, Zea mays
  Clone ID: 700343036_FLI
ggaaatcagaaggttggcgagcaacaattgtgctgagtttctagagagctaagttcttgctgacaaggtacacttaacttaggtgggcatgaagtgaattgaaacatcattccagacaaggtttttcttcctatactttctgtcaaattaagcttgtagtttgatatgatctgaactctatgcctgcctttctattcttttcattgattaactgtttggatccattaaaagtcaatgaaacatgtgattcgaagcggtttcgaaaggtgatgcaggtgtgaagtttgcatagcatcgataggccggaaatcggatttgaggcatgtctagtatcagaatccttcattcattccttaagaattaaaaatatgctttggtatgtttattttgtgccttttggtcctaatttctttttgacaggacccaatgatatgccgctggatggaaagttcatcatttcatgcctatggtcggtttgctcgtgaagattgcttttgttcgctgtggaagcgggtgcaagtattacacagcagcaatatcggggactgttgtgaatgatgaagttgagagtcaacatctgagaaccatggaggtcaccatacgccacaaaggaaccaagctgctagtttaagcatggttaagagagtcagtgctggtcctttaggttaaataaaaactttgcggggccgcacagtgtgcagaaaaggttgagtctagggcactaggctgatggtctatgtatgtggtgtacgcagataggcagatacctatgcattcaaagtagtgcatcaaattttggccccattattttcactgcagtaccatgatgtgatgttggtagtagagatagagcaagtatgatactccctc

SEQ ID NO: 3855 - DNA, 585 bp, Zea mays
  Clone ID: 700343054_FLI
ccgtcggttcacttctccaggtaaggaaagggttcgtactcatggcgccgccgcagccaaagtcgggcctcttcgttggcatcaacaagggtcatgtcgtcaccaagcgcgagctgcctccccgcccgtgccaccgcaaggggaaatcaacgaagagggtgtctatggtcaggggcctgatcagagaggttgctgggtttgctccttatgagaagcgtatcactgagcttctgaaggttggcaaggacaagcgtgccctgaagcttgctaagagaaagcttggaactcacaagagggcaaagaagaagagagaggagatggcgggcgtcctcaggaagatgaggtcggctggtacgcacactgacaaaaagaaatagagagcatttcaagttcatggagctggctgccagagattatgttccagtgtctgattttccatacatgtagaacctaatagacatgtcaaagtattatgtatcgaaccagctcatgggattttgctccttccaatgcatccagggtttatgtatcgaaccaatttatgggatcttgctcttattctaatgcatccatggtttgtgaatc

SEQ ID NO: 3856 - DNA, 945 bp, Zea mays
  Clone ID: 700343072_FLI
aaaggagaactgctttaaggaaactactacaactacaagaaagaatatatttcaaaaccaacaaggatgtggcccaactgataaatactaattgtagtaaaagccaaaatcaccatttgagatagtataaaactaagcacaacaataagttaccgttacagcacggctcctggatttaggcagttgtccaagaaactcttggaaagcagtaatcctcactctacccttgatctcaacaaagcggcaccactcatttgttgatgtcttttcaccactgcaaagtagaaacattaggagttaggatatgataacagaatgttaagatgtgtgttttggggagggccctcacctcaaccaagtaaccaacatcaaaactgaccaccatgcattggtccagtgtggcctatccttgtgccaatgaatctaacaattctttttctgggatgcacgtggtctgaacaggcctgatcggcggaactcagctcatgacggcattatgtctgccaatgctgacataggatgtttacatgagacaagcttgttcggctgactgcagtcgtagctgcaatgtatagagataaaatactgtagccgcagcgagcaagctgtttgagagcaactacgacaactacatcaatttgccggctgagggaaccagaggacggatcattgtcacctggaagagatcgatgtgtcaagccatcaccagtagagtggataaatactcagcctgaattcagtttgctgaacaggatggtcgcaattagtggttcacctgagtttatgttcctcagcttgaaacagaattacagataaaatcatttttcctgcaagaattgtgtgatatcagagccctgcattctggcccttggctgttagtgggggactacaatctcatataccaggctggacaaaagtaatgataaacctgaatcgtgtgctttg

SEQ ID NO: 3857 - DNA, 610 bp, Zea mays
  Clone ID: 700343081_FLI
ggacaagaaggaagccgaggcggtgacggtggccaccgagccgaaagggaggaagaggggcaagaaggaagccgaggcggtggcaccagcggcagaggaggaggatggggttgatgtggcggctggagcgaagcgtgtcatcgtcgaggcctgcactcagtgcagacagtttaagatccgagctcagaaggtgaaggaggacctggaaagttatgtttcgggggtgtctgtgataatcaaccctcagaagccacgccgtggttgccttgagatacgtgaagaaggcggcgaagtgttcatatcactgctgaacatgccacgccccttcacaccaatgaagaagctcgacatggacaaggttatcaaggacatcgccaagaagatctcctaaatcatgttggctggctatggcttggcggcaccattttgtgattgaaatattcaatctaagatcgtaatcttcaaagggtacggtgtaccttaggtgtaggtcccaatcagtggcgtttcctattgcattggccatgtgcccatgtctcgtactcgtacctatatgcttgtgctgcattgctggggcatatcattttctgttatatgatatatgccctga

SEQ ID NO: 3858 - DNA, 572 bp, Zea mays
  Clone ID: 700343101_FLI
tgtagctgcaggtattgctggaggcactggtgtcatgcctggaggtaatgtggggcaggaccatgctatcttcgagcaaggtgcttctgcaggaaatgttggaaatgagaaaattgtggagaagaagagagctaaccctgttgcactgctgctgtcttctgccatgatgttgaggcacttgcaattcccatcttttgctgaccggctggagacggcagttaagcgtgtcattgcagaaggcaagtacagaaccaaagatttgggcggcaccagcaccacccaggaagtcacagatgcggtcattgccaaattgggttagaaaccaaccgtgtctttaatacaacttttttttatctcttggactaggtaactagtcctgtcaaaacatttgctcctctcgtaggtttagttcaccattttgttcggcaaatccttgtacaatcttcaggtatctcgtttctgaccaggtttgggtttggggtaactgagcaaactcagtattaaattttacgcaaatttttgcgaccttaattcttaactggaaataagagaaatatggaacagttctcttt

SEQ ID NO: 3859 - DNA, 828 bp, Zea mays
  Clone ID: 700343105_FLI
gagaacacgaattagattagatatattttcttcattattaaagtttctaaagattatgcagacattgcaactggatgtgttttatatgctcgttattgctagttgaagaaaagaatagatatgtaaagaaaccctacatagttggtaactccaattgtgtacaagatagtggaaagggtgagaggcaagtaattttgcaatttcttaatttttgttaggttctgattcaatcagtgtttggggtctctttctctgtcgaaggtcctaatgacgaagaaattgcctataagcaatgagactgaatgccgaagctataacaagcatgcctggagcgccgaaggaaggcaacttcggctcaaggcggttacgaaggtcaaacacgatgttgagccgaagaggaaaagactcgtttatccctaatgtttgtattagaattatgtgtatatgtcagggtcataaatgtatttttacccggcctgcgtcccatgtctataaatagatgaacagtacatggcgtacttctcatgatgaatggagattgcactctcactttcacctttgagcaaaccgaaggtgatcaagctgcgtcacctttggcaacgaagctagtgctcccaatcacaagtggtttaagctctgaacaagccaataagaagcaaaagaaggaagcacaaagaagagtacagcatgttggagtacaaggacccttcatcaagtacaaatggtcccatgtgccgattacattttctcaggaagaccttcagcttaaggattaccctcacaatgatgccatggtcatatcatgtgtgagtaaagggttctttgttc

SEQ ID NO: 3860 - DNA, 917 bp, Zea mays
  Clone ID: 700343123_FLI
gagagaggagagggagggtttcctcaaagagaacccgaacccaaacccaaaccgaagcagagcacactagcgttccctcaccagggcgtccatcccagcagccatggcgatggcgtacaagatggcgacggaggggatgaacgtgaaggaggagtgccagcgctggttcatggagatgaagtggaagaaggtgcaccgcttcgtggtgtacaagatcgacgagcggtcgcgcgccgtgctggtggacaaggtgggcggccccggggaagggtacgaggagctcgtggccgcgctgcccggcgacgactgccgctacgccgtcttcgacttcgacttcgtcaccgtcgacaactgccagaagagcaagatcttcttcatcgcctggtcaccggcggcgtcgaggatcagggccaagatcctgtacgcgacatcgaagcaaggcctgcggcggctgctggacggggtccactacgaggtgcaggccaccgacccctccgagatgggcttcgacgtcatcagaggccgcgcgcaatgaggcccccgctgcgctctgctcctatttacgtacttacctgtgcgtgggcgtgttctcctactactcactgctcagtagtcagtagtcatctgcgttcgtgtgtgtgtgtgtgtgatcggccggatgctaattggcgttggtgtgctcccgtagcgatcgatgctgccaatctgacgaggcttcgcgtgtgtttgctttgctattttcggttctcgggagagatggtgcaggcgtggtgtgttgatgttgatgggtggagtagaagctcaggggagtggcagcggactaatgaaacgtccacctctgcgacgtagaattccactgaaaaaaaaatgctccagtgtaccataagctgcttcagatttgatcgtgttttctctcc

SEQ ID NO: 3861 - DNA, 1560 bp, Zea mays
  Clone ID: 700343143_FLI
gtcctcctcccttccccgcaggccccctcgcctcgcgcgtgcgccccccctaccccgtctcctccctgcctgcgcgagcgactagtagaaataggcgcgcgtgccgcctcggccgctcgctcctctggttaatcccccctcgccacgactcgcagccatcccttcacattatccgcgcgcgcgcgagcggacgtagcgtgtgggtagcgtcgccgtgcggacggtctcttggtgccggtgcgggccgcgtgacggtgcgtgtgccgcccgcggggaggaggtcgttcggttggttggccctcggcgacgatggcggtccacggcggagaggcggtctccgtcgcgctcctcttctccctcgctttcttctgcgctcgcctcctgctcgaccgcctcgtctacaagccattagcagtctaccttttcaacaccaaagcttctaagttgatgaataatgaggccaggcaagcaaagattgtcaagttctcagagtccatttggaaacttacctactatgcttctgttcaagcatgggtcctcatgataataaagcaggaaccatggtcattggatatgatgcaatactttgatggctggccgaaccaacccatcgtgtcttcattgatgcttttctatatgtgccagtgtggattttatatctatagcatcggtgctcttgttgcttgggaaacccgcagaaaagattttgctgtaatgatgtctcatcatgtaataacatctactctaattggagtttcatatctgactggatttttccgaattgggaccatcattctcgctcttcatgatgcaagtgatgtgtttcttgagactgccaaattgtgcaaatacacagaaaaagagctgggtgctagcttgttttttggtctcttcgctatctcctggcttctattgcgtctgatttacttcccattttggataatcaaagcctctagctatcattccatcacattcttgaggaagctggatgaattcccaacaactttgtactacatcttgaacacaatgcttctcacattgcttgtattccatatgtactggtggaaactcatatgtttgatgataatgagacagctgaataataaaggacaagttacagacgatgtccgatctgattctgaggatgaggagtaatgggagattcattctttgacatctgcaacgtggcatttcctcgtcaatacttttctatgcctgcttccagaattgattgcttttaatcttggcaagtctcgggaacgtataggaaagtttaatctctgtatattgccttatgatatcaaacatggctagaccgggaatggatctatacatgatgacgggcatagctagcaagcttacttcaaggttccttaaaaaattttggttcacctttatttgatatggggaaagacatgagagggtgtacagctttttcctgaagcttgcagaacccccctctgtaccatgatcaatatacttcacttgtgagtagatttagttctaattgatgataataaattgattcttttgattgggaatgaatctcacctgaacctt

SEQ ID NO: 3862 - DNA, 1335 bp, Zea mays
  Clone ID: 700343146_FLI
atcaaagaaggacagatgtccttctcatgttttacaagtcattgaagaagagcttaccaagcttcagcttttagaagccagctctagtgagttcagtgtaactcgtaattatttggactggctgacagtattgccatggggaaattatagtgatgaaaactttgatgtccaccgtgctcagaaaattctcgatgaagaccattatggtttgagtgacgtgaaagagaggatactggaattcatagcagttgggaagttaagagggacttcacaaggcaagatcatatgtctttctgggccaccaggagttgggaaaactagtattggtcgttcaattgcacgtgcactgaaccgccagttctacaggttttctgttggaggtttggctgatgtggctgaaatcaagggccatcggcgcacgtatgttggtgcgatgccagggaagatggtgcagtgtcttaaatcagttggaacagcaaatcctctagtattgatagatgagattgacaagcttgggaagggtcattctggggatccagctagtgcattgttggaactccttgatcctgagcagaatgttaatttcttagatcactaccttgatgttcctattgacctatccaaggttctattcgtttgcacagcaaatgtaatagagacgataccaaatccgttattggataggatggagatcattgctatagctgggtatataactgatgagaagatgcatattgctcgggactatctagagaagaatacaagacaagcctgtggcattaagcctgaacaggttgaagttacagatgctgcccttcttgctcttattgaaaattattgtcgagaagctggagtgaggaaccttcaaaagcatattgagaaaatttaccgtaagattgctctccagcttgttcgccaaggggtatcgaatgagccagaccaggagtctctcggtgtcactgtaaatgaggaatctaatagtggtgatagcatcacagcaaaagatgagattgtgaaggatcctgctgtagaagatgcttcagtcgccaacaatgttacaaatcctgcctctgaggaagctaatgaagtaaatttgacaactgaagcaccaaaagaagacagcacatctaagggcaacaagaaaacagatggagtagcagaagatgcagcagacaaggcaactgagaaggttgtggtagattcatcaaaccttggtgattttgttgggaaacctgtgttccaggctgagcgtatatatgagcagactcctgttggagtggtcatgggtttagcttggactgctatgggtggttctactttgtacatcgaaaaaac

SEQ ID NO: 3863 - DNA, 1223 bp, Zea mays
  Clone ID: 700343159_FLI
gtgaggcagtatttatcccggcaggatgtccccacctagcttctgttcaaatgtccaaggctcgactccatattcttccttaagctaggtgaggcagtatttatcccggcaggatgtccccaccaggttagaaatttgaagtcttgcataaaggttgcactagattttgtttctccggaaaatgtccgagagtgcatcaggttaacagaaggtttccgtctgctgccgaagtggcataaggtgaatgaagataaactcgaggttaagaagatagctcttcatgcattcaatcaagctattaaagatatcactgatgaatcatctaatagcaatgaaagcaaatggatccggagatagtgaggatcatgaaggccattgaatccatgcttgatgtcatggaagttagaacaacctgcattcgacatcttgctatcgagaacctgaatgaaaaccgtagtggcttatcggatgccgacaagataacaaaacctgattttagtgtattatgcatgatattagtaccttatataatacgtagcttggagaaaaggccattcaccgtttctcattgttgggaggttctaaagaatgaagccaaatggttacacttggagcagggctcacaaaatattgatgtgctggtgaacaaaggtgtagggttttctccaagatgtcggatttgacactgaagaagattgagtattggaagaggtccgattgaacatttggcactgacattcaccaacttgttcaaatagaggaaaaggatatggaaatggagaaagagcgcatgtatgcatgtgtaggtcagggagtggctcggatcagccttgagtcaatttccactgcgttttcttcggttatggatgagcacgaggagtaaaagaaacagaagaaggctgagtgtgattctcatatgcttattttcttgtcctgtgtaatggatgtgtgtatgtgaaccatatgcgaacttaaacgtctttgtttgtaccggtcaggccattctgagtgagggttccgtctcttctttttaggactccactgcgaggtgtcggtgtgtgagaaatggtgcaaacaagtttctgagaaatggtgcaaacgtgtgtatgaaactctacgaggcatactcttacctagtattgtgtctagtgaaaaatgggacacatccgatgctactgtaaactcacttgttgcactcactttttgagttggatttttctttc

SEQ ID NO: 3864 - DNA, 650 bp, Zea mays
  Clone ID: 700343176_FLI
ggctttgccatgctgcttatggatctttccggaagaaggtttttgctgctaggcacaattccaatcttgatagcatctctagttatcctggttgtgtccaatctaattgatttgggtacactagcccatgctttgctctccacagtcagtgttatcgtctacttctgctgcttcgttatgggatttggtcccatccccaacattttatgtgcagagatctttccaaccagggttcgtggcctctgtattgccatttgtgcctttacattctggatcggagatatcatcgtcacctacagccttcctgtgatgctgaatgctattggactggcgggtgttttcagcatatatgcagtcgtatgcttgatttcctttgtgttcgtcttccttaaggtccctgagacaaaggggatgccccttgaggtcattaccgaattctttgcagttggtgcgaagcaagcggctgcaaaagcctaatttctttggtacctttgcgtgcaactgttgcactgtaagttagaaacttgaaggggtttcaccaagaagctcggagaattactttggatttgtgtaaatgttaagggaacgaacatctgctcatgctcctcaaacggtaaaaaagagtccctcaatggcaaataggagtcgtt

SEQ ID NO: 3865 - DNA, 1832 bp, Zea mays
  Clone ID: 700343209_FLI
gactagttctagagcacagcctctctacattcagtgggcacatatcacgtctgcgcaagattgtagaaatggtatcaaaagattctctagttctaattgatgagattggcagcggcactgatccagctgaaggtgtagctctttcaaccagcattttgaagtatcttgcaagtagagtgaatttagccattgtgacaactcattatgctgatctaagtcggctccagtcagttgataaccgattcgagaatgctgcaatggaattttgtgtagaaactctacaaccaacataccgaatcttatggggcagtactggtaattccaatgcacttagcattgcaaagtcaattggttttgatcaaaaagtgcttgatcgcgcacaagaatgggttgagaaactactgcctgataagcaaaaggagcggcaaggtttactttatgattctctcgttgatgaaaaagaacttttggaatcccaggcaaatgaagctgcatctgttctttcacaggttgaggggttgtacaatgagattcgcttggaagctgatgatctcgaaagcagagtagctgcattgagagcaagagagacccaaaaggtacaacaggaattgaaggttgtgaagtatcggatggacaccataatcaagaactttgaagctcagctaaagaattcaaaacttgaacaatacaattcgctaatgaggaaagcagaggctgccactgcttccgtggttgccgctcatcagccaagcgaaatagctttcgatgatgacgatgaaaaccggatctcgttcgtcccacaagttggagacaaagtgtatgttcaagggctgggaggaggaacgatggctaccgttgtcgaaactctcggagaagatgagagctgtatggttcaatacggaaagataaaggttcgagtcaagagaagcaggataaaactggttcaaagaggcacaaataacgaggcaacaacttcctcttctgtaaaagcaaagggccgaacaccgaagcagcgatcggcaacgacgacggacgtctccttcggccccgtggtgcagacgtccaagaacacggtggatctgcgcggtaagcgggtcagcgaggcggccttcgagctccgcatggccgtcgacgcgtgcaggccgtaccaggtgctgttcgtggtccatggcatgggcaccggggcggtgaaggactgcgccattgacgtcctccggaagcaccctcgcgtggccaggttcgaggacgagagccctctcaactacggctgcaccgtcgcctacatccagtgaacgggtgggtacaggcagactgtttggaactgaacgcagacatttcagtacagaaatcagtttggttttgccttgcctaccagctcccagcgtgtccttgtcacagttgccgaatgccagttgggtgagctttttgctagtagctgatctgcgggtggatcggataaatggccttggcagttgtgatcagttcggccggcgtcctatgcattggcatcgcaaaatcaccagcggaagcaaggtgtgcgtgcacatgcgcgcctcttctttccagcaggattttgtgtagcgagggctgatgtggccaggttcgtgatgagccacgagacaaaatactcgtggctagtcagctcgttcgacttgttttagttttgtcacaagttaagctagcatcttagctcgatttgttacaagccagctcgagctaagcttgttagctcgaatgatctagcatttgtaaggataaactaataagtgataaactgtattaattaggtgttgtatttatgtggtatatgaaattacaagtactattactct

SEQ ID NO: 3866 - DNA, 1368 bp, Zea mays
  Clone ID: 700343230_FLI
caagttccttctgccaagcacaacacagaccatcgtctgcccgcccaactgcacccgccgccgtcgcctcccaaaacccaaccaaaccctagattcgccgccctcagctccggtcagaccctccccccttcgaagatgccgaacctcgagtgccggatgtatgagcagcggttcccggaggtggatgccgcggtgatgatccaggtgaagcacatcgctgacatgggcgcgtacgtctccctgctcgagtacaacaacatcgagggcatgatcctcttctccgagctctcccgccgtcgtatccgctccatctcctccctcatcaaggttggtcgccaggagcccgccatcgtgctccgtgtcgaccgcgacaagggctacatcgacctttcaaagcgccgcgtctccgaggaggaggcgcacgcatgcgaggacaggtacaacaagtccaagctcgtgcactccatcatgcgccacgtcgccgagacgctcgaggtcgacctcgagccgctctaccagcggattggctggccgctctaccgcaagtacggtcacgccttcgaggccttcaagctcatcgttgcggaccctgacgctatcctcgacgtactcacctatgaggaaaaggaggtcggcccagatggccaggaggtggctaaggtggtgcctgctgtcacccccgaggttaaggattcactggtgaagaacataaggaggaggatgacaccgcagccactcaagatccgtgctgatatagagatgaagtgcttccagtttgatggagtgctccatattaagcaagctatgaagaaagctgaagctgcaggcaatgataattgtcctgtgaagattaaactagttgctcctccactttatgttctgaccacacagacccttgacaaggaccaagggatttcagttctcactgatgcagtcaaggcttgtacagcagagattgaaaaatacaaaggaaagttagtagtgaaggaaccaccaagagctgttagcgagcgggaagacaagctattcctcgaccagattgattccctaatggaacaaaacgcagaggtcgatggtgacgtggacagtgaagaggaggaagatacaggaatgggcaacgttgatcttacaaattctggcgtcactgcttactaaggcaacactggttgatttgaatgagatttgctgtatagcaccagctatgatctaaaccgttctgttttgaagcagtttctttttgttatgttttgatggttgaaatctcgttgaattcacagaaacttacctgaggtgttactgttttgggctcagccagtgttggggtagcttttacttgtgtcaagaagcaccgaatttttcctgggagtg

SEQ ID NO: 3867 - DNA, 440 bp, Zea mays
  Clone ID: 700343255_FLI
cttcaggacaaaatcaataattggagggccacagctcttattttgacatccatccttttcgctgctgttgtgttctggttcattggcatatttatccccagcgtcgatcgtttcaatgaagagagcgagcatggccttactgtcgccgagagatcaaatctcaggccgctccttgatgaaaaggacgagccacggacatctgactaaaacctacgcaagtcataaccttttatttcttggcttagtccgtagtttttcccttatgccatcaacatgtgaaatgtaaatttgcatgcccattggctgtacctgtacatatacgaggtttgttcgttttgcgttattcttttacttttttttgtacaggctacagaaacaagcaaaagagtgctagaattcctttttttacgaattaaaacattttagaatttctttttacg

SEQ ID NO: 3868 - DNA, 1541 bp, Zea mays
  Clone ID: 700343282_FLI
agagactgaatatatgcgcttgcagagacacaagatgggagttgaagattttgaacttttgactattattgggagaggtgcattcggagaggtgcgtctttgtagagagaaggtctctaagaatgtttatgcaatgaaaaagctcaagaaatctgaaatgcttcgtaggggccaggtagaacatgtcaaagctgaaaggaaccttcttgctgaagttgatagtgcttacatagttaagctctattattctttccaagacgaagagttcttatatctcatcatggaataccttcctggtggagacatgatgactttacttatgcgcaaagacacactaacagaagatgaagctagattttatattgcagaaactgtgcttgccatcgagtctattcacaagcacaactatgttcatcgggatatcaaaccagataatcttttgttagatcacagtggtcacctgaagctttctgacttcggtttgtgtaaacctttggacagcagtaatttccctaatttgaatgaaccagattatatgtctggaaaagttaccacacctttgcctgataccactcggttaagcaacccttctgcaccgaggcgtacacagcaggagcaattgtcacactggcaaaagaaccgtcggatgttggcatactcaacagtcggtacacctgattatattgctccagaagtgctactgaagaaaggatatggaacggagtgtgactggtggtcccttggtgctattatgtatgaaatgctagttggttaccctccattttattcagaggacccaatgtctacttgcagaaagattgtgaactggagaagtcacttgaaattccctgaagaggcaaagcttcctcctgaagctaaggctctcatcagcaagcttttgtgtaatgttgagcatcgacttggtacaaaaggagcccatgaaataaaagcgcatccatggttcggaggtgttcagtgggagaagttgtatcagatgaaagctgctttcataccagaagttaatggagagttggatactcagaattttgagaatttcgaggagattggaactcaaattcaaagttcatccaagtcaggcccttggagaaagatgcttccatccaaagatgcaaactttgttgggtatacgtacaagaactttgaaattgtgaatgatgatgaagtggcaggaattgcagagttgaagaaaaagagttccaaaccaaagcgaccaaccatcaagacaatgtttgagaggatggacgaagaggagcctgttcaagggagtttcttaagtatgttgcccccggagggccaaccttcgtcccactccagcgttccacaggaaaaataccaacctcgccgtaaataggatatggaggtttggaaagtaaagcataggaaagtaaaacaagaaaaaaaatcgtctgctgccttttgatctgttccctgtctaggttttgtaaatcctaaccaatgcgttctttagtcaaatgcttaaaaaaatctctccggcaaaatagtgtattgcatttgatgtg

SEQ ID NO: 3869 - DNA, 1582 bp, Zea mays
  Clone ID: 700343285_FLI
aaggcgtccgaaatccctgagctcgctgtcatcaaggacctgcatcttaggacggttgatgagctcggtttagataggtcgattgtttcaggtttattggatgaattggagcaacttcttaaaggagttgctatgatgaaagagctgacccttaggacaagagattaccttgtttcctttggtgaatgtatgtcgacaagaatatttgctgcatatttgaacaaacttgggaaaaaagcacgccagtatgatgcatttgatattggctttataaccaccgatgatttcacaaatgcggatattcttgaagccacttaccctgctgttgcgaagaggctacatgaagactggatggatgaccctgctattcctatagtcactggttttcttgggaagggatgtaaatcatgtgctgtcaccactttaggcaggggtggtagtgacttgacagctacaaccattggcaaagccttgggattaagagaaatccaggtttggaaggatgtagatggtgtgttgacatgtgatcctaatatatatgcaaatgctatacccgtgccctacttgacttttgatgaggctgctgagcttgcctactttggtgcacaggttttgcatccccagtcaatgcgaccggctagggatggtgatattccagtgagagtaaagaactcatacaatcgtcatgcacctggtactgtcatcactaaatccagagatatgagcaagagcatattgactagcattgtgttgaaatctaatgttaccatgctggatatagtgagcacaaggatgcttggccaatacgggtttttagcaaaggtattctcaatatttgaagatttgggcatctctgttgactgtgtggctactagtgaagtcagcatctcgttgactctagatccatcaaaactatggagtcgtgaattgatccagcaggaacttgatcatgtcgttgaagagcttaaaaaatttgcagttgttcatctgctgcaacgtagatcgatcatctcactgatagggaatgtacagcgatcgtcattgattcttgaaaaggcattcaacgttctgcgaagaaatggtgttaatgtccagatgatctcacaaggggcgtccaaggtgaacatttccttggtagtcaatgacagtgaggcaaaacagtgcgtacaagccctccattcagcgttctttgagaatggcttcttgtcggaggtagagggagctgaagttccccagaacggagcctctctgaactcaaatggtgctgtctatggaaactagtcgactctgcaactgctttcttcagaatttgtgtaccattggtaggttgaatggtggtgattcatagctatttatttagggcatcagtcatgttggtgcaaattttcttgatgtgttaagagcttactaccagaacagtctgcatggtataccgtgcgattgggtgctaccaagtagtagccattgtcaatgtcttggggatttgccacatgtttaaggcatacccaggcttatatgtatctgagttgtattgtatgtgagaactattaagagaattgcttgcaccctttgggtggtgatt

SEQ ID NO: 3870 - DNA, 2427 bp, Zea mays
  Clone ID: 700343286_FLI
ctggcgagagaaccaaaccggaatgtgtgacgactgacgactgaggtctgacgaggcgtaaacctcgctgactcgccctgccgccgccccgccccgcccgcgcgttctccgccgtcgtccccggaaggtttttgcctcagggcatgtggatctgttagttcacctgctgcaagcaagtatagctatagggttgaccagtgcagaagtatgaatccttactttgttgggattcttgtccccgtcgcggtctccctgctgctccgcaagaggagaaaggcccaaaggatgaggggagtgccagttgaggttggtggggagcctggatatgcagtccgtaactatcgttttgaacaacctgttgagacacactgggagggggtgtccacacttgctgatctgtttgagcaatcttgcaaagagtatgtatacatgccactccttggcacaaggaagctcatttcaagggaaactgaagcagcacctggtgggagatcgtttgagaagctgcatctgggcgagtatgagtggaagtgttatgcagagtgcttcaagagcgtttgcaacttttcatctggactaattagagtaggtcaccagaagaatgaacgtgttgctatttttgctgagacacgggctgagtggcagattgggttgcaggcatgcttcagacaaaacattacagttgtcaccatctatgcctcattgggggaggaagctttgtgtcactcactaaatgagactgaggtcactactgtagtttgtggtcagaaagaactaaaaaagttgattgatataagtgggcaacttgacactgtcaagcgtgttgtctatatcaatgaggaaggcatctcaactgaagtttctttagctcaaaactgcactagctggatagttgaatcatttgaggaagtaactaggttaggagctgaagcacctgttgaagcaaacatgcctctaccttccgatgttgcggtgataatgtacacaagtggtagcaccggattgcccaagggagttatgatgacccaccgcaacgtcctggctacactctcagcagtcatgaccattgtgcctgcacttggcagtaaagatatatacttggcctaccttccacttgcacacattcttgagttggcagcagaggcactaatggctgctgttggggcctcaataggatatggatcacctttgaccctgattgatacatccaataaaataaaaaagggaactctaggtgatgcttctgcactaaagccaacattgatgactgctgtacctgctatacttgatcgtattcgtgatggtgtcaggaaaaaggtggatacaaagggtggtatagcaaagcaattgtttgacattgcctataaccgtcggcttgctgcaatcaatggaagttggcttggtgcctggggactggagaaactcttgtgggatacacttgtgtttggaaaggtgcgtgctattttgggaggaaagattcggtttgtactttcaggtggagcacctctatctggagatactcagagatttatcaatatatgccttggggctccaatagggcaaggttatggtctgactgaaacttgtgctggagggacattttcagagtatgatgacacatctgtcggtcgtgttggtgctccactaccttgttcgtatattaagttgattgactggcctgagggtggatacttgactgctgatttaccaatgcctcggggagaaattgtcattggaggtccaaatataactaaaggctatttcaagaatgaagctaaaacaaatgaagtctacaaggatgatgagaaaggtatgcgatggttctattctggagacatcggacggttccatccagatggctgccttgaaatcattgaccgtaagaaagatatcgtgaagcttcaacatggcgaatatgtatctctcgggaaggtagaggctgctttgattgtgagcccatatgtggagaacattatgatccatgctgatcctttccacaattactgtgttgctctcgtggtggctgcacacattgagctggaaagctgggcttcgcagcaaggaatcaaatacaacgatttctcagatttgtgccagaagcaagaggctgttaaagaagtgcttggatctttagcaaaggctgcgaagcaagcgcgacttgagaagtttgagataccagtcaaaatcaagctgataccagagccatggacccccgagtcgggactcgtcactgctgccctcaaactcaagagggaggtgatcaggaagacgtacgagaacgatctggctgagttgtacgcatgatggttctactctttttgatacgtttagtgtggaaaatgtgtagagtgtcaatgtcacgctgagatctatggtaatttgataccgattatcgttctgggattattattattattttgttcagtt

SEQ ID NO: 3871 - DNA, 905 bp, Zea mays
  Clone ID: 700344060_FLI
aacaagagcgcctaattccgcacctcttgtgaaaactccacttcactcaaaacatctagcactaatgtgaaggccattttttgagcctgctggactggaccccgttgtgttcttccgatgatcaatcagtcaatcacaaattcaaaccatacaaatcaacagctcaatatccagcgtgcttttggaagtctgttcaaggggtggagtgaggagaagatatattttgctcccacatacaagtactcttgcaattcagattcttatgctggagagactgccacatcaaagaaaaagaggagaaccccagcctggtgtgaaagaatactatggcatggagatggtattgcacagttgtcctacttccgggggggatctcaattctctgaccatcgtcgtgtttgtcggacatttactgttgaggttaaaaggctagatggccgatcaatgcggcgcccatcaaacaccaacattagaatcgatgctgaagagttgttaccgacaagagacaagcataactaaggtgatctagatggatgaaattgtcgacaaggccattagcatcatgcaggttacctcaaagcatctcatgtatatccgcaaggagaagctgcacccagggaaggcattgagtgcaatagaggtgaaggaactgcgcgaagcccttgaagcgattgctgaaggtttggaccaagattcactcttgtgccagagtttggcgtagtactcgattacaaactgtgtactatgttaatgtaatgacatagtttgtatgatacagatcgtagtgatgttgtttgaagctgtttgtatgaactgtttcctactatcttgtatgaattatgatgtctgatgtagtttgtatgaactatgtcatattatgttgaatgaagctattgcatgccctt

SEQ ID NO: 3872 - DNA, 1696 bp, Zea mays
  Clone ID: 700344115_FLI
gtgatcttcttgaagaagtttcagacagcgcagatagcgcaaaacacccgtcggcaagtaacattaacaaaaccgaagccgtagaaaagtactcagcagtggacaacagtcaagtgcagaacgcttccaccagttcggctgctaagccagcgacaggcagctcgagcatgatacagatacacccagtgagacccgcggaagaagacagcactaccgaatgcgacagtggtctcgacaacgccagcactagcagcttcgagttccacggagtggagaaggcgacggcggcgacgcagaatccagcagccgggtacttgtccagacagacttccatttcctccaagtggaatgacgcagagaaatggatcgtgagccgccagaatgtcagtcagaacaacgtcgccaagggcgcgttgcagaaccagacagtaaaccagatgagctccgccgcagccaggggcgccgttgtgcccaaaatctctgctcgtcccgtgcagaaaatgaagagagtgaatccagctttgtctgctccgcgcagcatactggagaggttgtccttcgcttcgtatcagcctaagttggttaggcatgcagatgtctgtccagttagtaacgctggtgctaactcagagcatcacaaggcaactgatactggttcatcgattgaagtgaagccctgcaacgatacgaatgatattccaacagtccagtcgtcggtgtccgtgagagatgtgggcacagagatgactccaatacctagccaggaaccttcaagaactggaactccactagggtcaaggacaccaactcgaagccctaactgttcagtaccgtcaacacctgtaggggggaggtcaatagcatctcctcctggagaagactgcacagacgatggcccatttttccacaggaaatgcggcgtacatgcaaatgaattgtcagatactgagacgaggcttaaaacaaggcaagaaatcgctgcgcttggcatacagctaggaaagatgaacattgctacgtgggccagcaaagaggagctagagctagtctctgcggcaccgagcatcgctgatttggagcgcatcaggaaggaatatgctgctcgtgctgcatcgtatgaggaggcagaaaatactaaacatacagcaagattcaaaaaagaagaggtgaagattgaagcttgggagggtcgtcaaagagcaaaaattgaatatgaaatgagaagaatagaggaatttgctgagagaatgagaagtgaggccatggaaaagatggccgaaaagctagagatgacgcgccgcatagccgaagagaaacgagcttcggccaacgccaaaatgaaccagcaagcagctatagcggttcagaaggccgagaagattcgccaaacgggacgagtcccaggatcgagtatcctacgctgcggtggctgcttctgtggaccgtagtagatcatacataggattcgacagctagtatgttggtctgggatatatagtggtgggaaacctgaactccaccctctacaagtcagcattccttgattttagcatgaaaaaaggaatgtctctaaggtattcagatgcaaacgtgttcttgtttgtcatgtatgtaaattattccaatgattttaacttgggtcggtgtacaaggtaaccagctgttcgttggttaacgaagaagtcacgaatcgttc

SEQ ID NO: 3873 - DNA, 2033 bp, Zea mays
  Clone ID: 700344123_FLI
ctaaaatcttattgcacatttcataatattcttcattgtttgtgagattcctaccatccgtgatccttttatctatatgctatttctagaagatgatttttttcgtgatcccatagtaccagaagttcatctgactttagttgttttattcaatgtatactttcaagagctcatgcaaggtgtaaatcttactgcgagaatggtagccaagcttgaggagatcctgtggaggatgatggggttcatcgggtctgccagaggcctgacctgagctagaccatcgtgtattatttggttttatacaatgtttgcatcctctgcatctcatgctcttttctgttttcagcatgccttttgacattttttacattatttgctttaaaaaactatagccataccatgaataaatctgctgactttgtgactgtcagagaaataaaagagaagctatgctatatagggtaagttgctttatttttcttattattgttttctatcctgctggatatgtagtcatgacagttaaattatgtacaactatgattacaaacgggaatacaagctaggagttgagaccacaatccttatgaaaagttacactgtaagtatgtcgtcctgcttgcatttcttccatgttccttttctcactgtaagcttagtttttgtgatcagcttccagatagaagagttattaaagtagacactaaacgattccaacctcctgaatctctttttactcctgtaacacttccatttatatttatacataatggtattgtcaacagtacacatagtttccatcagtttgttaatagtgcacctttagattgaatgagcttcttgcagagcaccaaggattaggcattgaaatgtgtcgataaaaatattagaggaccacacatcattattatgcaacattgtctatgcacatgaacataattgtatcgatagtaagcccaccagcatgtttgcaagttaaaaatgtgaattaagaacgaattatcgtatcctgctatacttatgcaacctaccaagaattagggcattgtagaaaccatataaagtattgagatcaatttgaatttgtctgcctcatgattttttgatacctgacctttatgaaggtagaggacaacattaaggatgatcatagactaccaacattcttcttcagattaaatgttaaattcagtaatttaatttgtttcaggtgagccttcttcacatattgagcaacagtaatcatcttcgtggtcatggtggtgatgaccatgatgcgcctagaaatgcatgtgtgaaatattcaatatatgtcaccatttctattttcagtaatacaagattagctcatccatgatggcggaggttctaataagtaaccttatgattggaaattgcagtgataggttgtgtgtacgtgtctcccgtctgtgaaaattttatgatcccgaggatgagtataagcttttccatgctcatatggtcctcatcgacgaggaggctggcagtgctcatgctcaaatataccctccactcactgacgttttcaaacctctgataaaggagggcaatgtctacaatgtctcctacattcagatcaagaaagctaatgggatgtacaagcctgttgacaacgatatcatgatcggtttcacaaaatggatcctatgctgcctcgacaaacccgcggtttgaacacgtgacagatgacggcttagcttctgtggatggacatcttggtcgcttttgtagatggaatgtttggttggcttttgtagacagaattaggttgcacttgtgcttgtgtaacgcttatgagcatggttgtgtggactgtgtcggccaaagtatggctcccagtgccttgtatatatcacatgcttagttgtctatccccaactaggtcgcctgataatagacttcgatcatgtcatgctattctataacaatttccactgtaacttgcctaatcgtcatactatggtacacgcttaaatttggtgctgcaactttaatgtggattatgttcagtc

SEQ ID NO: 3874 - DNA, 1568 bp, Zea mays
  Clone ID: 700344130_FLI
actgaacatgtagcgcgattctacattgctgagacaattcttgctatccaatccatccataaacataactacatccacagagatattaagcctgataatttgcttctagataaaaatggtcacatgaagctgtcagattttgggctgtgcaagccaattgactgctcaaagctctcaacgttgaatgaagatgaacccatgggtgatgacaacatgagggaatcaatggatattgatagttctttgtccaatacagcaaatggtagaagatggagaagtcaacacgaacagcttcagcactggcagatgaacagaagaaaactggcattctcaactgtcgggacaccggattatattgctccagaggttctgctgaagaagggatatggaatggaatgtgattggtggtctctaggcgcgatcatgtatgagatgctagttgggtatccaccattttatgccgatgatccaataactacatgccgaaagattgtgcactggagaaaccatttgaagtttcctgaggatgcaaagttgtcaaatgaagcaagagatctcatttgccggttattatgtgatgttgaccacaggattggcagtgcaggggcagatcaaataaaggcacatccttggttccaaggagtcgcatgggacaaactttatgaaatggaagcagcatttaagcctcaagtaaatgatgaactggatacacagaatttcatgaaatttgaggaactggaaaatcctccagccaaaacaggctctgggccttcaagaaagatgatgctgaactccaaagatctgagctttgtggggtatacatacaaaaactttgatgcagtgaaagcaataaaaatttcagatctgcaaaggaattcatctctaacaaggccttccattggttcgatattcggtccatcaggcatggattctcccatggaaccaaacggaagggacacacacatgcacacagtttcatctggtgacccaatgattccctaaccttcagtgccgtctgtcctcagcaaatttccgaactaaatcagcgtgcaaacgccagggtgatgtggctccagctggacaacatgcttatttttagccaggtctctgctctctttatcgtgggcaagcggtttgtagaaatccaccaaagtttctagttgtaaaatagtatgccacagacttcaacaaaggtcccatgcattattggctcatcagacatgggggcagtttttttttggagaaattgcaccttgcggctggctgcccaggttggcagagcaaattgcggccttctcttgtggcagttcccggtctgcaggaaagggaaatacgacggtgttgttgcagcaggaattctcatggttagtgtcgttgttggtgtttgatatgtatcaggaattttcacatttgaagtagggtttctgttagcagagttgtagctattgacaagcaacatccttttacggagttgcttttttttcgttgatgtatggaaaacgagacattgtagaaatcgaagttcgatctagccttgtatgctgcatatctgattcaacgtgtttctc

SEQ ID NO: 3875 - DNA, 784 bp, Zea mays
  Clone ID: 700344504_FLI
agagagaagacgtctctctcctctcggcgtccccgttccccaacctctcgtctgctgcctgcctgcctgcctgcctgcaaaaaggagtttgtcatggcgtctaagcgcatcctcaaggagctgaaggacctgcagaaagacccccccacatcatgcagtgcaggtcctgctggtgaggacatgtttcattggcaagcaacaattatgggaccacctgacagtccctatgctggtggtgttttcttagtgaacattcatttcccgccagattaccccttcaaacctccaaaggtttctttcaagacaaaggtcttccatcctaatatcaacagcaatggaagtatatgccttgacattctcaaagagcagtggagccctgctttgacaatttctaaggtcctgctctccatctgctccctgctgaccgaccccaacccggacgaccctcttgtcccggagattgcccacatgtacaagacggaccggccgaagtacgagtcgacggcccgcagctggacgcagaagtacgcgatgggctgacgaacgctttcctgctcgtctgggcgccattgttcccttggatttgttgttggtcgtatgtatccctgatccatctaggatcatcgtattgtattgtagtgtatgtatgtcgtcggcctaccatcgttgccatccaccatagtgaggtggttggacatgcttcgcctatatgcacctgtgcttgccttccttcgggtcggtgctgtttggttaatgttcatcgaagacgttgatttcgttgccc

SEQ ID NO: 3876 - DNA, 609 bp, Zea mays
  Clone ID: 700344526_FLI
cggcaggagggtgccgtgcaagtacaccggcgtcaacatcgcgttcaaggtggatcagggcgcgaacccgtactacttcgacgtgctcatcgagttcgaggacgacgacggcgacctcagcgccgtggacctcatggaggccggcagcggcgtctggactcctatggcgcacaactggggcgccacgtggcgcctcaacaacggcaggaagctcaaagcgccgttcgggctccggctcacctccgactcccgcagggtgctcgtcgccaacaacgccatcccggccgcgtggaagcccggcaagacctaccgctccttggtcaactacccctgaaaagagaaataccgacaagtggatggcgtgtattgtgcgtccgggtgttgcgagtggcggcggtgtactactggtgtcggaaaacagaagagaatgaaagaggaggttgaagaagagaataatgtccttcttccctccctggacggtctctgcagtccccaaaagtgatgtgtgacggtgttagtcaaatcatgccggtaatttgatacttcatctcgatttgagttttactgctatactactgtgattgaggtaagacagaatcttatttcttg

SEQ ID NO: 3877 - DNA, 823 bp, Zea mays
  Clone ID: 700344603_FLI
gcggtggcgtgcggagggtcctggaggcgtggaggctcggcgtggtgaagtacggcgaagcgctccagttgcaggagcgtctcgtcgcggaccgcaaggccggccgcgtcggcgacctcgttctgtcgctgcagcacccgccgacctacaccctgggcaagcggcgcgagaaggcggagcggaacctgctcgcgccggaggccgacctgcgcgccctgggcgccgagatccaccgcacggagcgcggcggcgacgtcacgttccacggcccccggcaagccgtgctgtacccgctcctctcgctccgcaccttggggcttggcgcgcggaggtacgtcgaggggctcgagtccgcgatgatccaggtcgcggcgctgcacggcgtctccgcgaggcccggggaccccggcgagaccggggtgtgggtcggggaccgcaaaatcggcgccatcggggtcaggatctcctccgggttcacgtggcacggtctggcatttaacattgaccccgacctggagtacttcgagcacataatgccatgcggcatcgccggcaagggggtgacgtcgctgcggcgggaggtgggggacggagcggagctcccggccgacggggtcatccacgaccagctcgtggggtgcttggcgacaactttgggttttactgatgtggaattcaaggacgattctgagcgtggagacctgatcggagttacagcttcacagtattgacgcctgattcagttttgcgttagaacgtcctgtaatcaaatttcggaatgttttttttatcttcatcagatacgtcctgtgatccatttttg

SEQ ID NO: 3878 - DNA, 1525 bp, Zea mays
  Clone ID: 700344637_FLI
ggtgggatgagccgccgtacaagatcaacgcctccgggcagactgcccgtctcggcttcaacaccatcgcaaccagcgctacacactacaacggcatcctggagtacaatgcgcacagtctgtatggcttctcgcaggccattgccacgcatacggcgctgcaagggctgcaggggaagaggccgttcatcctgacccgctccacgttcgtcgggtcgggggcgtatgccgcgcactggaccggagacaacaagggcacgtgggaaaatctccgttactcgatctcaaccatgctcaactttggcatcttcggcatgcccatggttggctctgacatctgcggtttctacccgtcgccgactgaggagctctgcaacaggtggattgagctcggggccttctaccccttctccagggaccatgccaacttcgcgtcaccgaggcaggagctgtatgtctgggactccgtggcgaagtctgctcggaacgcgctcggcatgcggtacaagctgctcccctacctgtacacgctcaactaccaggcgcacctgaccggggcccccgtggcgcggccggtgttcttctccttccccgacttcacgccgtgctacgggctgagcacgcagttcctgctcggtcccggcgtcatggtgtccccggtcctcgagcagggcgccacttcggtgagcgccatgttcccgccgggcacctggtacaacctgttcgacatgagtaaggtggtggtgtccaggagcggggccccagtgaagctggacgcgccgctgaacgagatcaacgtgcacgtgtaccagaacacgatcctgccgatgcagcgcggcgggttcgtctccaaggacgcccgggcgacgccgttcacgctcgtggtcgcgttcccgttcggggcgacgcaggccgacgcggagggcgcggtgtacgtggacgacgacgagcgcccggagatggtgctcgcggaaggccaggcgtcgtacgtgcgtttccacgcgagcgtgcgcggaaaggccgtgacggtgcggtcggaggtgctgatgggaagctacagcctgcacaaggggctggtcgtcgagaagctctcggtgctgggtctggagggtaccggcaaggaccttgccatccaggtggacggcacggacgccactgccgtcgcgacgtcgagcccttactttgcagcaggtggcaacgcgaagctgcagggggaagaaggcgtcgaggatagtaagaacggcgtcatggtggagatcggcgggctggcattgccgctcgggaagagcttcaccatgacatggaacatgcggatcgaagcataggtcgagtgatgctgtgcttccgtctccatgaatttgcttaaagtcgtgttccgtttctgatttagatgggtagatcctgccatgctgatgtgcagtcagaatccatattctgaaaaatctgtcatcagggggtgctctgtgcaaggagcagagtacaacattgctgcaacaataaaagattgaatctttgacgtttgact

SEQ ID NO: 3879 - DNA, 787 bp, Zea mays
  Clone ID: 700346422_FLI
attcctcccatctcccaagacctcctcagacccgagaagcgcagctgcggccatggacgccaccggcactggagctggagggaaggcgaagaagggagcggccggtcgcaaggccggcgggccgaggaagaagtcggtgacgaggtccgtgaaggccgggctccagttccccgtcggccgcatcgggcgctacctcaagaagggccgctacgcgcagcgcgtcggcagcggtgcccccgtctacctcgcggccgtcctggagtacctcgccgctgaggtcctggagctcgccggcaacgctgccaaggacaacaagaagacgcgcatcgtcccgcgccacgtgctgctggcgatccgcaacgacgaggagctcgggaagctgctgaccggcgtgaccatcgcccacggcggcgtgttgcccaacatcaacccggtcctgctgcccaagaagacggcggagaaggcgtccagcggcgggagcaaggaggccaagtcgcccaagaaggccgccaagccccccaagaaggcatagggtttggaggcggatccgatgttgtcatgtgtaggttgtaagcgggcaatgtgattggctgtgtatctgcttcgctcaagttgctttatgtcattcctaatggaataggaaatgccgtgtttcttacgcctgcttttggttctgcattctactgaaaaagcgtccgataattaacacattcacctttgaagaatcccgattgaaaagtccattaaatatttgctaatggagattttgggggcgtttgctttaagg

SEQ ID NO: 3880 - DNA, 2566 bp, Zea mays
  Clone ID: 700346464_FLI
ctgttttcgcaccagcgccggcacaggcaacgcagcaccgcaccgagccgagccacttagcgagcgagggaacagcctccacggcgaggagagaatggggagaggagggatcggaggcgcggcggccatggccatggccatggagaccgccgatcctgcccgtgcattcgtgaaggacgtcaagcgaatcattatcaaggtgggcacggctgttgtcactggcatgaatggccgattggccatggggaggctcggttctctctgtgaacaggtgaagcaactgaattttcaagggtatgaggtgattctggtaacctcaggagctgttggtgttgggaggcagaggctccaataccgtaaacttatccatagcagcttcgcagatctgcaaaatcctcagatgaactttgatggaaaggcatgtgctgctgttggtcaaagtgtcctgatggcgatctatgacacattatttagccaacttgatgtaacgtcatctcaacttcttgtgacggatcgtgatttcaaggatccaagttttggggaccagctccgtgagactgttttttcactgttagatcttaaagtagtacccttatttaatgagaatgatgccatcagtacccggagacagccatatgaggattcatctggtatattctgggataatgacagtctagcagctctgttggcagcagaacttaatgctgatcttcttatcatgcttagtgatgtggaaggactctatagtggtccaccaagcgatcctcagtcaaagattatccacacatatgtcaatgaaaagcatgggaagctaattagttttggagagaagtctagtgttggaagaggtggcatgcaagctaaagtgtctgctgctgctaatgctgcatcaaaaggtgtacctgttgtcattgcaagtgggtttgcaacggatagcatcattacagttctcaaaggcgaaaagatcggtacacttttccacaacgaagcaaatttgtgggcatgttccaaggaagctacagcccgagagatggcagttgcggcaagagactgttcgaggcgtctacagaagttgtcatcagaggaacgcaaacagattttgctagatattgctgatgctctggaagcaaatgaggatgcaattaggtctgaaaatgatgccgatgttgaggcagcacaagttgctggttatgaaaagtcgttggttgctaggatgaccctaaagccaggaaagataacaaatcttgcaagatccattcgtaaaactgctgacatggaggaccctatttcccatacattgaaaagaacagaggttgctaaagatctggtttttgagaaagcatattgcccattgggtgttcttctcattatttttgagtctcgtcctgatgcattggtccagattgcatctctagcgatccgaagtggtaatggtctccttttgaaaggagggaaagaagttatgagatcaaatgcaatattacacaaggtcataactggagttattcccgatactgttggcaaaaagctcataggccttgtgactagcaaagaggaaattgctgatctactagcgcttgatgatgtaattgatcttgtcattccgagaggtagtaagtctctagtttcccaaatcaaagcaacaactaagattccagttttaggtcatgctgatggtatctgccatgtttacattgacaaatcagccgacatggatatggcaaaacggatagtattggatgctaagattgattatccagcagcatgtaatgcaatggaaacactacttgttcataaagatcttaacaagagtgagggacttgatgatctattagtggaacttgaaaaggaaggagtagttatttatggtggacctgttgcacatgacaagttgaaagtaccaaaggtagactcatttcgtcatgagtatagctcaatggcatgcacagtcgaatttgttgatgatgtgcagtcagctatcgatcacataaatcgttatggaagtgcacacacagactgcatcatcacaactgatagaagtgctgcagaggcctttctgcagcaagttgatagtgccgctgtgtttcataatgcaagcacaaggttttgtgatgggacgcgttttgggctaggtgctgaggttggcataagtacagagcgcatacatgcccgcggacctgttggagttgatggacttctaactactcgctgcattttgcgcggtagtggacaagtggtgaatggtgacaagggagtggtttacacccacaaggatcttcctttgcaatgaggcaaataacctccgttgtggtcgtaacgaatggctggactccccttttaagtacccttttcttttattccatgctacaaagtttggtgtcgtaacaagcagaatgcctatttagtaggcattgatgtaatcagaccattttgtcgtggtgttccttgtcgtataaaacatccgagacatctgtattagaggcgcggtagctagttgatacgcgattgttctggatgaaatttggatctgttccaatgcaatgataatgcatgtgtgatgaggtcc

SEQ ID NO: 3881 - DNA, 2386 bp, Zea mays
  Clone ID: 700346466_FLI
ctccccgttctggttttcgtctaatctagattggatgggatgatgattcgaggcgttagcttattttagctgtaatcccagactaaaccctggctcgttggttcggcggcctcccggtgagaatcgcatctccaatcaggatggagacgaagaaagtggagtctgtccctggtcataatcacgcggggagtggatgataagatcataaaaatcagacaatcatcggtcacaactcatactgttgtgtctttttaacccctgagccaccgaggccaggagtgattgattggtttaagctcagcgcacccagagtctgtgacattcatgggtagtgcctgttcgaggaagaggggccagctggtccaagaggatgatctctacagtgcgaggttctccaagagcggcagcttcaagtggctgctgcatacgctgccccgcagcaactttgctgatgtgcagcggagagcacagggcccagctccaaaccggtgcccgtcgcttgtggagctgtgcgtggccaaagtctgcaaggacataaatatgtattctgatttatccctgctgcccagagatcttagtcagcagatattcaatgagctggtggaatgtggatgcctcacggaggcatcgcttggggctttccgtgattgcgatttgcaggatatttgtctgggagactaccctggagttactgatgcttggatggaagtagtggcttctcaagggcagtccttgctatctgttgacctctcttgctcggatgtcactgatagtggattcaatcttcttaaagattgctcaagcatgcaaagtttggcatgtgattattgtgatcaaatctcagaacatggacttaagacattatcaggcttttcaaacttgacatcactgagcattaagaaatgtgctgctgttactgctgaaggagcaaaagcctttgcaaacttagttaatttggtaaacttagacctcgagcgttgtccaaagattaatggtgggcttatacatttaaaaggcttgaaaaaactggaaaaactgaatctgagatactgtaatggcatcacagattcagacatgaaatatttgtcagatctcacgaatttgagagagctacagctctcttcctgcaaaatatctgcttttggtgtttcttatctgagaggtttgcacaagctaggtcatctaaacctggagggctgtgcagttactgcagtttgtttggaggttatatctgagcttgcttcgttggtcttgttgaatctgagtcggtgtggcatatgcgatgaaggctgtgagaacttgaaaggtcttacaaaattgaaggctctaagtttagggttcaaccaaattacagatgcatgtttaattcatttaaaagatttggtcaacttggagtgcttgaacttggactcatgtaagattggtgatgagggtctatttcacctaaaaggcctcatacagctaaaaaacctggagctttcagacactgaagttggaagcaatggacttcgtcatctttctggtctgcgtaatttgcagagcatcaatctctctttcacattggttactgacattggtttgaagaagatctctggcttgagttcactgaagtctcttaatcttgacaatcgccaaatcacagatactggtttagcgtctcttacaggtctcactggattgacacacctcgacctatttggagctcgcataactgattctggcatgagctgcttcagatttttcaagaatattcagtccctggaggtctgcggtgggttgattacggatgctggcgtgaagaacatcaaggacctgaaagctctgacgttgctcaacctatctcaaaacggcaagctcacggacaaaaccctggagctgatctccggcctgactgcgctagtgtcgttgaacgtgtccaactcccgggtctccaactcgggcctccaccacctgaaaccgctgcagaacctgcgctccctatccctggagtcctgcagggtgacggcaagcgagatggataagctccggctggtcgccctccccaaccttatcagtgtgcggccggagtgatacgaccgccagcgctcccacagcgacctgtaactgtggagcaagtggcgcctggctagagcaggccgccttgtacatacttttgcaaaaacgaggtgtctgtacatattgttcgtcgtgtcgtgtcgtgtcagtgtgcctgatggcaacgggctaatacgtccgtgccaacgtgtgcatggtatcccacggaccctgtggtagtaaggagcagttgtaaatatgccgtgcttcctctccatgtggggtgctgctgtataaatagattggtgcattgctaaatacctctgcttggtaacatcgtggtatcggtgct

SEQ ID NO: 3882 - DNA, 1246 bp, Zea mays
  Clone ID: 700348053_FLI
ggtggtggcacctcctgataaatttggagaaactttagtcaacgagaggattaatggaggaacatttactggaagtgagaatttccagctcccgaacaagatgatgccaaatggtggcatgcgtctttatggtggtgcacaataccatcgggcaatggctgaatttcgtctggtagttggtagtaccaggtgccctccaataactagggatgaaattgttaatgcttgtggtgttgaggatattcatgatggtacaaactactccaggactgcttgtgtaattgccgtggcaaaagcacgtgacacgtttgagccattccttgatcagttgggttttaggcttttgtacatactgaagaggctgatcccaatctctgtttatctgttggagaaagacggtgagcactttaatagccatgaagtgcttataaggcgtgtccaggaagcattcaagaggtttgttgaatccactgagcaatcatgtcgtcaaaggtgtatggaagatttggagagtaccactcgttatgtcacttggtcccttcacaacaagaaccgtgctggattgagacacttcctcgattcatttgttgcaccggagcaactatcagtaaatacactgaacgtgcagttttctgggttgaatgataacaaacaggataaggcaaagggtgactcgaagtcaaaccattctccagacacaaattcgtccactgctatgccagagacaaggctggttgacctattggatagcacactctggaacagacgcctggttccctcatctgaaaggcttgtttatgctctggttcaccagatttttcatggaatcaaagagcattttcttgtcaccactgaactgaagttcaattgctttctcctcatgccgattgttgacaaactaccagcacttctaagacaagaccttgagtcagcttttgaagaggaacttgatagcatctttgatgtcactcaactgcgccagtcacttgggcagaagaagcgcgagctggagatcgaactgaagcggatcaagcgcttaaaggaaaagtttggggagataaataagaagctcaattctcttcaggttaggcagtaggccaggctcaaaaacacttagcagtagcttggtaggctaggaactccaggtagagtgtttctatgctgtaataaaatcattggtcacctagagtgacttcttgttgtatcctttcagttgtaaatatcagtgtcataaacgttaaacggt

SEQ ID NO: 3883 - DNA, 1464 bp, Zea mays
  Clone ID: 700348055_FLI
ggagacttgttctcaaatgcttcagcttggaaggaaatgaaagtacaggtgtgacgcaaaggcaaaatgcaaaatcagcgtgaacagtacgggggtactgttcacctatttatagacacgggacacggctcatacaaaattacattcatgcccattacatttggtaataattctatagtaatctgccgaggtctgaatagcctttttatctttaagtcggtttcattttctgctagcacgccgaagctttcccgctcacatctttggcgctgtatcaaccttcgtattattttaggcttctcctactgtgattccgactcgagcccgaaggtacctgttcacacattatgctccagaaatactgttaaatcctgtttttgaggaccttcgtaagccgaaggcccccaacaccaggtatgatcggaagtattgattgcatgcactgggagtgggaaaattgccccacgacctggcaaggtcagtacagaggttactacaagaaacctacattgattctagaggctgttgcaagccataacctttggatttggcatgcattttttggaatgcctggatcttgcaatgacattaacgtcctgcatcattcaccagtcttcgacaacttagccaatggagttggtccttcggttagttaccaactgaatggtcaacaataccatatggcttactaccttgctgacggcatttatctgtcgtggactactttgatttaacctatctcttgcccatttagcaataagcacaagtattttaccgccaaacatgatgagtaccaaaaggacgtggaacgagcatttggagtcttacaagacaaataccaaattataaagaatcatgctcgcaattggaaccccattgatctcaaattcattgttgattgtgttatcattctacacaatatgggcactgagtacgagcatggcatggaacctattcgaattgaagattatgaaggaggctctcgtccaaattcctcggcaacttctaactcttctgtagtgggtgagggggtgggttgtaattggtaataacttatgcacattgaatggcaaccatgtccaaccaatccgataagtctaggatcttgtcaataagctgctggagttcataagatgagttggtaggatgaccaaccgtctgcctaacctcgaccgagttcatctccatttcctttacaacccatttgagggtatccaaaggagtgtacgccatcttcgcacagatgtgggagtcgttgaggtggaatcgccggttcctggagattcggaccgccgattctgccggcggcgcttaccgtgatgagaacaccccctgctacccgaccggcaccgtttgcaggagggccccggaatctccagatcgatcgccgccgtgggcgaaatagggtggccagaggaagggaacggacgaaagggaaagtatgatcgttgtccagaatatgcg

SEQ ID NO: 3884 - DNA, 831 bp, Zea mays
  Clone ID: 700348062_FLI
tggatctggacctcaagaagttcatggactcttgcccggagtttgctaagaatcccactttgattaagtcatacctctaccagatactccgtggcgttgcgtactgccattctcatagagttcttcaccgagatttgaaacctcagaacttgttgatagatcggcgtaataatgcgctgaagcttgcagactttggtttagccagggcatttggaattcctgtccgtacatttactcatgaggtagtgacattatggtacagagctccagaaatccttcttggagcgagacagtattccacaccagttgacgtatggtctgtgggctgtatctttgcggaaatggtgaaccaaaagccactattccctggtgattctgagatcgacgaactgttcaagatattcagggtgctaggtacaccgaatgaacaaggttggcctggagtcagttgtttgcctgacttcaagactgctttccccaggtggcaagctcaggacctggcaacaatagtcccaaatctagaacctgctggcttggaccttctctctaaaatgcttcggtatgagccaagcaaaagaatcacagctaggcaagcacttgagcacgagtacttcaaggaccttgagatggtacagtgacctgctaaatgtgcttggcgctgctttggcatttgtaattgtatgagctgagtcgctcattcctttttatgggcgtctgtactctctcattctctctgcatttttgtcgttcagctggatattttgaatctggtgtgttttgagatgtattaaggaatatcaaatagattaccgccttggtctctatttactg

SEQ ID NO: 3885 - DNA, 2003 bp, Zea mays
  Clone ID: 700348381_FLI
gactacaggggggagacacatctctccccacctcgcttcgcacctctccagccgccgcctcctccttcgccggcgtcgacgatgggtgactatggccacggcggggggcagatgcggggcaacccggactcccgccccaggggccagggccagcgccctaacgtccagcagctcaagctcatggggcagatccacccgacggggctcacgcccaacctgcttaagctcttcgaaccgcgtccaccgctcgagtacaagcccccgctggagaagcgcaaattgccggcctacaccgggatggcacaatttgtgtcgcactttgctgagcccgaggatccagagtatgctccgccagtacccaagtgtgagaccagggcagagaagaaggctagaattcgcaataataagctcgagcaaggcgcagctaaggttgctgaagagcttcagaagtatgacccacaaagtgaccccaatgctactggagatccatacaaaacactctttgttgctagacttaactatgagacatctgagcagaggatcaaacgcgagtttgaaggttatggtcctattaaaagggttcgtcttgtaactgagaaagatacaagtaaacctagaggatatgcattcattgagtatgtgcacacacgagacatgaaaaatgcctacaagcaagcagatgggagaaaagtggacaacaggagggtattagttgatgttgagcgaggcagaactgttccaaattggcgtcctaggagattgggtggtgggttgggatcaagcaggatgggtggtactgatactgacaaaaaggattccactagggagcaacaacaaggtggacgccctagatcagaagagcctcggagggatgatcgtcgtgccgatagggatcgtgaaaaatctcgtgaaagggtacgggaaagagaccgtgaggagaggacccgtgaacgttcgcatgaccggactcgtgatagagatctacgagatgagaagcatcaccatagagaccgtgagaggactcgggatagggagagaggaaaggaccgtgaaagagaccacggccgtgaccgggagcgtgatcgtcgtgacagggacaaggatcgtggtcgggactatgatagagaaagggaccgtggtcgctctcatgatcgccatcgtgagagaggcagggaccgtggtgaaagagattatgagcgcaccagccatgaacgtgaccgtggtcacatgcatgagagggatgcagactatggcaatggtgggacaaagcatgacaaaaatctgtctagttatgggcaggattatggctatggtcagtatgagcaacacaaaggtcatgatgcatatggttacagtcaagatgtacgtggacatgaaactgaacactcaaagcggcatgagcacgaatattatcgtgttgactcgtatggtaaaatggaagctaactatcagatgccgccaaacaatgctgagccagaaggccctgaggaaggtgaggcatatgaggaaggcgactaccagtatcaccggtctggtgaacacatgaaggaagcttgattgcagcgatgagatttgcctgcagctttatactgatacacaacgatggtttcaatgttggttctttgtatgaattagtttcagctgcatagtgcctgtcagttgtgttcttccatgttggggaattctcaaaaggaagcaaaatcttgcccaactgcgtggatttttgaatttgaagcctatggctgccaatatcttgtggaataagatatttgtgtaatctggttgtggagatccatatgatctgccgttatccatctactcttctgttaagaagttttgtatgacagttccttcaaattatttgttccaacattttgcagaacttcagaattgttgttctatttggccttctaacaaaaagttgcttggtaacaactgcaacctttgtcctctacatccaagcacataggtctcatcaataaaatgtaatcatttttttttgt

SEQ ID NO: 3886 - DNA, 740 bp, Zea mays
  Clone ID: 700348544_FLI
ttcagaatggcttctagcaagctctttgcggttggcctcaccgtcttactaagcattattggactgtgcaatgctattagggtggtaaaccacgccaccgcagatggacaaggcggtggaggtggtggaggcggcgggagcggaaccagctatggctccggatccggctccggctacggcgatgccgaggcctatgacggcagtgcccagtccccaacctctggccacgcatatggcagtggatccggggacggtggtggcgtttggcaaggtgacgacgagtgcgcgtccggttacggggcgggcggcgcatccggtgaaggccatggcgactcaggtaactccaacaccgatggcgctgcgaatgcgagcggagctggcggcgggggcggttctggtgggagcaatgggaatggcagcggatctggtggcggcagtggagttggagaaggcgaaggcgataactatggtccctatggttcgagctacgcaaatagcggtggcgccggaaggggaagcggaggcggtcgtaatggtggattcggcggcggttccggtggtggagcggggagcagtggtggtgccgcgtcaggttatgatgatggcagctacaacggatcaacaccttaattatgttcatttgtttgtaccacactgtcaagcaaccgacacgtactgatagggtttttctgtgcttgtgaaataatttggcctttctgagcgatgcagaagtttgttct

SEQ ID NO: 3887 - DNA, 884 bp, Zea mays
  Clone ID: 700348555_FLI
atcgctccctgcctctggtcacctcgcttccgctcccggctcccctccggccacccagacatcgtccgttcgctcgccaagagacaggaccggagaccatggcggaccagctcaccgacgaccagatcgccgagttcaaggaggccttcagcctcttcgacaaggacggcgacggttgcatcacaaccaaggagctcggaactgtcatgcgatcactgggtcagaacccaaccgaggctgagctccaggacatgatcaacgaggtcgatgcggacggcaacggcaccatcgacttcccggagttcctcaacctcatggcccgcaagatgaaggacaccgactccgaggaggagctcaaggaggcgttcagggtgttcgacaaggaccagaacggcttcatctctgcggcggagctccgccacgtgatgaccaacctcggcgagaagctgaccgacgaggaggtcgatgagatgatccgcgaggccgacgtcgatggcgatggtcagatcaactacgaggagttcgtcaaggtcatgatggccaagtgagtaaagcctgcggtaacggtatactaccccgcgggaattgaaggaggaaaccaaaccgtgcatcgcatattagaaaggcaatgcaggtcttgtttccttcgtcttccccatgaagaaaccgtactagctgtagctgctgaacgtttgagtcctcctgctgccacccttatctccatttgtgtcatcgaaactccttgcttcccctgctgtgtgaatctgtacggctttgcgtgttctggacactgattgcagttggatccagtttgtagttatatttgttcatcgaatctgcccagactcctttggtaccattcaacaggctgctgctttctgttt

SEQ ID NO: 3888 - DNA, 2112 bp, Zea mays
  Clone ID: 700348567_FLI
ctgcaccactaccgcctcctccgcgtcacccctctcgtcgcctcttgcggcgaccggcggcggatcgtccgcggcgcaagcgcaaccatggggctcttcaccgtgacgaagaaggccaccacccccttcgaaggccagaagcccggtacctccggcctccgcaagaaggttactgtattccagcagcctcattatctgcagaactttgtccagtcaacattcaatgcccttcctgcagaccaagtaaaaggtgcaaccattgttgtctctggtgatggccgctatttctcaaaagatgctgttcagatcataacaaaaatggctgctgccaatggagtaagacgtgtttgggttggacaaaacagtctcatgtctactcctgctgtatctgctgtcatccgtgaaagaattggtgcagatggatcaaaggctactggtgccttcatcttgacagcgagccataacccaggtggtcctacggaggactttggtatcaaatacaatatgggaaatggtggacctgcccctgaatccgttaccgacaagattttctctaatacaacgacaatctctgaatacctcatctctgaagaccttccagatgttgatatttctgttgtcggtgtcaccagcttcagtggacccgaaggcccctttgatgtggatgtctttgactctagtgtaaattacataaagttaatgaagacaatttttgacttcgaagcaataaaaaagctactgacctccccaaagtttacattctgttatgatgcgctccatggtgttgctggagcttatgccaaacacatctttgtggaagagcttggtgctgatgaaagctcactgttgaattgtgtcccaaaagaggactttggaggtggtcatccggatcctaacctcacctatgcaaaagagttggttgaacggatgggtcttggaaagtcatcctcaaatgttgaacctcctgaatttggtgctgcagctgatggagatgctgaccgcaacatgattctgggtaaaagattctttgtgacaccatcggactctgttgccattatagcggccaatgctgttcaatcaattccttactttgcttctggcctgaagggagttgccaggagcatgccaacatcagctgcccttgatgttgttgcaaagaatttgaatctcaagttctttgaggtgcctactgggtggaaattttttgggaatttgatggatgctggaatgtgctcaatctgtggtgaagaaagctttggcactgggtctgaccacattcgtgagaaagatggcatctgggctgtgcttgcatggctttctattattgctttcaagaataaggacaaccttggaggagataagcttgtcactgttgaagatattgtccgtcagcattgggccacatatggtcgccattattacacacgctatgactatgagaatgtcgatgctggggctgctaaggagctgatggcaaacctagtaagcatgcagtcatcactttctgatgttaacaagttgatcaaggagatccggtctgatgtttctgaagtagttgcagctgacgagtttgagtacaaggatccagttgatggctctgtgtccaagcaccagggcatccgatacctcttcggagatggttcacgactggtgttccgtctatccggaaccggttctgttggtgccaccatccgtgtctacatcgagcaatacgagaaggattcctccaagaccggcagggattcacaggaggcccttgctccactggttgatgttgcgctcaagctctccaagatgcaagagtacactggccgctctgcccccaccgttatcacataaatttttgaagagtgatttacaatgagttgaggcgcttacacaaattttcattcaagcctcttgttctatagttctacttcctgttgcatctcaccaatgaataaaatgtatgtatcagactcgccccgtttttttttttgtccatgtactgcagtgcagcggactgagccgctggcacagcatgcggtaataatcttgtcacagtgacagtgctgtaatcgggagcgtgtttcttgtaatcttgttaggaagtgtttctggttttgtttgagc

SEQ ID NO: 3889 - DNA, 521 bp, Zea mays
  Clone ID: 700348590_FLI
gtggatacaagcatggtggagggtatggaaacaaccagccaggatacggtggcggaggaaacagccaacctggatacggcggcggaggaaacagtcagcccggatacggtggaggatacaagcgccatcaccctggtggcggctacgggtctggacaaggagggcctggatgtggatgtggaggagggtatggaggtggcaatggtagtcctgggtacggcgatgacaatggtggtggcagtggcactggtggcggaaatggcaatgctggtgggtacggaggaggaggaggcggcggttatggaggcggctacggcagtggtagtggtacagcaccaggaggcggatatcatggcggtggtggtgcacaacgctacgctgggcaaaactagcaagaacaaccccttatgctagtttatgttaaataaacgatccattgttcatgtgactgagcaatttaagcagtgaaggatcttgactcgtgttatttgtgttaccatatgtattggttgttttatgtt

SEQ ID NO: 3890 - DNA, 1899 bp, Zea mays
  Clone ID: 700343295_FLI
aacctctcctatgttgatctttcaagcaattttttgcacggctcactgcctatgggcattggtgatttgagcgcgttgacattgctgaaccttcgtcagaacaactttactggcgaaatcccaagaacaatcaccaaacttaagaatctgttatacattgacttatcaagcaacaatttcaatggtagcatacctgatggcctccctgatgatctggtcgaatttaatgtttcctacaactacctgtctggctctgttccaagtaatttactgaaattcccagattcatctttccatccagggaacgaattgctcgttcttcctcgctctgaatcattaaatggttctgacaaatcagatgaggcaagacacggcttgaagcgtgggattctatatgcattgattatctgtgttgttgtatttgttactgggattattgtgcttttgcttgttcattggaagatcagtagctggaaaagtagggaaaaaggtactggccaaggtaaacatgtgggtcaagtccagagtgctcagagaagtgcagaaatttcaacaactgaaatgcatgatgtagcattagaatcgtcaccttctgcagagtatggagctgtttcattgcctggcaaggaaagacgacatgaagcccaagatgcgccaattgatgctgcttatttcaacgaaccagcaggtagtagctcagcccgtaaagacagcacaaagtcttcgatgccttctttatcatcgtcgcctcctgatgcacgctcccagcatcatcactctatccttagagtgcactctcctgataaactggttggcgatttacatcttttcgacaattcagttgtgttcacggctgaagagctctcttgtgcccctgctgagataattggcaggagctgccatgggacatcctacaaggctacacttgacaacgggtacatgctgacagtgaagtggctgaaggagggctttgctaagagtaagaaagaattttcccgtgaaataaagaagcttggcagtgtaaggcaccccaatcttgtccccttgcgtggctactactggggccccaaagagcatgagaggatcatgatatcagactatgcagatgccacatctctgtctacctacttgtctgaatttgatgagcggaatctcccacccctatcagctggacagcggctgaacattgcgattgatattgcccgctgtctagattacctgcacaacgagcgggtgattccacatggcaacatcaagtcgtctaacgtcctgattcagaactccactccatctgctctggtgactgactacagccttcacaggctgatgactccaatcggcatggcggagcaggtcctaaacgccggcgcgctaggatattcccctcctgagttttcaagcaccagcaagccatgcccatctctgaagagcgacgtgtatgccttcggtgtcatcctgctggagttgctgacagggaagattgccggtgagatcatctgcatgaacgatggcgtggtcgacctgaccgactgggtgaggatgctggatctggaggagcgtgtcgcggagtgctacgacaggcacatcacgggtgttgagagctcggaaggcgccccacaggcactggatggcatactgcgcatcgcgctccggtgtatccggtcagcatcggagaggccggaggtccggacggtgtttgaggatctcttgtccttatcgtcgtgaccgtagttattggtagtgtacatctcgtacttgcatcagcttgtggaaacttggagggtatactaacaattgctaggatttcggggtgatcaggtgatgtgtgtggtctccttgagcattcattgtttgggtcgctctttctgggaatagttgattcgtttttagttagtccac

SEQ ID NO: 3891 - DNA, 803 bp, Zea mays
  Clone ID: 700343308_FLI
ggctgagaaaacaggtgtgctgtgtgatacagttgtacaatgaagcagcatcctgaaacatgggagtggagtctggcttggattatttgtcctaacaacatatcttcaatcttatacttatgccctcccttggtgtaggctgagacagaggagttggctacacaagtggagtctcttgcagcagagaacacgtcccttagatctgaaatcggccggctaacagagagctcagagaagctcagactggagaattcagctctaatggtgaagctgaaggacaccgcagaaccgtctccgagcaaagcagccgcatccccgtcctctccccgtgcctccgcggagaacttcctttccatgatcgacagcgccaacgcgccgagcgtcagcaggcacacggagcacggcggtcccaggctccggcagctcctggactccagtccggcgacagacgtcgccgccgtaagctgacgatgaagctggtccggcaaatacgccacagcacatgcatgtggcctggggattccgcaggctcatgcggctcgagtgctcgccgtaaacgtcagcgttacggactcggactctgtactccagtttaggcactgattccagtgaagtaaccgagggtactcgtaattttatctgctctcgcgccagagtgccgggctgcctgcgaccactcctgtgtacccagagttgtaacgtagtagggtgttgtgctgcatgccgaccttttgaaactttggagaccgtcatttggaccatttttttcgtcgcaataacacaatacagatcggagtttgtac

SEQ ID NO: 3892 - DNA, 993 bp, Zea mays
  Clone ID: 700343334_FLI
gtcgtggccgcagagatacacggtcgccgccggcatcgcgtcggtgctgtcgtacctccaccaggagtgcgagcagcgcgtcatccaccgggacatcaagaccagcaacatcctgctggacgtcaacctgagcccgcgcctgggcgacttcgggctggccaggctcatggaccacaacaagagccccgtgtccacgctcaccgcggggaccatgggctacctcgcgccggagtaccttcagtccggcaaggccaccgagcagaccgacgtgttcagctacggcgtggtgctcctcgaggtgtgctgcgggaggcggcccatcgacaaggacgagtgcggcaggggcggcgggggcaagaacgtgaacctggtggactgggtgtggcgcctccacggcgaggacaggctcatcgaggccgcggacgcacggctggccggcgagtttgacaaggccgagatgctgctgctgctgctcgtggggctgagctgcgccaatcccaactgtgaggagcgtcccgcgatgcggcgggtggtgcagatcctcaaccgagaggcggagcctgtgcccgtgccgcccaagaaaccactgctggtgttcagctccagcgcgtccgcgaagctgcaggagatcgccttctcctgtggcgatgacgtccgaggcggctactccgttgccaagcctgcatcaccaaagtccgagggagccgacattgaacgctgacgcgaagcagtcgataccaattacactactacagatttgttggtgtgggaatatataggtgcttcagtctggaaagtgctgatgaatgcaaattccatgagtcatctacggtctagagaagctggcattgacgcttgatagcaagcgatcaatgcactgatagtgaattactacttgtgtgattcatatatgcattggccatgtgctcgtgaagggaatataggtaataatcccctctgttgtatgaatgttcaatactgaataatggagtc

SEQ ID NO: 3893 - DNA, 898 bp, Zea mays
  Clone ID: 700343350_FLI
aagccaccagcgctcgtcacctccaatcaacaaattcccaatccgccgcttcccatcccgcgttcgccgctccatttgatcgaattcccgatggcgcccaaggccgagaagaagcccgcggagaagaagccgacggaggagaaggccgagaagaagcccagggcggagaagcgcgtgccgggcaaggagggcggcgagaagaaggggaagaagaaggccaagaagagcgtcgagacgtacaagatctacatcttcaaggtgctcaagcaggtgcacccggacattggtatctcgtccaaggccatgtccatcatgaactccttcatcaacgacatcttcgagaagctggctgccgaggccgccaagctcgcccgctacaacaagaagcccaccataacctcccgggagatccagacttcggtgcgcctcgtccttcctggcgagctcgccaagcacgccgtctccgagggcaccaaggccgttaccaagtttacttcctcttagatcgccgccgcacggagcgacggctctgtttcgtttcctcgtacttttaggccagtgctaataggttgctcgaggaacaatgtagtgtggaaatttctaatatattccaaattgtgctgatataatttgcttcaaaccttgaggaggcgctgttttaatttggggttgctacagccgtacaatttttggcgccaatatcttgcttcgtattcactggggttcaatcacctgaatcatgtaatttgttcagggggataaataacatttatcaaaggattgtgagatagtacagataacaaatcagctggcagtgctatgcaaaatctggtctgtggcaatgtttgccttgtggccagtttttcataattcatgtaatgtgcgttcatggacttct

SEQ ID NO: 3894 - DNA, 1791 bp, Zea mays
  Clone ID: 700343353_FLI
gtgttagatccgtccgcctgagccagagccagagcgaaggagtcaatctcacggcacgcgccatgtccgacgagtcgccgccgccagctccggcggccgagaagagtcagcccgccgagcaggcggcaggaggctggggcggatggggactctccatcttctcagagatctcccgcaacgcggtggaggttgctaagagtgccatcgccgacattcagcaaccgccggagcaggacacggtaccgggtagtggcgagaaggatcaagagaaggaaccggagggggaggaggaggaggaggagagacgcaaggcggctctggacaagttggagaaggccggtgaggactcaatcctgggccaggggctgaaggcctttgatagctcggtggagaccatcacgactggtacttggcaagctcttgggaccgcatggaggagtggttcactatttgttcaaaaattggaaaattcagcttcaagcttggccgaaaccattcagcaaggagaactgcctgcaaaagcatctgcgatagcaccgaccattttagagacagggaagtcatttacagcaaaaggaatggaagtgcttgaacgtgttggaaaggagacaatggagtttattgttgaagaaactggtatggaagttgataaaggcagtaccggtgaaggtgaccagcagacagaagaggaacagtttgaagaagtctcatttgacagatgcttctatatttatggggggcctgatcaattagaggagctggaagcattatcaagccactatgcattgttgtttaataggaaaaaggggaaacttaattctgaccagaaaacatattacgatggaaagcttaaagaaatagagcagatttttagtcttagcaccaatgctgatgaagatggaccagaatctgacaaagggaagaagactgaatcagctgacactgatactgacgctgagatgaagaagttatgtgaatctagtgttcgcaaggctgctaagatggctgcagggttcaccactgccttgggtgggctttctccaaacgagattatgaaacgaaccactagtaggcttgagaccattcactcagagggtgttcatagattatcggagatgtgctgccttgcagtttctcagcttctggtgctaggaaagtcagtaatatcttctgccaataaatcaaagaatgaggacggtgaaaatgatgttaagattgattggcccgaagatgccatttcaaaagccaaaataatcagatggaaggcgcaatccatctctgtggatatggaaaaggtgtctactagtttcgctacaggtatctcggatgtcgctgaagcttatgcggcagctatgcaaagtgctctcgccgacaagcaggacgacctcccaaatcagaagtctttacaggagaaggttaagtccatatccatccatctcaactccgatcagaccagcgctgtcagcaagctacaagatgccctgcggtacctggcctacgtcgtcgtatgcgcttcaatgccaagtgtgtgattgtggtgtgttccctgtctgagcatttgcctcaatcgttggccatctatgtacatttgcgtacacggggatcccttcaggcttcagggttgcagaattaggtacctcactaggacgtgttggttagttgtgatgttttgtactccattgctcttggaaagttgttgctctctttgtttttcctctgagaacaatctgatgtttaatatacatacaagtgaactgatgtgttcaatttaccgttgatggcttactgctc

SEQ ID NO: 3895 - DNA, 1207 bp, Zea mays
  Clone ID: 700343407_FLI
gaaagctgaaggtttcagttgtagcagttccaaaaacaatcgacaatgatatacttttgatggataaaacatttggttttgatacagctgttgaagaagcccaacgagccattaattccgcatatatagaggcacgtagtgcttaccatggtattggcttggtcaaattaatgggaagaagcagcgggtttattgcaatgcacgcttccctttcaagtgggcaggtcgatgtctgcttaatacctgaggtaatataaatgtagcttttactatgtttaaaactgccatatgttttcctctcacatgtaagcactaacagaagcttacaagttacaatatgaatgaaggtcccgttcactctagatggagaatttggtgttttgcggcaacttgagcatttgctaaagagtaagggattttgtgtggtttgtgttgcagaagctgctggacaagtatgctaaaattcacagctgtctggtctctatctacttctgttccatgtatatagtggcaataccgataagatgcaaaaaacctatagtttgactcgttttcttttaccttttgttacaggatctactccaagaatcaggtgcgactgatgcatcaggaaatgtgatattgagtgacattggtgttcacatgcaacagaagattaagatgcatttcaaggacattggtgttccagctgacgtgaaatacatcgatccaacttacatggttcgtgcatgccgtgccaacgcatctgatgcaattttgtgtaccgtgctcggacaaaatgctgtccatggggcatttgctggtttcagcggcatcacttcttgcatctgcaacacgcactacgtgtaccttcccatcacggaggtcatcacagcaccgaagcgcgtgaacccgaacagcaggatgtggcatcggtgtctcacgtccactggtcagcctgacttccactgatctgccatcgtcactgcataaccaaattcgcatagtttgaggtactagatgatttacaattctttcgctgatgtgctccattcacatcgtgaggttccaagattagttaataatgctaaactgagtggacttgtctggtttgttcacgaaggtggtgttgtccattgttccgaagctctggtatttgagaaatttgcatatttaacactataaagatgtgactccacagatttgccattttcaagatgggctacgc

SEQ ID NO: 3896 - DNA, 421 bp, Zea mays
  Clone ID: 700343440_FLI
atcagttctgttcctcttgctgtcaatcccatcactcgttgtgtaccggacatatggaagcatatccatgcaccacaacattgctctcatgtttctctctggttactttgtgaatggtccatactctctgatcaccacagctgttgcaactgatcttggcacccaagacgctatcaagggaaattcacgggcgctggcgacggtttctgcgataattgacggcactggttctgttggtgcagctctgggtcccttgcttacgggttacatctcaactagaggatggaatagtgtatttttcatgttgattgtttccatatcacttgccatcctgtttttgatacgactcgcaaagggcgagatagtagccaagcttagcacatggaattaaagtagtaatgtatgttcaattgaggatgct

SEQ ID NO: 3897 - DNA, 925 bp, Zea mays
  Clone ID: 700343445_FLI
gggcaagacatgacaggatattatccacgtgaaactgacaggtcaggataccattccctcagagagaacgacacacttggggcatcttatgaccgttacttgcgcaatgggatggcctccgtcggtgcaaatgacacttctagggctgccgggatgggtgctggattggctgcagggatgactgcagggatgggtgctggaatggctgcagggatggctggctatggtgttgatggtcagcgtatgatgggtgttgttggtatggacagcagagggatgggatatggtggcagacctgagccacctcttccgcctgatgcatcaagcactctatatattgagggcttacctgcaaactgcacacgacgggaggtttcacatatatttcgcccatttgttggttttcgtgaagttcgtcttgtcaacaaggagtccagacatcctggtggagatccacatgtgttgtgtttcgtcgattttgacaaccctgctcaggctacaattgctctggaagcattacaaggttataagtttgacgaacacgagcgtgattcagcccatttgcgtctgcaattctcacgctttcccggtccaaggtcagctggtgggcctcgcggtaggcgttaagacgtgcggacctcgtggttgccgaacctatcgtttatacgagcgatccaactacggtgggctaacgcttcgatatgcgctgaatttcggggcggtggctttttagggttcgtcagctcatttcgtgaatgcgtgaaagggacaatgcaataagtgatattctgccatatgttattagatgccgtataatgtgttaggcatggaaagttattcgacatactgtatctgctgccttagctattgtggtctactgtaacttcattaccttgcttcacatccgagacaatttgagtttgtt

SEQ ID NO: 3898 - DNA, 880 bp, Zea mays
  Clone ID: 700343477_FLI
gttgggagatacaagagcccagatgagcaccctttcttttccaaggatctgcctgagccccggttgccacctatgcaatacccaagggttttgcatcccattgctgattctatcaatatcaacaaagagatttggaaaatgtattttgatgaacttcttccaagattggtgaaagaaggaagtgatggtaatgctggatccagtgctctttgtgacacaacctgcttgcaggcactctccagaaggatccactatgggaagtttgtggcagaggccaagtttcaagagtcccctgaagcttacacgccagccataatagcccaagaccgtgatcaactcatgaaccttctcacatatgaaacggtggagcgtgctatcgaacacagggtggaggccaaagccaagatcttcgggcaagaggtgaacattggtgctaaggacaacggcagcccaccggtctacaaaatcaggccgagcttggtcgccgagctgtacagctacagaatcatgccgctaaccaaggaggttgaggtcgcgtacttgcttaagaggctggattgagtgtgtttacgtagctgtaaaactgccagatccgaactcctggtattaaaccataacatcggtaagtacccatttctgtgaagaggatgatccgaactcctgtcattaaaccagaacatcagtaagtacccagttttggggagaggatggaaaatataccatgtgtggcaagcaacatgcataatatcatctggagttgcgcttactcgcccctcgtgcgtaatgctaatggttgtagcctgtatggaatgctgggtcactttctttggctgggtgcccttttgaatcagagtaaattcgctcattgtcgctggaactt

SEQ ID NO: 3899 - DNA, 489 bp, Zea mays
  Clone ID: 700343518_FLI
agggggagagagcgatggctgtgtctcgtgaggcagcggtggcgaagtgctaaggcggcgggccggcggcagcagcagcaggctcacaacaacggcggcctagatccctgcaaggcacacagcaaggttgatttccctagttagcaatgaatgtggaattaaagggccatcttagaaagtgaagagatgagaaagcgaacgagaaattttcattgcctgagattctgtgctatatagggaggcacctgatgcaatgatgagtcattctactggaaagaactctttaccctcagaaactcaaaacaaattaaatcatagatcattttagcatggaaggaacaagatatttgtgatatcatctctttttgcatattttgtggatcatatatctataaatcttaccctgcactattgtatcatacatctttgaattgtaccctgcttgtgaattgtatcaaatctaagttttatgtgtgtggattgtgatgg

SEQ ID NO: 3900 - DNA, 683 bp, Zea mays
  Clone ID: 700343572_FLI
gtcggccgtcgtccctgcaggagcctcttccatggcgcctagtcttctccccatggcgagctcgtccagccactcgcctccactacatgtgctgtttcccccctcctccccttttctcaagtttggtcctcggcacccaagcttttgtgtccctgcagcacgtcgtgcctgtgcagccccggcagtggcgtcgtccatcccgttcggagcgctctgggtgttcgatggaatggttgtatggagctttgtgttgtgtgcagccccatctgcgacaccgtcgaaccccggtgagaacccattgtttttcttgtatttattcctcgctagtacatgtactcagcgtcgattaagtagaggctaaccatgtgtgtgtttgtgtatgcttgcgaggagagaaacccctaggttctgacggtaaagaaccgaagcccgtgggacgcttattaagtgttcggtagaaggaccgaacccaaaaccttcgtcgtgttcgcgaacgtcgcttcgagtttagtcatggtaaatcgatctgttatttccgttaatcgaataaatggttgatttgtatggagtcgatatttgtgctaaatgaaatgtgcgtggtgtcaagaaagcggttctccgttgcgacatgatttttagatttggattgcaaattatgtgaaatgaatggattcacgattttg

SEQ ID NO: 3901 - DNA, 1096 bp, Zea mays
  Clone ID: 700343632_FLI
acaaaccacaaccagctcactcaagaacaaagaacccaacccatggcttctcccaagccgctcctcctgctcgccacctcgttcctgagctgcggcctcctggtggccgccgactacgccccaatgaccctgaccgtggtgaacaactgcccctacccggtgtggccgggcatccaggccaactccgggcacgacgtcctggagggcggcggcttcttcctcccgccgctctcccacaagtccttcccggcgccggcccacccctggtccggccgcatctgggcgcgcacgggctgcgcgggcgccggcgcgcagctccactgcgccacgggcgactgcggcgggcggctccagtgcggcgggctcggcggcgcggcgcccgcgacgctggcgcaggtgaacctccaccacggcaacgaccagacctcgtacggcgtgagcgtggtggacggcttcaacgtgggcctgtccgtgaccccgcacgagggccgcggcaactgccccgtcctcgcctgccgcaagaacctcaccgagacctgccccggcgagctgcagctgcgctccccggccggcagcgtcctcgcgtgcaagagcggctgcgaggccttccgcaccgacgagctgtgctgccgcaacatgtacaacagcccgcacacctgccgcgcctccaagtactcggagttcttcaagcgagagtgcccgcaggccttcacctacgcgcacgacagcccctcgctcacccacgagtgcgccgcgccgcgcgagctcaaggtcatcttctgccactagagctcggagggctgggctgggctgggcgcgccgcgcccgcccgtgcgccgccgccgccaacaagtgtcgctagtagaggtagtaggatttgcggtgcgtgtgttgtctagtgtgtgctggaatagctgtgggcctgtgggctgtggctgtgttcccgtcgtgtctgtggcggtgtggcctgtgtaggctgtctgtactctgtagtatactgggttgttggatgcatgcgttctggccgcaagactgatgtcatgctgttgctgcttactacagtttgcagtctgaaataaaaacttgtttgatgagc

SEQ ID NO: 3902 - DNA, 744 bp, Zea mays
  Clone ID: 700343661_FLI
ggggagcccatggtggtggcgctttctccggccaccgtaggtgtcaatgatgatcttgcggccagtgaggccatcattgacacctacggtggctggggagcccatggtggtggcgctttctccggcaaggacccaaccaaggttgaccgcagcggagcctatgtcgcaaggcaggctgccaagagcatcgtcgccagcggccttgctcgccgcgccatcgtccaggtgtcttacgccatcggcgtgcccgagcctctctccgtgttcgtcgacacgtacggcaccggcgcgatccccgacaaggagatcctcaagattgtcaaggagaacttcgatttcaggcctggcatgatcatcatcaaccttgacctcaagaaaggcggcaacgggcgctacctcaagacggcggcctacggccactttggaagggacgaccctgacttcacctgggaggtggtgaagccactcaagtcggagaaaccttctgcctaaggcggcctttttttcagtaagaagcttttggtggtctgctgtgcttaatcatgcttttatatggcttctacatgttgtggttctttcttgatctgcaccgcgcttatcgtttgtgttgtactgccctaataagtggtgcttatgaggactgtttctggttttgctgcttatgttgtaatgctttgaaacaatgaaagaagctacaggccacagctattttgagaagtaatggaacctcgtgccgttttgatt

SEQ ID NO: 3903 - DNA, 1818 bp, Zea mays
  Clone ID: 700343663_FLI
agagaaggttctccaagtcaatcgcaatcacgaagagtcatcacgccatacgacacggaggacaccgagccggaggcgaagccggtgcgcagcgcgagagtagcggcgagtcggcgaccatcaagcaactgcatggccgcgttacccgccagcgcccccgcccccgcccccgccccctccgaggcggcggagctcgtgccgacgctctcctcgctggagccggtctacggcgcgggcgcgcagctcgacgaggcgcgcctccgcttcgcccgcctcggggaccgcttccacgccgtctacggcgcccgccccgcgctcttcgcccgctccccagggagggtcaatctgatcggggagcacatcgactacgagggctactcggtgttgccgatggccatccgccaggacatgatcgtcgccatccgaagggccaacggcgcccaggtgagggtcgccaacgtcgacgacaagtaccccctctgcgtctaccccgccgacccagacaaggaaattgacgtaaaaaatcacaaatgggggcactatttcatgtgtggatacaagggagtttatgaatactgtagatcaaaagggatagatctgggcaaacctgttgcgcttgacgtcgttgttgatggcacagttcctcaaggctctggactgtcaagctcagcagcctttgtctgttcagcaacaattgctatcatgggaatccttgacaaaaactttccaaagaaagaagttgctcaattcacttgtctgtctgagcgccacattggaacgcaatctggcggcatggatcaggctatatctatcatggcgaaacctggattcgctgagttgatagattttaatccaatccatgcaactgacgtccaactaccttcaggtggtacatttgtgatcgcccattgtttggccgagtccaagaaagcagagacagctgcaacaaattataataaccgcgttgtggagtgtcgcttagcagcgattgttcttgccatcaaacttgggatggataggaaaaaagctatctcctccgttacaaccctctccgatgttgaggggctatgtgtttcttttgctgggagagaaggttcatctgatcctgcagtagctgtgaagaaacttctgcatgaggacccatatacagctggagaaatagagaaaattacaggagaaggcctgacatctgtcttccagggctctcagacgtcattggatgttataaaagcggcaaagcactacaagctatttcagcgtgcgacccatgtctactctgaagcaaggagggtttatgctttcagggatactgtctcttcaaaactcagtgaggaaggcaagcttaagaaacttggtgatcttatgaacgagagccattacagctgcagcgtgctatacgaatgcagttgccctgagctggaggagcttgtgaaggtctgcagagacaacggagcactgggagcacgtctgacaggagctgggtggggtggctgcgcggttgctctggtcaaggagcccatcgtccctcagttcattctgaaactaaaggaaatgtactacaaatcaaggattgacaggggagtaatcaagcagggcgatgtgggcctgtacgtgttcgcatccaagccgtcgagcggcgcggccatactgaggttgtaggcaggcaggaaggcagaggcagccgctattcttttcacgagtgtggtggccctgtaaaacatggaataaagttgccatgaacaccgaacccttgtagtagtgttgaattatctcagacgacacacgcattaaattgatatctatctataggagtaacac

SEQ ID NO: 3904 - DNA, 692 bp, Zea mays
  Clone ID: 700343673_FLI
gtggtggggcgtggtggagcgggagggccccggccgctacgactgggaggcctacgccgagctcgtgcgcatggtggagcgagccggcctccgactccaggccgtcatgtccttccaccagtgcggtggcaacgtcggcgacacctgcaacatcccgttgccgccatgggtgctggaggagatgagcagcaacccggacatcgtgtacacggacaggtccggccgccggaaccccgagtacatctccctcggctgcgacacgctgccggtgcttaagggccggacccccatccaggtctacaccgactacatgcgcagcttccgcgagagattccgtgactacctcggcaatgtcatcgcggagatccaagtgggcatgggtccttgtggagagctgaggtatccttcataccctgaggccaacggaacctggcgtttcccgcggcattgtaggtggatgctcatgcctgtgcgtgcacacagacacatgcgccgtgctgttgtataacgtgcaccggagaaggggaactgtatgtatagattcagggccttgcaggttgcagagttttataggctgtaatcgagcaggtcggtaaggaggcaggcatgtcagaacttaggctgtcttcagttcatttgtcccatttggaactgtattgttataagtctaatctctgtagagagaattctat

SEQ ID NO: 3905 - DNA, 1452 bp, Zea mays
  Clone ID: 700343714_FLI
cttctatctcaattcatttgcggacaagggtggcgcgcagcttttcgtgcctgcgggaaggtggttgacggggagttttcatcttatcagccatctcactttatcactggacaaggatgcaataataattggatctccggattcatctcattggccagttatcgatcctcttccatcctatggtcgaggtagagaccttcctggaaaaagacatcagagtctgatttttggattaaatctgacagatgtaattataactggtgctaatggttcaattgatggtcaaggagctatttggtggggctggttccacaaccacacattgaattatactagaccacatcttgtggagttgatgtattctaccaatgtcgtcatatctaatctaaccttcaagaactcgccgttttggaatatccaccctgtgtactgcagccaagtgcttgtccagcatgtcacaatcctagcgcctttgaattcgccaaacaccgacggcgttactccagactcttccacgaatgtgtgtatcaatcattgctatgtaagaaatggcggtgatgttattgtcattaaaagtggctgggatgaatatggcatttcatttgctcaaccaagctccaatatcagcataagcgacatcacaggggagacaaggggtggttcagggattgcctttggaagtgagatgtcaggtggcatatcggaagtacgggctgtgggcctccgcattgtcaactcccttcacgggatcagaatcaagacggccccggggcgcggagggtacgtggagaatgtgtacatagcagatgtgagcatggacaatgtttcgatggccattaggatcactggaaactatggtgaacatcctgatgacaaatatgacagcactgctctccctgtgataagcaatattacaatcaaggatgttgttggtgttaacattggggttgctggtatattggaaggcattcagggggacaatttcagcaacatttgtctgtccaatgtttccctcagtgtgcaatctgcacatccatggaattgttcacttattgaagggtattcgaactcggtgatcccagaatcatgcgaacagctcagaagcaattgtagacagacatccatttgctacgatggaagcagttcttcagtaatgagtgtgcagcaaccaagacatacatcgcccaccagccggttgctagatctttttactggagttggcttcgttttagtgtaggtagagctgtgcttgttcttgctgcaaagggggcttgcttcatgtagtgagagccctattagtcatgtatatctgattcttgcaattatttgtgattagagtgccacttgcttcatgtatatagctgttgagatgactgtcggtgtatctttgcctgttttgttccaatttttggtatgtgaatgcaatctgcataactttatggttttgaacac

SEQ ID NO: 3906 - DNA, 668 bp, Zea mays
  Clone ID: 700343717_FLI
gtccttcagctccttgaggatgcgcttagacgcccccacatcatgcagtgcaggtcctgctggtgaggacatgtttcattggcaagcaacaattatgggaccacctgacagtccctatgctggtggtgttttcttagtgaacattcatttcccgccagattaccccttcaaacctccaaaggtttctttcaagacaaaggtcttccatcctaatatcaacagcaatggaagtatatgccttgacattctcaaagagcagtggagccctgctttgacaatttctaaggtcctgctctccatctgctccctgctgaccgaccccaacccggacgaccctcttgtcccggagattgcccacatgtacaagacggaccggccgaagtacgagtcgacggcccgcagctggacgcagaagtacgcgatgggctgacgaacgctttcctgctcgtctgggcgccattgttcccttggatttgttgttggtcgtatgtatccctgatccatctaggatcatcgtattgtattgtagtgtatgtatgtcgtcggcctaccatcgttgccatccaccatagtgaggtggttggacatgcttcgcctatatgcacctgtgcttgccttccttcgggtcggtgctgtttggttaatgttcatcgaagacgttgatttca

SEQ ID NO: 3907 - DNA, 1376 bp, Zea mays
  Clone ID: 700343735_FLI
gagtaattgaaattcctggtgatacttctgttattgatgctgtaaggactctctctgaacagaacataagggcagcaccagtactgaatccagaacctggggctcctactgattggcaggggaggtaccttggtgtcatcgattactcggcaatcatcctttgggtactagaaaatgctgagcttgctgctgttgcactctcggctgcatcggcaactgctgctggagttggcatgggtgctgttggtgctgttggggtggcagctttgggaacaactggcccagctgctgtagctggcttaactgcagctgcaattggggcttctgttgctggtggattaactgctgaaaagggtgtggcgaaggatgggctaactgctgcagatcatttaggggaggatttctacaaagttttacttcagcaggaacctttcagatcaacaacagttcgatcgattgttgagtcgtaccgctggtctccttttgtccccattacactggacacttccatgctgactgtacttctgttgctctctaagtacagattgcgaaatgtccctgtgattgagcctgaaaagcctatcatcaggaatttcattactcagactggtgttgtcaaagggctgcagcaatgtaaaggaagggactggtttgactacatttctgcacttcctctttcagacttaggacttccatttatgtccattgatgaggttatcaccgtcaacagtgatgatcttatcttagaagctttcaagtgcatgaaggataacaagattggtggtgtcccagtagtagaaggccccaaaagaaaacttgttggcagtgttagcataagggacatccgctttctgttgcttagacccaacttattttcaaatttcaggcagttgacagtcattgaattcatgaagactctaggctccactcttcctgattcagagagcaattgcctggtgaagccaccacccacttgcactcctgacgcttcccttggtagtgttattgacagcattgcatcaagaataacacacaggatatatgtagtggatgatgaccttgaggttgttggtgttgtgactctgcgtgatgtgatctcatgctttattcatgagccacccggttattgcgacaactatttggcttcagcgatggagaagcttgaggggaaaggagtcagatcagtggagaaaatttgagcttttctgtagcgtgaatgttgataataacaggtcagtatgtgaggaaggtttatttggttggaacggtgcattcgtgtcgtgttaatccagcaaatcctgtgtaggttaagtaacaaggcttctgtgctgttaaaaatattttactatgtcatttctttggacggttttctgaac

SEQ ID NO: 3908 - DNA, 787 bp, Zea mays
  Clone ID: 700343783_FLI
ccgcgaatcacagacgcgtctatctcagcttgctgcactgcactaccctgccctgccatcatatcgtacgtgagcccggccgagcgagagcgagggagaggcatggctgctccgaagctcgcgacgctggcgctggccgtgctcctggcggcgaccgtggtggctcccccggccgcggtgcgcgcggcgatgtcgtgttccaccgtgtacagcacgctgatgccgtgcctgccgttcgtccagatgggcggggccatgccgccccagccgtgctgcggcggcatccgcagcctgctgcagcaggccaacaacacccccgaccgccgcaccatctgcggctgcctcaagaacgtcgccaacggcgccaacgggagcggcacctacatcagccgcgccgccgcgctgcccagcaagtgcggcgtcgccctgccgtacaagatcagcaccaacgttaactgcaacacgattaattaagtgaggcgtcctgtgcgcgtcccgggcgaggaatgcatgcatggcgctggcggagagtaataaaataatgctactggtattttaagctagatcgaggtgtgcctgtctctagtcatttattatggtgtttaggaatcgtcgtctacacagttcgtaacggtgtatcgtggatgcatgttgccgcgagcagagtacgtaggcatgaaccgatgtgtgcgcttctgtctgtgtactctctctatgtagtaatgtgtgggtgctttgatccaaatgtattcgctcgtgagtcgtggaagtagatcgtttcagtatc

SEQ ID NO: 3909 - DNA, 606 bp, Zea mays
  Clone ID: 700343788_FLI
gttccgtatggtcgaagctgctgcagcctgtattcgacattcagcatccaggaggcctcggatgagccaggttgtgcgggtgcttgatagtctcgccgaggtcgatctgactaacggcgttcagccgggcaagagcgagatgttcaatgtcgcgaacacggccgagatcaggatgtttcagcggatggcgttcggcagccaggatttcaggaccgatttcagccagtccagctggagcagccagagcagaggccttgacgcatctggttccaggccattgtaaccctcgtcgtcgtagattcgtacatctaactagctagggtgtttcgtgatgggttttgtacgtcatgtaattctttttgattggatcaatcgtgtgattattcttttgccatccctgtcttgtacgactgacatagatcatgtgctgtgctgaggccctgcttgcctgtgcgaagacctgctaactgacgaagagagactgctgcgtttagtcccaattagtgaattgctgtatcgaatttcctgtaattagcagtgcttttgaaatcagcggttttttttacaaggaacgctcagttcgagctgaacttttggggaaagatt

SEQ ID NO: 3910 - DNA, 1301 bp, Zea mays
  Clone ID: 700343862_FLI
caaataccccgaacgtccacagcgagcgagaggccgcaaactcccgagaccgtacgaaccagacgattcaccaatcaccatggcggcgccggcgcggcgcaggtcctgcatctcctccggtggagccggagcgcctccttccgctgctgcttcgcctcttctccgccctccgccgcccgctgcgaggccggtccaaggccatgctcaaggggatggactactgactactccgaacccgagataaggacatgatttaagacatgtgtgtgtttcaagtagttcgttgattgggtgcaggcgcaggggtttcggccaggccaggccttgatgctgtggaaatgcctgtacgggaacaacgtttgggctcatttttacgacgagctggctggtttaaacaaggatttcaggaagatgataactgagcatgctgatctcaaggcattaattgtgaaggacattcatcggatagaacccgatgttacagatactggtttctattgaagatggttcagtgatttaaacagttatcattccttgcactaggggcaggacaactgtctgtgtttcaaatgaagttggttgggccatgaaatgtcagttttgcttcactagaagggcatgggtcaaccatttcacaatatcgacaatgtaataaaagcctcagcaataatggttcatgagcaaggccattttagccctcgcaaggttactgtctccacaagtggttttgtccctcagttaggaacccaattgcttgctgccgccagtcttaatgcaaggacagatgaggttagaaactggataatgactataaacagaaaggagaaccttaacttgcttcttggcactttaagaggtgaacttaacctcagaaaaaaaaacaaatagtgctatctgaatatgccatgctttctggagtgaacggcagtggatgatgccaaaagtcttttgtagagctactccaagggatcccatgcaagcaagataaacctcatctctttgagttccctcgacggttcccaatccaagcccacatcagacgataaaatgattgagttcggcaaacttttaattcaaggtgggctcactgtctttgttcggtcagcagaggggatgatcagatcagatggctgcctgcgggcagctcagagagcctggagactaccagctgcctctgcaccgtgcacctgagaaaattttgaggtcgtcttgtgatgctagacagtgcattacagtaaactggtcctgaggcctgagaaaattttgaggtcgttttgtgatgctagacagtgcattacagt

SEQ ID NO: 3911 - DNA, 1180 bp, Zea mays
  Clone ID: 700343886_FLI
tgtagatatacctcttgataaagaggccttggactggaacaccaggatgaaaattgcagcaggtgctgccaaaggactggagtacctacacgacaaagctaatccaccagttatttatagggatttcaagtcgtcgaacattctgttggatgaaagtttccacccgaagctgtctgactttggacttgccaagttgggtccagttggcgacaaatcacacgtctcaacacgtgtaatgggtacatatggttattgtgccccagaatatgctatgacagggcagctgacagtgaagtccgatgtgtatagctttggggtcgtcttgctagagttgattactggtcgtagggccatcgacagcaccagaccacatggagaacaaaatcttgtctcatgggcacgtcctcttttcaacgacagaaggaagctccccaagatggccgacccaaggctggaagggcggtaccccatgcgcgggctgtaccaagccctggcggtggcttccatgtgcactcagtcggaggccgcttcgcggccactgatcgcggacgtcgtgaccgctctgtcctacctggcgtcccagccgtatgaccccagcacagctttcgcttcaaggaggcttggtggaagcaagcctggcgagaacggcggcagggtggtttccaggaacgacgagaccggaacctcaaggtcgccggggaaggaccgggaggactcgcccagggacctcccggctatcctcctgaacaaggacctcgaacgcgagcgcatggtggcggaggccaagatgtggggcgacagggagcgcatggtggcagaggccaagatgtggggcgaccgggagcgcatggtggccgaggccaagatgtggggcgagaattggcgcgacaagcggcgcgctgagaatgggcagggcagcctggactcgccgcctactaggaacagctaggggactggggagagcctttcacacattccatccatgcttatcggttgtttatttccaggtcgattttcgttgccgcggcggcgacgggcagggccaggggcagggtcagggagggttagatgtacatttctagggcagcgtcgtactggatagtgaatgcatttggttgtacttgtaaattctcagaaaatttttgtgagaatgaaaggacgcattttgagttccactcgt

SEQ ID NO: 3912 - DNA, 884 bp, Zea mays
  Clone ID: 700343966_FLI
gcgggacgcctccccgctccccccccctctcgtcgccacgagtgtgtgctagggttccggcgtccggcgcgggcggtggcggccattccgatggaggcggatacggggtgtcggttggaggtggacgacgtcatctccttcgccgacgacctcgtcgcagtgctccgccgcagcgacgacgccgacgccaacgcgcaggtgatcgcgggcgcggggttgctgcggaccgcctgccgctccgagtccgaccacctccacctgcagctgaaagattatcagcaaaagatatgctcctgcaaggacaggacagacaaagcaaaagctgaaacgattgctgctgatgaactgagtgtactgcaaaataaaatggaagaaaatcttcaggaagataaacagcttcgtgaagaattgagagctacacataatgaccttgaaaacctagaccatcaaagggcttctatacaagacaggaagaatgctatcaagaagaaggatgaaaacatgcggaaagccacatataaactttccatgtgcgtgtcagttacaaatatcataccaaatttggaagatcgggataagatctcaagctatactgtcgacaagaatgggaagaagatacagaagttcgagtttgagaagacgacgccaccagttgagatctgtaacacgctttggaaaacaatttagggccgtgcagatcgttgttactgtctgttaacgaagattgtcaattgtacttgtatatatagctgactagctgaggatggtggacctctcatcttcaattgtgcttgaatttagggcgtgcaaaccgtcattagtgtctgctgattttacagtgttttgatttcagtcagtataagatcggaagatttgcgctttgc

SEQ ID NO: 3913 - DNA, 2028 bp, Zea mays
  Clone ID: 700343968_FLI
gtttactgtctactacaagcctaggacaagtccagctgagtttgttgttccctgtgatcgctatatggaatcactgaaacgaaattaccctatagggatgagatttaaaatgaggtttgaaggtgaagaggctccagaacaaaggttcactgggaccattgttggaaatgtggatcctgatcaagctggatgggctgaatctaaatggcgttacctcaaggtgaggtgggatgaagcttcctccattccacgtcctgaaagggtttctccctggcaaatagaacctgcagtcagccctccccctatcaacccacttccagtgcacagacccaagagacctcgctctaatgctgtagcttctctgcccgagtcttcagctccaacaaaagaagctgctccaaaggtcacattagagactcaacaacatgccctgcaaaggcccttgcagacccaggataatgtggccccgaaaagtgtttttggtgataacagtgaattggactctgctcataagtcctccctgcgaccgtcaggttttgatctggacaagagcaccattggcatgcagaggaagctgggttcagatatttggatgcgaatgaacagacctgatggttacagtgaaatgttatcgggatatcaaccacctaatgaaggtgcacggaattcgcagggtttctgttctttacctgatcagattgccgctggacgtcctaatttctggcacactgtaaacgctcattaccaagaccagcaaggcaatcacaatctgttccctggttcatggtccatgatgccttcaagtactggctttgggatgaacagacagagctatccaatgatccaggaagtcggtgggatgtctcagagttgtacaaacaccaagtttgggaatggagtttatgctgcactacctggccgaggcattgatcgatacccatctggatggtttgggcacacgacacccggtggtcgcgtggacgatgcccagccacgcgtgattaagcctcaacctttggtccttgctcacggcgaagctctgaaaatgaagggcaactcgtgcaagctttttggaatccatctcgacagcccagccaaatctgaacctttgaagtctccgccaagcgttgccacaccggcagctgagaagtggatggcagacggaatcgacacagacaaaagctccgagccgcacaagacgccaaagcaactcggtgctacacagacacaggtggatcctgtcccagagagatgcccacaagcttcaagaggcacacagtgcaaatcacaaggcgggtcgactaggagctgcaagaaggtccacaagcaaggaatggcgctgggcaggtccgtggaccttaccaagttcaacggctacacggagctggtggcggagctggacgagatgttcgacttcaacggcgagctgaaaggctgtagcaaggagtggatggtcgtgtacaccgactacgaaggcgacatgatgctggtcggggacgacccctggaatgagttctgcagcatggtgcacaagatcttcgtgtacacgagggaggaggtccagcgcatgaacccgggcgccctgaactcgaggccggaggacagcggcctcgccaattcgacggagaggggctccgcatctactgctgctgctagagaggcacccggctaccagtccgcctcgtcgcttaactccgacaactgctgatgccttggcagctagctggtcgtcccaagtagtagagaacaaggcaaatgtatccatagatctccttgtagcggagcttaatgcctttttttcccctttctaatatgcattggatgagcccgtagcgcaccgtagtagtatctaaagctggtgttctgagttggttggaccttcctgcagttttggtttctccttctgatgtggcaagttttagctggtcgcacctacctaatgtatgcttagcaaacgaagtcccactaagcgctgtacataactgcccctccctgcatcaactctaatatatcatctgcttaatcgtc

SEQ ID NO: 3914 - DNA, 874 bp, Zea mays
  Clone ID: 700343971_FLI
tctccgtctccgtctccgtctccgtccgcccggcgtaaagaaaagcctctctcaccacagccgccacgccatggccgaggagaccgacaccaggcctgcctccgcgggctcccgaggccgccccgcgcccgaggacgacgacagggaggagggcgagatcaccgacctcgcctgcgctccttccccgcccgccacgcacccgctcgagcactcctggaccttctggttcgacaacccgcagagcaagtccaagcaggccgcctgggggagctccatccgccccatacacaccttctccaccgtcgaggaattctgggggctttacaataacattaatcaccctagcaaattgatcgtgggagctgatttccattgcttcaagaacaagatcgagccaaaatgggaagaccctatttgtgcgaatggtggtaaatggaccatcagctgtggaagaggaaaatctgatacattttggctgcacactctgctggctatgattggtgaacaattcgactatggtgatgaaatttgtggcgcagttgtcagtgtgcgtgggaagcaggaaagaattgctatttggacaaaaaatgctgccaatgaagccgctcaggtaagcatcgggaagcagtggaaggaacttctggactacaaggactccattggattcattgttcatgacgatgcaaagaagatggacaaaggcctgaagaaccgttacacggtttgatcctgatgctggaatcccagagagttgtagcagtagctggcccaaatgcatgctgggtggttttatctattgctgatgagttgtttaagcaagatccattcctgtattgtactccataagccacttgggtgttgctttgtattgttc

SEQ ID NO: 3915 - DNA, 707 bp, Zea mays
  Clone ID: 700343992_FLI
attcgatccaactcctgagcactttctcctcgtccccgacaagccaatcgaagccgagatacggccatggactccaccggcaccggagcagggggtaaggggaagaagggagcggccgggcgcaaggtcggcgggccaaggaagaagtcggtgtcgaggtccgtgaaggccgggctccagttccccgtcggccgcatcgggcgctacttgaagaagggccgctacgcgcagctgtgtcggcaccggcgcccccgtctacctcgccgctgtcctcgaatacctcgccgctgaggttctggagctcgctggtaatgctgccagggacaacaagaagactcgcattattccgcgccacgtgcttctggcgatccggaacgacgaggagcttgggaagctgttgggcggcgtgaccatcgctcacggcggtgtgctccccaatatcaaccctgttctgctgcccaagaagacggcggagaaggcgtccagtggcgggagcaaggaggcaaagtcgcccaagaaggccgctaagtcccccaagaaggcatagactgactgtccggtgtgatctgatgtttagcagtaccttgttaccagtatgcggtgatgcgtaggctgtagatgggacgaatgtgctggtgtgtgtatgtgtcctgctgcaagttgccctttgctatttaaaatggaagaagaaatgcctggtttctctg

SEQ ID NO: 3916 - DNA, 629 bp, Zea mays
  Clone ID: 700343996_FLI
gacccgagaagcgcagctgcggccatggacgccaccggcactggagctggagggaaggcgaagaagggagcggccggtcgcaaggccggcgggccgaggaagaagtcggtgacgaggtccgtgaaggccgggctccagttccccgtcggccgcatcgggcgctacctcaagaagggccgctacgcgcagcgcgtcggcagcggtgcccccgtctacctcgcggccgtcctggagtacctcgccgctgaggtcctggagctcgccggcaacgctgccaaggacaacaagaagacgcgcatcgtcccgcgccacgtgctgctggcgatccgcaacgacgaggagctcgggaagctgctgaccggcgtgaccatcgcccacggcggcgtgttgcccaacatcaacccggtcctgctgcccaagaagacggcggagaaggcgtccagcggcgggagcaaggaggccaagtcgcccaagaaggccgccaagtcccccaagaaggcatagggtttggaggcggatccgatgttgtcatgtgtaggttgtaagcgggcaatgtgattggctgtgtatctgcttcgctcaagttgctttatgtcattcctaatggaataggaaatgccgtgtttctt

SEQ ID NO: 3917 - DNA, 1566 bp, Zea mays
  Clone ID: 700344012_FLI
tgctctttctccctctcgtggcgctgggcgaccgcctacgcaggccaggcgccgtcgccctaagctacgccaggttcccgggtcttggtcggtcccttcaccggcgaagagcacccaccagacgcgccggtgcctggatccggaggaagtgctgcgggtttcggcggttcgtctctctcgttgtttccggcggggttatgaaggcggtgggatacaacctctacgatagcagcgggactgatgacgatctccctccagcacaaaatagaggattgagaggacgggttttcagtgggaatggccgagcatctgctggggcatttccttacatgagggcaaataatgatttggagagtgaaatacatcgagttgagcaagatgcatatactggtgttcttagggcatttaaagtgcaatctgatgcaatatcctgggaaaaagagagcttgattactgaactcaggaaagaactgagggtttctgatgaggagcatagggagctattaaataaagtcaatgaagatgggagcatccgtcaaatgagggagttaagacaggcaggtggaatcccaagtggtctgcatcgtggcaacagggttttatatgatgcagaacctgggcccactaccaagaggcaaagggcatctcattcgattccttcgcaatctgcaggcctccagtcccctatgatgccctcccactcagtttcatctgcaaaatggggtcctttgtcagcaagaggcaagaaggcgaagatgatggcacctgaagatataagatgggaatttgatggacatctttcaaatcatgatggctggggcccttctggccctatgctgaagaggcacatgaccaacaacggtgctatggcaggttcaatcaggggaagaggaaggttatcgataaatgagcctataaaagactatgctccacctcaaaatgacatcaataggaattttgattatattgacataccaaatactgaaagtgttgttactgaggtggagagggtgttggccaatccaaatatgcctgaaatcgagaaggcaaggaaactgctgaaagatcaggagcagtcattacttgatgcaattgccagacttgatgaagcatctgatagcgatagtggtaactgatatggctatggaagaccgaaggggttctgctggggtcctggggaatggaacggcattgctacttagttgttggaattggaagattaacatgcatctgtgtatcacctacctcgaccacagaacaaacaaaccacattatggcaaaaaattgacatgccagaaaatggtgcctggaaactgttgatgcctgaaatgggatttgctggctacacaaaattgagcgcacgaggagcagggatatgcaaatgtcagaactgtttgaatggtgtttcctatgtagcgtagtaaaagtagcttaaatgttctagatgattagcacggatcacttagcattcctgattcagtataggtagatgtctaactctagcataatatccaacttggttgttcttgtactctaatgtgaaaaaggacgttgttcactcttttc

SEQ ID NO: 3918 - DNA, 1723 bp, Zea mays
  Clone ID: 700344029_FLI
agcttgggttggctgagtttcccgaagatagccgattcactaatgttgaatcagctcttgttgcattaggttgcaaggagtgtcttctcccagcagattgtgaaaaatccattgacctaaatccccttcaagacgtcattagtaactgtaatgttctgttgactgagaaaaagaaggctgacttcaaatccagggatctcgcacaagatcttggtagaataatcaggggttctgttgagcctgtacgtgatctactatctcagtttgactatgctcttggtccccttggagctcttttatcttatgccgagttgctagcagatgacactaactatggaaattacacaattgagaagtacaatttgaactgctacatgcgacttgattctgctgcagttcgagcattaaacattgcagaagggaaagctgatgtaaacaagaacttcagtttgtttggtttgatgaacagaacttgtactgttgggatgggaaaaagattgctgaacagatggctgaaacaacctctattagatgttaatgaaattaataaccgactagacatggttcaggcttttgtagaagacccagaacttcgtcagggactccggcaacaacttaaaaggatatcagatattgatcgtctaacacatagtctccgaaagaaatcagctaatctgcagcctgttgttaagctttatcagtcctgtagcagaatcccatacatcaagggcattcttcagcaatataatggccaattttcaacattgataaggtcaaagtttcttgaaccgttagaagaatggatggcaaagaatcgatttggtcggttttcttctcttgttgagacagctattgatcttgctcagctggagaatggagagtacagaatatctcctctatattcttctgacttgggtgtactaaaggatgagctttctgtggttgaaaaccacataaacaatctgcacgtggatacagctagtgatctggatctttctgttgataagcaactgaagctagaaaaaggatcccttggacatgtgttcagaatgtcaaagaaagaggaacagaaagtcaggaagaaactcactggcagctacttaatcatagaaactcgtaaagatggtgtaaagttcacaaattctaagctgaaaaatctaagtgatcaataccaggcattgtttggtgagtacacaagttgtcagaaaaaggtggttggtgatgtagtgagggtttcaggcacattctcagaggtatttgaaaattttgctgcagttctgtcggagttggatgttttacaaagttttgctgatttggcaactagttgcccagttccttatgttaggccagacatcactgcgtcggatgaaggagatattgttctactgggtagcagacatccttgtctagaggcacaagatggtgttaactttatacccaatgattgcactctggtgagagggaaaagttggtttcagatcatcactggaccaaacatgggaggaaaatccacatttataagacaggttagatttgcactttcatgttttttgatgagccactcaaggaatttatttataatgtcatggatttatgcatagatagatggtctctctaggtaccattaggtttaagtaaagctatttgtttgataatacgtaagtactgtcaaatttcttgtgtaaacaattttcataatatataatttatattttgttgtcat

SEQ ID NO: 3919 - DNA, 810 bp, Zea mays
  Clone ID: 700344140_FLI
gtgtactggaggcactacttatggtcagcttcctacatactctaacacgtctgctgcaccaagtgctctcataaatggaaatttcttgagaaatatatcttcatggatgcctagcagacacatatcaactgctcaggaaggagaagacacaaggtttcctgggagagcacgaacacttggttctgtaggaactgaacccactgcaagggaggcaagtgcgcatttgcatgctaggttgttggataacacaactccaagtgacccactaacgaatacacagcatacagctgtgaacacagtcagagctgatgcaacagtgacagctgagcaggttgatacatttgatgaagaacttaagaagctggttggaatgggatttgaaaagactcaggctgaagttgctcttgctgcagctgatggggatccaaatgttgccattgagattctgatgagtcagcagggttgaagtttgaccataaagtacaaattgaaaggaagcacggtatcgagccattttttgttcttacaaaggttcaaaaagtaggctgtggtttggggagtctgaaaaaggatggctgcaatcttgtttataccgggggtgcagaaacaacgtgcagcctaattgcaattctcaattcttccgactatagaatttatgtaaggtagaaagtaacgttggatgttctgttaaatacgaacaatcagaaaatgctgaatttagtctgaaaatagccagtgtgtttgttgggctgtaaacaagattgagacctttgactagattattgggctgtaacaataagactttgacgt

SEQ ID NO: 3920 - DNA, 1790 bp, Zea mays
  Clone ID: 700344141_FLI
gggagctttacagcaacaacataagtgggacaataccccctgaactggggaacctgactaacctggtcagtttggatctgtatatgaacaacttctctggcaatatccctgacagcctggggaatctagtgaagctgcgtttcctacgtcttaacaacaatagcttggttggtccgattcccgtatccttgaccaatatctccactctccaagtactggatctctcgaacaacaacctctcaggacaagtcccatcgactggctccttttcactcttcacccctataagttttgccaacaatccaaatctttgtggccctggtacttcgaagccctgccctggggctcctcccttttccccacctcctccattcaatcctccatctcccccaactcaatctactggtgcttctagcactggagcaatagctggaggtgttgctgctggtgcagcattggtgtttgctgttcctgcaattgcatttgcaatgtggcgccgtcgtaaacctgaagagcatttcttcgatgttcctgccgaggaggatccagaagtccatcttggtcagctcaaaaagttttcattgcgggagcttcaagttgcaactgataatttcagtaacaagaacattttaggaagaggcggttttggaaaagtgtacaaaggaaggcttgctgatggctcattggtagcagtgaaaagactaaaagaggagcgtacacctggtggtgagcttcagttccaaacagaggttgagatgattagcatggcggtgcacaagaaccttctccgacttcgtggtttctgcatgacacctactgaaaggttgttagtctacccatacatggctaacgggagtgtggcatcacgtttacgagagcggcagccatctgagccacctcttagctgggaaccaagaagacggattgcactgggatctgcaagaggactttcttacttgcatgatcactgcgatcccaaaatcatccatcgggatgtcaaagctgcaaatattcttttggatgaggacttcgaggcagttgtgggtgatttcgggcttgccaagcttatggactacaaggatacccatgtcacaacagctgttcgtggaacaattgggcacattgctcccgagtacctatctaccggcaagtcttctgagaagactgatgtttttggctatgggatcatgcttctggagcttattactggccagagggcatttgatctagctcgtcttgcaaatgatgacgatgttatgcttcttgactgggtgaaaggactgttgaaggagaagaaggtggagatgctggtggacccagatctgcagaaagcctacgaggaggtcgaggtggagagccttattcaggtggcactcctctgcacgcagggctcccccctggaccgtccaaagatgtcggaggtggtgaggatgctcgaaggtgacgggctggcagagcgttgggacgaatggcagaaagtagaggtggtgaggcaggaggctgagtcggcaccgctccgcaatgactggatcgtcgattccacgtacaaccttcgtgccgtggagctgtccggcccaaggtagccactccacgactccgatgaaagaaaacactgaattggccaagattcagtctaattgctgcttgtgtatatgaaaggtagcttttggaattgttagcgacaatttgaaaggatcgatcttttttttttggattcctcgctagctcagatgttggttacgctgaggttgtgttaaggtgaaaattcgtatatctaagggtgaatttct

SEQ ID NO: 3921 - DNA, 5399 bp, Zea mays
  Clone ID: 700344150_FLI
acgcgccgacgcgcggacgctcccgtccccatcgcgacccgtgcgtcgggtccacgctgaaccctttcaccggggcggcgaaagatctcagccgcgacgccgacgggctcgagcgccggtgagcgctcgcgcacccgggccaataaactggcaccggctcctcctcgcgtcgcagagcctagcctcgggatgacgtggcgtaccacaacaccaccacacctcactcagccctgcgggtctccgaccaaccatttctagaagcctccaaaccctagcgcaggaggaagaggagttaggaggagctccagggatggcgaaggcgaggaagcagaagggtgacggtggcagtacgggaggaggcgccaccgtgctccaccagaagctctgcctctccatcgacatggagaaccagctgatctacgggtacactgagataaaagttctagctgaaaacaacagatttgctctacatgctgacaatatgacgatccagagcatttgatggatggtgcaactgttgagtttgactattcccctcattggaaaaatgaaagtgatcaaccgaattggtcttcagtatcatgtttgaagactgctgctgatgctgcatgttcattgtatactttgtctctaaatcgagaagctacaccaaatcttattgtgtcatctgagagatcagtcaagtcaatgactgaacagcagttagatgaaaacagtgaaaagcatgaagaaaatagtggaaggcttgaagaacatggtggaaatcctgttcaaacttcctatgatcaaattgttaatggctgcagtggaagagggaatagaaaattctgcagtggaagaaggaaaggaaaaggaaaatgataaggaaaaagaagaggaaaatggaaatgagaagagcaaggaaactggaaatgagactgaatatgaaaaggtgaagaacataaaactggttcacatagattatattttggagaaggctgaaactggcgttcagttcgttggcaatgtcatgcgtagcagtagtcagacaaggcgggcacactgttggtttccttgtgttgatagtgccacagaacgctgtccatttgacctagaatttacagttagcatggatttcattgctgtcagcaatggtgacttgctttaccaggtatgcgttcagtcttgatcaagagatctggaggaaaaatattaatttccttgtttttgaagaactaacttttgtgaagtaacaaggaagctcttttagctttaatacacttggtattacagttcatttcttttttgtgcatgttagttatgttctgtttcctgatcttagaaggtctctagtaaggaagatccttcaaaaaaacttatgtgtacaaattgaacactccagttagtccacagtggatatccttggttgttggctcacttgaagttcttcctgacagaatcacagaaatgacataaatgtctcacacatatgtttattccctgctttggcaaagcttcagaacactattgcatttttccacaatgcatacaggtgctgatcaatctttttttttctgtgaaaagtgcttagattggtgttgattttattagtatctcaataagcttatttttaattgatttctgaaatttgcatttcttttgcagctgttatgaagactatctttctgcaccatttcccttaggtttatacaagcacatttttcttccatctgaaatgacaatattaccagcaagcttaggagcctccacatgcatcctcagttctgatatcttgcatgatgagaaagttatatagatcaggtgcgtttgtttctcttattttactaccctgtcccctctgatctagaccaatgatttgacaccatactttttaatgagatccgaatgcgtggctgctatagcatgtgcttatcaattgtgcttattctttattaaactatttttcatatcagctgttgttttgaagccctcctttcactgagagcatttagtgtcagtaagcaatccatgaatgcataatttctgctccagtatttgtgttttaactaagttagattctggtttagatgcctatatgacactacattcttgttaagttgatcatttaattagtttggtacctccagcaaatactgtaaatatgtttatggaatatgttaaatacttctgtatgtttgcttgccttatattttgtattttttctgtatagggctttgtaaacctgtcatcctttggataggagtgcatgaaaatctgcaatccatgtgtctgaatcatgacctgctattacttttactttatcttcctaagcattaaccttgcttctttgtatccccttaactggtggcttgataacactttgtattatgcattaaccttgcttctttgtatccccttaattagtggctcttggtaatgctttgtacacctgcattacattatagtcaagtattatgtttcataccttgcagtctgcactaacttgtaaaatagttcagataattggcacaagaacgaaactggcttatgcccttgcaaagcaatggtttggaatatacacaagtgcagaggagtccagtgacggctaactgctcagtatgtgaatctgatgttagtggtgcaactgctttgagctctactgctgcttcaagtgatttatatggaactcaagcaatcggttcatatgggaaagttcgttcattgaaagctgtagctgttttcaaatgttggagaagcagatgggaccagactcatttcggaaggtattttcatctttgatacggctattttctcatagttatttttttgtctaaataattgcaacactttggctaagcaactaaatcgatgtggagatgtacaagactattcatgatatgagttactgtgtttcagatactaatcatccttttttttatctatatccatagttgaaaattctagatagtatctgggtaggagtaaagtacctattggctgttttttttgtacgcggttatttcttaattgaagattatgtatatatagattgcttctgatagatttcaattgttcacaatttcagattttgcaggtgatagtggctccaagtcgtgcataaaatctagtaagatgtgacctatatttattgttagatgcattccatcttatcagtttatgcttggtaggagcaaaatggtttgatatgattagttatgaacatacatggtgaccttcatggaaataagctagtctgttcaagatagtttttttaggttaactagactgaatagttttgtagacctgtttgctggtctaatgctaatgctttattcattcagtgccgaaatttacagtggtgacttgtttgcatgatgtttagacaatttgtctgataagtggatcctgtcctgaccaaatgtctttttgtcaaagtggatcgtgtgatcctgtccttgacttgtggtttctattgagttccaactctagcctaccccaacttgtttgggactaaaagactttgttgttgttgttgttgagtgaattttgaggcttgcttctttcacgtacaaaaagtgaaataagaccaaatatttttttgggttcttattgatcatgaatttcattataaggcattatgattgtacacaaaatgagatcaagcttttctgcagggcatgagcttcctagcctctcttctcaagcaaattgatcggttcttgcaatttgacaactttatgcctggttataatggggtcttgactgtcagctgcattcgtacccttgtacgaatagcaaagaaggtgccatcttttgtatgccttgatcacatttttgaattggttgcccctttccgcaacatggacaaaccatggaaagttcgaattgaagctagcaggattcttattgatcttgagttacaccataaaggactcgatgcagctcttttgttgttcttgaaatatgtggacgaagaaaagtctttgcgaggttggattgctagagtactttttgatggttttgtatgctttgctatcttttgacatggaagctgttgaaggagcgacaaagttggctgttcatgtcttgcgtatatgtcaaacaagtattgttcctcacgccaatgatcaaataaattttggcaactctagttggtcttcttcatctgcttgctggcacaaaggcatacaataacatatttcttcgtcatcaagtgttctgcatattgcaagttgctgctggaaggtccccaacgttatttggtgttccaaaggtcctcacaccccctctggtggtcaacgacatcttcagtgatcagcacactaaagatgattcctcaattcctcaaccatcatagtctcaggaaccttccactagcactcctagtgtccgggaggtcttaccgacctctggacccactcaagatgctgataatatatcttactgcagtgaaagaaggaatgtggtcaaaattagggtgaagcttactgcatcttccagtaaagcatctgatgctgaccatagaggccattctgatggcgcaagaaatgaaaatgaaccgggtcaatgcagctcaatgtcaatggatgcccccatggctggagcagcaaatgaaccattaaatgtaagcaatcataacattgaggaacaaaactcatgtcacgaccttggatcaaggatgtcggcaagtgttagcaatgctaaactaatggacagacatgatatttccaaggagctacagtgcactgctgattccaggctggatactgttcccaaggatcagttctgtcctgccattaatccgccggaagttttagacaaacctggcagtcagcttgaaggtgtctccaactatgatgtaaaccaagctccagagactgaacggagtggaaacagaagagagaaaaaaacaagaaagataaaaagctgaaacgtgacgaaaaactagataaaaaatatgacccagagtatctagagaaaagctccttaataagaaggaaaagaaagagttggccagaaagcagctagaaggtgaagagctacccctgaacagcggagagcagtgaacccttcaggttcacaggaagttttgccttcaaggccaccagctccagttctaagtgttgaaacacctgttcgaatctctgaaccccaggtatcaagcaaggaaacagctgtagatactgcacgtgcagcagccaaaccaaggataaagatcagagtcaagcccttggtaagaaaatctgaagggaattaaaaaagattgtagaattgtggccagtctgccatcatttgtaaggattactgtacagcaggaaaaatgcgggtttagttattttgtgaatggctgatgtatcctgtaaaaaaacattgctctgctctagtaatttctggggtaatcgaaatctgagttctagggt

SEQ ID NO: 3922 - DNA, 1516 bp, Zea mays
  Clone ID: 700344168_FLI
gaatattgcttcataatttgctgtcatctttgagccggtcaacgggaaaacatgctggtgctctagaaatggtcagatctggtgtttgggggaagttaatccgctattcggaagacatgcagctagagagccaattacgagtctatgcactacagctgatgcaatgtatcacaggaagaaaccttaaatctcttccaaatgaaatggtgtgtcaggttgagccatgggaatcatggtatgagcatggagcgggtgctgccatagctgatgagagtatcaactcctctagcagcatcacagggactcttgtcgcacttagatctactcagatggtcgctgcagttctgcctgacgctaatatcactccagaaaacctagcaactcttgactctgcagtatcttgttttttaaaattgtcagaacgtgcttctggtgtgagcgttgctgtttttgaagcagtgctagaagagtgggagcaattgttctcccccaaagaagagcatgttgcacctcatgaatcaccaaaagaaacaagtgactggagtgatggatgggatgatggctgggaggcgctaccggaagagttggagagtccaaagaataaacaagagggtgtgttgttatctgtgcatcccctccacagttgctggatggagattatcagaaaacgtgttgaacttggtgagctgcacaaggtacttgaacttctagaccgagcatctttgaaacacagcgtgttcctagaggaagaagaagcacacagcttggttgaacttgtatctgctctggactgcttcatggcccttaaaactgtgttgctactcccatatgaatctctgagactgcagtgcctgcagatggtggaggtgaaaatgagggaaggaatcgtgtccacctcatcaaatgctgatgatcaggagctccttgccttggttctttcctctggaactatgcagaagatcatcacagaagaggcatactctaaatttttctcttacatatgccatcttgtcgggcaccttgcaaggtcattccagactgatctcctcgtacaatggaacgaagcaacatctaagatcaacagatctttactgttcgctagagttctgtttccatgttttgtatctgaactggtcctcggagggcagtatcttctggctgggttcgtcatctcgagatggatgcacacacatccatctctgggcctgatggatatcaccgagaccagtgtgcgatgcttccttcaaggccaggttgcccaacttgatgaggtgggagggagcgatgctgctctcactgacggtgaagtttgtgtaaggcacacaatctccaccctacagccgaaacttgtttctcttctgcagtctgcattagctctttcgaacaaagagttgtaggcaaagtcctgtgtagttaacttttacactcttgctgtactaccggtgtacctgtaacataaaatgtttttttagataatggtaaaagtgaatggtggaagatttcatattgttatccc

SEQ ID NO: 3923 - DNA, 926 bp, Zea mays
  Clone ID: 700344233_FLI
gcgtggccgcaagtcgcgcacgagtcgtggcgacggcatccaagcaaggaaaagaaataaagcggaaaactttaaacgggtacgcaggagatccagcgaaatggcggcgccgccgccgtcatatccagcggccttgaagccggagatcggccctgacggcctcgctcgagattctcccgtaatcgcctacaccgagaaggtcattttggaggagcagctgcagctgaagaaatacattcaggagaactattccaaaattcgtgatgtagaaaaggagttagagagtcttactttagaaatgaaactgacatctggaccaaagaaagcagcactagagcatctgaggaagaagattgaaatatcaacagagaaaatacgtttagctaaggtgaaagaggaacatgcaaaaaagacttgggaagttgctgcacaagttgttaaagacgaagaggatgctaagcagaaattatgtgatgacctaaaccatctagtccaggagagtgctgcttcccaatatgcaagattggaggagctgaagaaacgtttagaatctctaaatcccataagggattctgttaatgtgtcaggtgtttatactgcacagcatgctactctgaattcagtacctcagcaaccaactgcacaaaatcctgcagatgtaactggccgtcagaatattgccacaaagcctgcttctatgcaacagcagcctatacctgcggaggcagaaaagaagagaagaccctcgaattcggcaagagggaggggtggtgtcatgatccttccgaagggaagagagggttctgggtcaggatggacaggtgctgggtttgatgtagatagccgtacatgacgcccggtatttcaagttattcgtaccattgaaaccatgctctccaaaattcacaagaattagattggtcacc

SEQ ID NO: 3924 - DNA, 729 bp, Zea mays
  Clone ID: 700344278_FLI
gactccaaagccgtcgccttcctatccatcccttcctcgccgcgggggtcgcctgagatcacataaacaatggtgaaggctgttgctgtgcttggtagcagcgatggtgtcaagggcaccatcttcttcacccaagagggagatggccctaccactgtcaccggaagtgtctctggcctcaagcctggcctccatgggttccatgtgcatgcacttggtgacaccaccaatggctgcatgtcaactggaccacactacaatcctgcgagcaaggaacatggagcaccagaagatgagaaccgccatgccggtgatcttggaaatgtgacagctggagcagatggtgttgcaaacattaatgttaccgacagccagatcccactgactgggccaaactcaatcattggcagagctgttgttgttcacgctgaccccgatgatcttggaaagggtggacacgagctcagcaagagcaccggaaacgctggcggccgtgttgcttgtgggatcatcggactccagggctgaactgaaacaaatggtcgctggacttcgggggcgcctgagagtgccgtcaccagcaggctagaataacatcccgaagacatcgtgaaataataataagagcgcctgatatgtgatcagtggtgtacttgccattaagcacctgtggcaaccgatgagctgaactgtgttggactgttggctaaaatgctggttcgcctgagc

SEQ ID NO: 3925 - DNA, 1014 bp, Zea mays
  Clone ID: 700344296_FLI
gcagagtctatctccaagataaggaatgagaaagctcgacgatacatgaacaatatgaggaaaaagcctcgggttccctttactaaaaagtttccagggatagatcctatggctctccatttgcttgaacgtcttcttgcttttgatcctaaggaacgaccaagtgctgctgaggccctggcagatccatactttaatggattagcaaataatgaacgtgaacccatagcacaacctatctcaaaacttgaatttgagtttgagaagcggaaactggccaaagatgatgtccgagaattgatttaccgagagattttggagtaccatcctcaaatgctacaagaatacctacaaggagcagaccacaatcagatgaccttcatgtatccaagtggggtggatcgcttcaggcgccaatttgctcatttggaagaaggtactgcaaagggtgaaaaaaacagtccacagctgcgacagaatgtttctttgccaagggaaagagtaattggcaataaacatggagatggcaatacaggtgataagctagcgcatgcctcagtgacggatggcatcagccaaccgagcttgagtgagagaagctttctgaagagtgaaagcatcagtgcttccaagtgtataggtgaaaaaccgaagcatgtcaaagatggagaatctgttttagagagcgtggatgaaacagtcgatgatttgtcgaagaaaattcctcaactgaaaacctgatttttctcaagttcactggagcaatgaatagctcgtagtatggcacgttaggttctcaagacgatggacctacggcaaaggtctatagccaatgagaccacaagttctaatgccagtaattctgttgtgatgtaaatttcctcccgtttgtgtttgtacttcgcgactgcaaacaacctgtttctgactaaatggctcgtgttttcctccgtggagccatcaccatattctgtaaattttcagttggaagtgaatcttcagctgcagaggcat

SEQ ID NO: 3926 - DNA, 706 bp, Zea mays
  Clone ID: 700344331_FLI
gaaataaagagggagaggcgaaaacaatctaacagggagtctgcaaggagatctagattacgcaagcagcaagagtgcgaggagttagcccggaaggtagctgacctaacgaccgagaacagcgctctcagagcagaacttgacaacctcaagaaggcttgtcaagacatggaagcagaaaattcacgtctgttgggtggggtggctgacgcccaggtaccaagtgtcacgaccacactgggaatgagcatcgagccgccgaagttgcagctgcagctgcagcagcatcatgatgaggagggccagctccacaagaaatctagtaataacagcaatgggaactgtgctggaggcagccacaaaccggaggctaacactactaggtgagatacagaggtggatgaggaagtgacaaagatgagatgagatgaggtgtttcttatctaaccacaacacccatcatcggtcagtgtgtgtgttttttcttagcgaagctgtcgttttagtcctcgcagcccgctggggccatgtagagtcgcccccactgcagccatgtattatttatggctcgtcgcggtgtgctttgtgtttttttgtgtgttgtgtaaaaactattgatgtaacaaaacctagagagcctagaggttttttttatgtctgctaactcctgacgagggatgtaatgtaaccggccaatttgttgcct

SEQ ID NO: 3927 - DNA, 1157 bp, Zea mays
  Clone ID: 700344343_FLI
catcaccatcccttccttgaaccctctgcccacacccatcacagccccctcaacaaacatcccttctccttccaccatgctgccgccggttccggtcatatatccgctgccaacgccgtcaacatcctccccaccagctgtgccggtcaccaatcctgctgtcaccacgccttccacgtcccctccgtcgacaccaacaccattcaacaacccaccattgttgaacccaacgccgacccctgctcctacagtcacggccccagctgcttcaggccgggaggtctggtgcgtggccaaggctgctggctcaagtgaagccgcgcttcagaacgcgttggactacgcgtgcggcattggaggagtagattgttcggcgattcagccgtcagggagctgctactatccgaataccatccaagcccatgcatcctacgcgttcaacacttattaccagagaaaccctgtttcttccagctgcgactttggggggacggcaatgctcgtcactgctaatccaagctctgggagctgtgtctttgcatcatcattgccatcgtcgtcaagctctactgttggatatgatcccgcgtccacggctactccatcgtcaccgtcgtctggttccgactcgggagcacccgtgctgaatgccagtggggcaggttcttctgaatcatcagattttggctttgacatcccaggagctgtcaatttgggcagcggttggaggtcagtctcaccacccaactggccctgggcagccctggtctggattctagtagcattgtgtgtgcacaaagaagggatggtctgaaaacctgtgagagcatctgcagtattttggagacagattgcaaagtagccaggtggtgtagagaccagtagagagctacaaagctagagaatcggaccttagcatggctaagtttatcgatgtatgtatgaagtatggtgctccagttcgtagtagcaactgggaactgatgtagtcctgatggatggacttggactcaccctgatcggtcactcaggcactctgtagtgtagatgtaggcatgtagctgctgctagtagtagtagtaatgcaagtactgctttgcatcgtatgggtgagagagttgaacaactaatggaatgcaaatgtgccgttttgtttt

SEQ ID NO: 3928 - DNA, 738 bp, Zea mays
  Clone ID: 700344346_FLI
catttgtgttaatctgaaaaatgtcaatcccaagagttgcacaaggcgcttctcaagaggcagcgtggagagcaatcatgtcttgagagaaatagcttcacctgaactcaacatactcgaggacaaggtccatgatgatagtgaagatagtccaagcttgagcttttcggaaatacagaggaagtggaaggaagagttggaccaggaacttaaaagagagcgagaaatgaggtcgggtggctatggtaaagcaccatcaccgtcctcaacgagccggagattgactggaaaacgagatcgcagtcctgtgtattgagtagagaatcagaatacaacacagcaggactcgtatatttgactaaccgcacagtgtcatcgattggtggccattgctagtacagtgcagtgccaaccttcgtatgacctgacagaacctgcttgacgaccaaatccttttggtccttgtaaggtaaattaggttgagcgagccacttgtaagcgcactgtgcatcggaggctatcatgatctgcgatgcctgccttcgcagccctttattgccagcatgaaatcattggggtggcgatttttatgcaatgttcaagcttcatgcaattttggatgacaataggtgcatgttgtacaattgtcttctctttatttttcaaatgtttgtaagtttacctgatgaccgagaatccataattcgttgaaccaaaagtatggaagtgttcgtctcg

SEQ ID NO: 3929 - DNA, 2225 bp, Zea mays
  Clone ID: 700344373_FLI
gtttggctaagagcgatcttgatcttcaagttgatgagctgagcagaaggtcagtggcgcatgaatcagaaaatagtcacttaaaggagtacatcatatacttggtagagattctcagaactcgattagtcctttcagagtttgatttggacaccaatcaaagtgtctgccaggagttggttgttaaacttgagaattgcatgacacagctggcgcagaaggatggtgagctaatggaagcagaggaggaagttcaactattgcaagaaaagaaccaggaactctgtggagttgttagatctctacaggttgcaactgaaggtgctaaagtggtggaaggagaactggagaagaaaatcacaagactgattgaacagtgttcttgcaaggatgtcgaaattttacttcttcaccaagacaatgaggcattgcaatcagaagttgagcaatgtgagagggaatttgttgttctgatggatgatgcaattacctcttcagtgaattctgcggtgtatgaagaaacagcattcaagcttatgatgaatggtaaagctacagagaatagagcaatatccctaaaggagttgctaatgaaggaggtctcttcccgagatgctcacattgaggagttgcagaaaaagttggctggcattcaggacgaacatgcagaactaaaagctgagttgaacacacatctagctctcgtagcatcattggctgatcatgtcagtgtgttggaagaagattgccgttctctgtcaaaaccctgtagtacagaagacaaagaggaaaccgcatgtgtacatcatgttcaagagggcaatgatgggctggaatctcattgcttacccaaaggaactccagagttacaagggttgattgcaagaatagaagcacttcaagtagttgtatcaaatgctaaagatcgtcaagatcaggagtcagctgagtctgcagctaaattggcggcagtaagtgcagaaattcaagaccttaaagcaagaggtggctcacgcatggagggaaaagaaatatattctgatcacgagaaacaagatgttgagatctccaaagggaagcaagtccagatcatgaaggatattgagctggaccaaatatccacttgtccaccatatggtgctcgagctgccctctatccgcttggaactggtgcaaatgccgaactcgatgacgatatgcttcagctgtgggaggctgcagagaggagctgcaagaaccaaacggccaagtcctcgtcatctgagcacgacatacaagccgtcgaggatctgaagagtgagcacccttcgtctgagctagcaaggggaagagaccttggaatcaataagctagaagcgtcgaagggagctgcagagcctcatgaggcgtggagcaagaacgtacttgagaggctcacttctgatgctcagaggctgttgagcatccaagcgagcattgaagagctgaagcagaaaatggaggggcagtcaaagggaaaatcccctatgaactctgagtacagcagtgtgagcgctcaggtgcatgagacagagggccatgtcttggaacagatcaatctgaacaacaaattgactaggacggctgaggactaccccacactgtcagataatatgagcaccgagcgagaagggtattccagcaggaggaagatctccgagcaggtgcagaaagggtcggagaatgtggcaaggttggaactggagcttcagaagattcagtatgtcttgctgaagcttgaggaagagcacgagtacagaaggctcaaagtctctgataagcgcactcgcgtgcttttgagggactatctgtatgggaggaaggaccgcggtggcgggcagaagaaaaagaagagggtcccgttctgtggttgtgttcgtccgaaatcaagaacagagccgtagcctttctttttgttcgacctgcacctccaagtggtagccgtagtccgaaatcaagaaataaaacaaaatcgacctgcacctccaagtggttggctaagtgtcgcctgtgcattggaagaggaggtggtgttcctaggatccctttgtaattgagttagcattttagtatcttttttcttttatttttgaaactagcattatagtatcctgatgaagaagcttatcagcttatgtactaaattttttgttttcctgtctaaatgaggccattctggctagtttaatgcgttaatactgtcgtat

SEQ ID NO: 3930 - DNA, 1958 bp, Zea mays
  Clone ID: 700344392_FLI
atctccaagaatattgtaatgaattggagaatcgactactggctcggtttgatgctgcatcacagagacgggagttgtctacaatggcagaatgtgctaaaatattgtcacagttcaaccggggaaccagtgctatgcaacactatgttgcaatacgaccaatgtttattgatgtggaaatcatgaacactgatattcaagttgttctgggtgatgaggggttgcaagctgattgcgacagtattgcagatggtctctctacattgtataaggaaattgcagatactgtgaggaaagaggcagctacaataacggctgtctttccttctccgaatgaggtcatggcaattcttgtccagcgagtgctagaacaaagggtaacgaccattcttgacagaattatagtaaagccctctcttgctagtttgcctcctctcgaaggaggccttctacaatacctaagaattctggcagttgcatatgacaaaacaaaagaactggctaaggatttgcagtctattggttgtggggatttggatattgaaggtcttactgaatccatatatgttgcccacaaagatgagtacacagaatttgagcaggcatcactcaggcagctatttcagtcaaagatggctgaactgagagctgaggctaagcaacaatctgagtctactggctcaatcggacgtgcaaaaggagcatctttgaccacatcaccacagcaacagatatctgttactgtagtaacggaatttgttcgctggaatgaggaagccataaccagatgcacactactgttttctcagcctactactgttgcagctaacgtgagatccatatttgcatgcttgcttgatcaagtgagccaatacttaactgaagggcttgaccgtgctagagagagtttaaatgaggccgcagctttgcgggatagatatgtcatcgggacaagtgttagtaggagagtggcagctgctgctgcttctgcacaagaggtggcagcttcagctggtgagagcagctttagatcctttatgattgctgtgcagcgttgtaccagtagcgtagctattcttcagcagtacttctcaaataccatatctcggctcttgctacctgttgatggtgctcatccgtctgcttgtgaagatatggggtcagcagtatcagtagttgaggctgctgctcacaaaggactgctacaatgtattgatactgttatgtctgaggttgaaagattgttgtcttcggaacagaaggctacagattatcgaacaccagatgatggagctgcaccagatcatcggccaactaatgcttgtataagaattgtagcctatctctctcgtgttcttgaggttgcattcagtgcccttgaaggcctcaacaaacagtcctttttgactgagctgggaaatcgcttgcataaggggctgcttaatcattggcagaagttcacatttagtcccagtggtggcctacggttgaaacgtgacataactgaatatggggatttcgttcgtagcttcaatgccccctccatagatgagaagttcgaactgttgggaattgtggcgaacgtcttcattgttgctccagaaagtttagcatccctgtttgaaggaacccccagcatccgaaaggatgccttgaggttcattcagctccgggatgattataagacagcgaaaatcgcttcgatgctcaactatatcatgtccgagtaatgagtgaagtggaaccgttagaccgttacactttgctgctctcgtggactattgatgccgtttgtataaatgaccttcgaaattatgtttattcttggttccaatttatttgttttcctatcctttttctttttgggctttgctcaatttgagctgtacatgtggttcaggtcctttagacctctacttgtataaatgatgagaaatttctgtggctgtttacgtgcg

SEQ ID NO: 3931 - DNA, 795 bp, Zea mays
  Clone ID: 700344454_FLI
aaaagcccccaggggccagggctagcagcggcggcgtatccctaatcccacctccagtctctgggcaccaaatttccggcggcgatggcggcggctgtggcgaggtcagggttccggcgcatgttctccgtctctgccttcgcgccgccgaaggcgcccgccgcgcgccccaaggccgacccatcccccaacctcttcgtctccggcttaagcaagcgtaccacaagtgaaggacttagagaagcctttgcggagtttggtgaagttttgcatgctcgagttgtgaccgatcgtgtcagtgggttttctaagggatttggctttgtaaggtatgctacgaccgaagaggcagccaagggaatagagggaaaggatggaaagttccttgatggatgggttatttttgcggaatacgctaaacccagaccaccaccggaggaaacagggatgaattcgcagccccagcagtcatggggagctccatcaggttcctggggtgcacagtagatgaagtgatattgtgagagcccctccctgtcccagccctagggctcgtagcggatcgtgagggatgattttgtgtggtgtgtcgcaggtgtgaaatgcctttgttgtcccaatattcctaccgtgttgggggtggtcgcttgctcgcgtccacgtctttcacatgaattggttactgtggtagttgtagttctggatacggtaccaaaacaaaagtattgctgtcaacaatctgcaacagccgggaaaacagtcgaaaacctttgcaaataatacctgctgccgtgg

SEQ ID NO: 3932 - DNA, 437 bp, Zea mays
  Clone ID: 700344463_FLI
ggaggtggtaggctggtagcctatataaacgcggggagtggctcggttgaagtggcaacaccagcgcaaccacgttacgcaccatagaacatacccgtgagaagctaagacccggccgttgctcaccacagcatcatcgccgcgccgtgctagctcaaggatggagaacaacaggcagcagcagcaggcgccgccgccgccaggctacccgacggcggctgcttctgcaagagagatctgcttaaattattctatcgtccagagctgcagcaacacctgatatgtttgtttggggtgttattagtagggagagctagctcagctttattattgttaataataattctgtgctgtacgtagctatagcaagcatacgtatgtatacacgtatatgtatgtgttttaccgtgacttgaatgtttggaaatggtgatttc

SEQ ID NO: 3933 - DNA, 1091 bp, Zea mays
  Clone ID: 700344496_FLI
ctcaagcatcctctatttcacaaaaggatgatacatatgaagatattccgaatagtcagatacgcaaggtcattgccaaaaggttgctcgaatcaaaacagacgactccacatttgtatctatccaaagatgttgtgctggatcccttgctcgctttcaggaatgaactaaaagagctacatggcattaaagtttcagtaaatgacatcatcataaaggctgtggcaattgcgttgcggaacgtccctgaagcaaatgcttactggaacaatgataaggaagaaactcaaaagtgcgattcagttgatatatctattgctgttgctacagagaagggcctgatgaccccaataataaggaatgcggatcaaaagactatatctgcaatatccgcagaggttaagcagctggctgaaaaggcaagagctgggaagcttgcacctaacgaatttcaagggggaactttcagtatctcgaatcttgggatgtaccctgtggaccatttctgtgcaatcattaaccctccacagtctggcattctcgcagtgggtagaggaaacaaggttgttgaacctgttgtggacagcgatggaaccgagaaggctgctgcagttacaaagatgagcctgacactatctgctgaccatcgtgtatttgatgggcaagtaggaggcaagtttttcacggagctggcgctgaatttcagcgacatcaggaggctgctattgtaaatgaaaggaggcaattaccgtgttttgacgtattctttgggagcgaaaaccgctcaggaaaagagaacatttggatgcaacccgtggtctgctgcttgatcggcatcccgtacaaaagtaaccaattttgtaataaatttataataagaatgcactggcaccttcacggttttttaacccgttttccattagttgggaggaggcatgtcctgagaatttagcaggtacggtgccattcaacttcgtggttccgcaacaatgaccacccttagattatgcaatctgagcggttctggatggacgcccattttgttgatgaccttgtgatacatggaagtaataacagaatgcttttgttac

SEQ ID NO: 3934 - DNA, 1633 bp, Zea mays
  Clone ID: 700344659_FLI
aaaagaactccatctgcttctggcttaccagaagattatcctaaggatagtgacttgcaacaaccggttttagatagcttctcagtggtttcatcttttcaagacaatatatctgggaaaaaactgtttctggtgtagcaggcagtgagattctttctttaagtttagcaactcctgattataaacatgaagatggtttctctgaggaagcagtatgcagaacaaagaattatactggaacttcctcggtagatccgaggcatttagacatggaggggcactctatttactctgagggagatacataccaaggtccttgtcaagatctaggcagacatgaagaacaagagagctgcatgtctattcctatgcaagccaaagaaagtggaggggttttgaggtctagccacacgaaagggtcagttacagcagcccaaattgatttggcaggtgatgcccatcttattgtgagtgataatgctgctgccaagcaagtgtttagtgaggagaaagaggaaacaaaatctatctcttcttcagatattgatatccttcatgaaaaatcatactccagtggacacgatgaccatgctgcttgtgctgccgaaactcagttctaccatccacagaaagcatctatatctgatggactacatttgggtcctagttctttgcaagtagaatcactggatgctttggatagcgatatactgtatgttaacacaggagttctcgagcagcatcataaagagggttactatgaacccagtgtctaccaaatcacttcaggcatttgcacaatgtctgaagctgaaccattcgaagttttagaaactggaaaagatgtaaaaacgccatctaagctagatgagcaacttaatcctgggttggacggagatgaagctgagaaacacagcttagactgtggtacagacaccagtcctgtgatgagcaagagaaccctttcttcaccaggatcaggaccatgccagcagtatgtaaatgaaagcaccaccagtacacagtcgactgataatcacccaaacgacctacccgctccgagatctcctgaacaatccgcgtgttttcagaatgacaacgattcgggttcagtaggcatttgtcaaagcagcaggcgaagaggtatagatgaactttgcggtaagctgcagagtttcaaagtttccagcgccgtaaaaggaagctacgtagctatgggtgcacctcgtccgaagcctggggacagcacgagccgatctgcagccgcgctgctcaggaacatagagaacacaactgctgttaaagctggccgtcctcctgtcaagccaaacgccgatggtaaggactcgtctaggcgagccctgcagcccataagcggaaggcctgacagtaggtagttcggcggttccttaataagtgtgtcgtgtttgtgttcaaccctttgttgaaagccaggtccgtgtatttgtgcagcttgttgtcatgaagctgctgtgtgcgtgtcatttaacataagcgtgcgtgaagttgtgttatggaagtggctaaatatgtgttcgttaggaggtcaattggcttgaactgaccctgctgttccgtgatttctgtctaaatatacttgtgtggctgtgtc

SEQ ID NO: 3935 - DNA, 656 bp, Zea mays
  Clone ID: 700344683_FLI
gcagaagacgccgcagtggcgcgcgggccccgagggcgccaagacgctgtgcaacgcgtgcggggtccgttacaagtccgggcggctgctcccggagtaccgtccggcttgcagccccaccttcgtgagcagcatacactccaactcccaccgcaaggtgctggagatgcgccgcaagaaggatggcgaccttggtcagctcccgctcccagtcccggccgcgcttctgcttgggccggccgtcgagtcgttctagccggcgctgtacattttttcgtccgcgggtggagctgtttaacctgctgtaccgtacttggtttttttttctttctcttccacttctatatttagtagttgtgctgtactatttagctagagctctgaattgtagaagctttattaggtcgagttaggtagtagagattaagatttccatggttgattaggattgttagggtatgtatggccatagtacttgtggtagtagttaagaacttggtgaggtgtttggcctgacctacgaggaatgatgttgtcatgtcgaggcgctgctggcaccagtgacaagaaagttaggcgtgccttggcgcggaacatggaactgtctgccttgttgtaatcgagagtgtcaggcgagtaagaaagtgattgtttgc

SEQ ID NO: 3936 - DNA, 1482 bp, Zea mays
  Clone ID: 700344709_FLI
aagtacgaagccgcagcctccaaaactttatagccccttgatttgatccgcaccgcacgaacaacgtgccgcgacctgacgcggtagatgatttcttttagccaacaaaccaggcaaggactgggcaacagcagctgctaatcagcctctgtcaccataattaagacgctctcttggctgccttggtttggttcctgctcctccttactctctacctgaccagctcggcagctccccagccgcgacagagtccacgacgacgatctttcttccccccgtctgcctccggatcccagctcccctgcccgctcggtcgactccctcgtcgccgagtccagctccgactccgagaaaaaaatcaaatcgaccgagtccgcccgtgaagccgccgacagaaggagagagcacagagcgggcgaggcaggcagcatgaagtccatgggcagccgcgacaagctcgcggcggcgtcgagcccccgccgcgtcctcttggtggtcttcgccttctgcttcgccttcgccaccttcctcaccttcctctacaccacctcccacttcacgaccgcgcccggctccggctccggctccatcgcggcctctaccaccaccaccacgacctccggctctgcgggcggcggcggcggccaaggccaagcagggcccgagtccgtgtccaagcggctgccggtcccggtgttcgaggcgctggtccacttcgcgtccatctcgaacgcgacgcaccgcatgtcggacacggacatccgggccatgtcgtccgtgctccgcgcgcgggcgccctgcaacctgctggtgttcgggctgggcgcggagtccccgctgtggctggcgctgaaccacggcgggcggaccgtgttcctggaggagaacgagttctacgtcaagtacctggagccgcggcaccccgggatggaggcgtacgacgtgtcctacacgacgaaggtgcgcgacttccgggacctgctggcggcggcgcgggcggcgagggccaaggagtgccggcccgtgcagaacctgctcttctccgagtgccgcctcgccatcaacgacctgcccaacgacctctacgacgtggcctgggacgtggtcctcatcgacgggccgtccggctggaaccccaactcgcccggccggatgccgtccatcttcaccaccgccgtgctggcgcgctccggcgccaccgcggccaagggccccaccgacgtgctggtgcacgacttccagttcgaggtggagcaggtgctgagcagggagttcctgtgcgacgagaaccgcgtcgcgggaagcggcaccccgtcgctcggccacttcgtcatccgcgggggcggggccgcggccggcgacgccttctgctctgcccaggaggacggctcgtcgggggagaagacgcgccgccgccgcagccgcaagtaaattttacttgtccgctgtccgtctatcttgccacggagacgggcagacggc

SEQ ID NO: 3937 - DNA, 1782 bp, Zea mays
  Clone ID: 700344725_FLI
acctcgccgcgaccacacctcctctcctcccctccggctcctcctcctcgcatggcgacagcctctcgtccctagccccccagatccagcggcgcgcacctacacacgcgcaaggaaccgtagacgcgcccccgcgcctcccctctctcccgtcctccgccacccatggacgcggggaatggctgcagcgcgcgggcgctggcggcgtgcgtcgtcggcggcatcgtgctgggcgcgtcggtgctcgcgctccacctcgcgggcgggcccgccgccatcccgcccctgcccctgccgccgcccatcggcgcgcttctccgtcgccgccgccgccgccgccccgtgcgcgtctacatggacggctgcttcgacatgatgcactacggccactgcaacgcgctgcgccaggcgcgcgcgctcggggacgagctcgtcgtcggcgtcatcagcgacgacgagatcaaggccaacaagggaccccccgtcacgccgctccacgagagaatggtaatggtccgtgctgtgaaatgggtggatgatatcattccagatgcaccttatgccataactgaagaattcatgaacaagctattcaatgagtacaacatagactacattatccatggagacgatccttgtttgctacctgatggtactgatgcctatgctcttgccaaaaaggctggtcgatacaagcagattaagagaaccgagggagtgtcgacaacagacattgttggacggatgcctctttgtgttagagagagatcatctgatgcacataaccactcgtcactacaaaggcagttcagtagtggacatggtcagaaagttgatgatactggatctggaactggaacaagagtatctcattttcttcccacatctaggcgaatagttcaattctcaaatagcaagggtccaggtccagattctcggatagtttacatagatggtgcttttgatctgttccatgctggacatgtcgagatcttacgacttgctcgagaacttggagattttttgcttgtggggattcacacagatcagaccataagtgcaacacgaggacggcatcgcccaatcatgaatctccatgagcgaagtttgagtgttttggcttgtcgttatgttgatgaggtgatcattggtgctccatgggatgtttcaaaagacatgattaccacgttcaatatctctttagtcgttcatggaacaattgctgagaacatggacttcacagaggacgatttacacccatatgctgttccaatggctatgggcatctaccgccgactggagagccccctggatatcacaacaagtacaatcatcaggaggatcgttgctaaccatgaagcttaccagaagcggaatgagaagaaggaagccagcgagaagaagtactacgagggtaaaagctttgtgaacggggagtgaaggtcggagtagcagcaggactcgcgtggagattgctgcctcgttcattttaggtctcccagccttttagcagaggcaacagttggtcgatctacagttgtaccctttcttttttctttttcatcttcttcagtaatctttgatgatcttgctgacatagcttaggaagcataggagcatttctccccggtgtctgcagccaattttcctcactgtgttgtatatgcgccttccagctgctgagctgcatttgagatctataggcttttccacacagagacacatacagattttgaaattgtgcgctgcagtatgaagaagatcatgaatgttagcgtgatt

SEQ ID NO: 3938 - DNA, 915 bp, Zea mays
  Clone ID: 700344745_FLI
cctcgccaagcgcagcagccgccgcagcacatcgctctcttgatctcagccatggcggaggtggagcagcaacaggacacgccgaagctcttcaaccgctggaccttcgatgatgtccaggtgaacgacatctcgctgaacgactacctcgctgtgaacgcgacgaagcacgcgatgtacctgccgcacaccgcggggcgctactccaagaagcggttccgcaaggcgcagtgcccgatcgttgagcgccttacaaactccctcatgatgcacgggcgcaacaacggcaagaaggtcatggctgtccgcatcatcaagcataccctggagatcattcacctgctcaccgatgccaaccccatccaggtcgtcgtcgacgcgatcatcaacagtggcccccgtgaggatgccacccgtattggttccgctggtgttgtgagaaggcaggccgtggatatctcacccctgaggagggtgaaccaggccatctacctcctcaccactggtgccagggagagtgctttccggaacatcaaaaccattgccgagtgccttgcagatgagctgatcaacgctgccaagggctcatccaacagttacgccatcaagaagaaggacgagattgagcgtgttgccaaggccaaccgttgaacggagcttgtatcctggtgcactctgcgctggaaacttttatgttgctggcagtcgtatcggttcctgttttaccaatgtttagagttttttgagacctatatgcggttttggttttcagtgcacaattaaaattactgagtaatgtagttgattgggaacagaaagtgcctggtttaccgaactccatttctcttgtcatttttctttattctgtagtctgtattatgtatgcgtatgagtattgagatgattctgcatttg

SEQ ID NO: 3939 - DNA, 1014 bp, Zea mays
  Clone ID: 700344754_FLI
cacactgccggcgctctatcttccgctctctctcctactcgcgctcggcaaggcggcggcgccgctcaggctcgggctacggcgtcagcggcatcccctccgcctctcgccagtcgcctcgcgccctcgcctccggtcacaccggccggtgactctgctaaaaatggtgttcctttcaaatgaagacgcctggatccatgatgaagacatcatggatgatgttgattcagatgttgaagaatcagactcagaaggtgattcaggtgaagaagctcaggctaagcctgcagacaaagcgatatacaacaaggaggctattcttgaaaaacttgaagacatagcctggcccaagaatgtggactggatgcacaaactcactgttgagcatgatcaaggggagaaagttgatgtgaacgatgatcttgcccgcgaacttgcgttttacacccaagctttggatggcacaaggcaggcctttgagaagctgcagtcgatgaaggtccggttcctcagaccaacagattactacgctgagatggtgaagactgatgcacacatgcacaagatcaaggggaggttgttgtcagagaagaagaggattgaggaagctgaggagcggaggaaggctagggagtccaggaagaaagcaaaggaggttcaggctgagaagaagaaggagagggctaagcagaagaaggagcagattgagtcagtcaagaagtggagaaagcagagacaacaagggggattcacgaagggaaatgatgatgtgccagaccttaattttgaaggagaagaaggatttaaacaatcaaagaaaaagaggcccggtgtttctcctggtgacaggtctggtggtcttgctaagcgaggtaaaggaggaaagaacgggagggcaagggattccaagtttgggcatggtggtcgtaaagggctgaagaagcaaaacactgctgagaccacaaatgatttcagaggctttaaccaggggggtgagcctcaaaacaagaagag

SEQ ID NO: 3940 - DNA, 623 bp, Zea mays
  Clone ID: 700344808_FLI
gttctccgtcaccagctttccttttccttttcaattctccacagcgattcgtctcctctgctcttatctccgctgtgcctgtgcctgacttttcctcctcttcgtccctcccacccgcaaccgcacagagaaaggggaggaggctctctacccagcgcagcccgagcacccctcagccccggatcgggacccctgctctgcgcaatccacccatggcggaggaatcaggccgccccttgccaaagtttggcgattgggatgttaatgatccagcttctgcagacggattcactgtcatattcaacaaagccagagacgagaagaagggtgggaacggccaagacactgagtcaccttccaaggacaccaggactgagagggtggaatcttatgctgcaaagccaagcacgaagaaatggttttgttgtgtgacagccagccctacgcaatcctgaggaagacaactgcatgcgttttggaaatactgtccctttaattttctatacatactatccataagacaatgtaggggtacccagggctccaggatgggctatctcgtaaaactcttgcgtgcgtgtatgtatggtgtgagagaattcgcaaagtggacttctggttgt

SEQ ID NO: 3941 - DNA, 1152 bp, Zea mays
  Clone ID: 700344846_FLI
ctgctgcctgctggctgctgcctcgccccgcgtgaatcaataatcattgaatccattctaccgctgctcctcctccttgctctgccgagaagccggcgatgaggggccgcaagaggcagcaggtgagcgccagctcggccgccgcgctggtgaaggggagggagagcaccaagcagaaggagaaagaagctaggaaggagaaggaggcgagggaggccggcagggagccggcggcgaaggagaggcagatgaggcgcaaggccgggaaggagaaggagacggagacgggcggagaggggaaggagccagccaaggagaaggaggtcagggaagagggcaaggagaacgacaagcacaaggagaaggcgaagacgaaggccaacgtctgcccgcagttcttcaaggtcttcttccccgagcagtccacggagcggctgagaatcccacccatgttcaaccagcacctcaaggagcagcagccaaccggagcagtttccctgagaggcccgagcggcaacagatggcaggcagcgctcgcttcagagtccgagtcggaggccgcgtggtgcttcgaccagggctggaaggagttcgtcacggaccactccctcaggctaggccacttcctggtcttcacgcgcgacgggcccgcccagttctccgtggcggtgttctcgtcgtcaggcgtcatcgacccggcagccctggacgcgaggcctactgcgaacggcggcgcggccgtcaagctcgaagatggcgaaggcgtcggcgtccgaggggacgtggacgcaggcggcgacaccagctccgaggtgtcgcttctgcccgcggaagagggcgatggaggagcgacagggaggagaacaggagcgacgagtggtggcgctggcggcgcctctgagatgtcacttgttcttagagaagagggccgtggagtgacagggaagagagcgagagcgacgacgagtgatctcccggcagatgccagtgcgccaaagaagcactctgccctcgcgaagaaagctggtaaaaggaggcctcaagctgccacttcaaaggatgtgtcgatgattgttcacagtaagaatgatacaagacaagagccttgatttattgaaagaatgaaaaataatctgttttttttttgtttct

SEQ ID NO: 3942 - DNA, 761 bp, Zea mays
  Clone ID: 700344851_FLI
ccgagtctccagccaaccacatccagtccaccccatccccctcgaccccgacaaccccgagtcccgacccgatggcgcccaaggccgagaagaagccagcggagaagaagccggcggccgaggagaaggcggagaagacgaccgcaggcaagaagcccaagtccgagaagcgcctgcccgcctcgaagtcctccggcaaggagggcggcgagaagaaggggaagaagaaggccaagaagagcgtggagacctacaaaatctacatcttcaaggtcctaaagcaggtgcaccccgacatcggcatctcctccaaggccatgtccatcatgaactccttcatcaacgacatcttcgagaagctcgccggcgaggccgctaagctcgcccggtacaacaagaagcccaccatcacctcccgcgagatccagacctccgtgcgcctcgtcctcccaggagagctcgccaaacacgccgtctccgagggaaccaaggccgtcaccaagttcaccagcaattgagcagcctgcagcgtccacggatttgttaggtctccccttcttacaagggttcttcgtggtgtcctctacccctccccctccccgcctatgtatgtgctgtgaaattgttgatgttctcgtcgggtgaacaaaggccagtagctagcttgcctgcttcataaatcgtgccggattgtaatgggcctcttagatttgacgcccctgttttggaatatagttgtatccgtgccttccctgcttgct

SEQ ID NO: 3943 - DNA, 1173 bp, Zea mays
  Clone ID: 700344876_FLI
cctaaattagtctttgttcttcctgttgtgctcctcgccttggcgctgcaggcgatcctccggccaccgccgccaaagctctgtggctccccaggtggccctcctctgacatctcccaggatcaagctcagggacggaaggtaccttgcgtacaaagaggatggagtacagagagacaaggccaggtacaagatcatcacagtgcacgcatttgatagcaccaaggacttcccctcgcctgtttctaaggagctcgtggaaggactgggaatttacctccttgcttatgacagagctggatatggggaaagtgaccccaatcccaaccggcatgtcaagagcgaggcgctagatatcgaggagcttgccgaccagctgggccttggccacaagttctatgtgctaggggcctcaatgggaggatactcggtttggggatgcctccagtatatacctcacaggcttgcaggagctgcgctggttgtgccaattatcaactactggtggccttcgttcccagctgaattatccaagcaggccttcaacagactgattgtgccagagcagagaactctttggattgcacacaacataccttccttgctttacctgtggatgacccagaggtggttcccttcttctgcagcagccatgcaccaccctgaaatatttagcaagcatgacatggaggttcttcagaagatgatggcaatgccaagaaccattgagaacaaatcaaggcagcaaggcatttatgaatcgatccaccgtgatttacttgtcgcttttggaacttgggagttcgatccaatgaatgtcaccaatccatttcctcaaaatgagggctctgtgcacatctggcaaggacgcgaagataggttggtgcttgttgagctgcagaggtacattgccaagaagcttccgtggatcaagtatcatgaagtcccagaaggtggacacatgttcgtgatggtagatggatggacagaccgaattctcaaggcactcttgttaggagaagagcccctagatgtgtgacagtagttccattttcaaaatgtcaaaaactgcagctgccagctgttattttacttaattttattcccaatttgtacacttgtattcctacaacaccaagactagtctaattcataatccgatagactttccatc

SEQ ID NO: 3944 - DNA, 714 bp, Zea mays
  Clone ID: 700344948_FLI
cttccagactcagagatagggaaggttcatcacgagtgaaccatggcggaatctgttcacaaactctccgagatggtactccccaacgacctcaagcttggccctttcgtcatggttcactcgtgatgcgccttccagactcagagatagggaagattcctacggtcatctttggcacaataaacggggtcattggcattatcgcctccctcccgcatgaccattacaccttccttgagaagttccagtccactcttgtcaagtacataaagggagttggaaacatgagccatgagcaatggcggtcgttccataacgacaagaagacagcggaggcacggaacttccttgatggtgacctgatcgagtcgttccttgaccttagccggagcaagatggaggtggtgtccaaggctatgggcgtttcggtggaggatctgtccaagattgtggaagagctgacgaggcttcactagtacatggatacgcagaagctttgcttgtaacttgatgcatgtacatcctctttttgccatctatttttgtgctgtagcagttccatgagctgcctcagcagttgccgcgggccgtgttggcccgaagctgtagcctgccctgctttattggttgactcggaatactttttgggttgtgccagtttgttgagattgttttttttcttttattctatgttgaatggaaagattagcggtg

SEQ ID NO: 3945 - DNA, 1297 bp, Zea mays
  Clone ID: 700344988_FLI
cgagctcttctggcgggcctccctcgtgcctagggccgaggagttcccgttccagcgggtgcccaaggtcgccttcctcttcatggcgcgcggccccatccccttcgcgccgctctgggacaagttcttccgcggacaccaggggctctactccgtctacgtccacaccgtgccggactacaagctcaatgtgtccaagagctccgccttctacggcagacagatccccagcgaggaggtgtcctggggatcaattaccttggtggatgctgagaagcgcctgctggccaatgcccttgctggatttctcgaatgagcgcttcgtgctgctctcagagagctgcattcccgtgttcaacttcccgacggtctacgagtacctcatcaattcggcgcacagtttcgtcgagtcctacaacatcgacacccctcagtgtgctggccggtacaaccgtcgcatggctccccacatcatggcagatcaatggaggaaagggtcagagtggtttgagcttaaccgcgagctggctgtccagatagtagcggactacaagtactactccatcttcaggaagcactgcaggccatcctgttatccagacgagcattacataccgacttatcttcatctgttccatgggccactcaacgccaacaggactatcacatgggttgattggtcaagaggaggcccgcacccagcaagttatggtgccacagacatcacagaagacttcatccaggccatcaggaataatggtacgcagtgcttttacaactcgaagcccacctctgtctgctacctcttcgcgaggaagtttgctcctaatgctttgccacggctgatgaacctcacctcgaccgtgctggacttctgagccggttctcaccatgcgggcgggcgggcatcgttgtcagcatctcgctactgaggtatatctatggatgcatgtgccggtcgggagctagaacttctataccctgctagattggagtctgcgacatgtgtctcacagaatgatcagaggtgggttttggtgtatgcgtctctcgcggatgatgacgctgtgtgggacagtgaaaacagccttttcactcgccctgaagctgatctccgcgagtgatcgacagatggcgccgcctacggagatgacgtttctttcacctcccattcttttttaatatatcatagtcatatgatagaggatgtcttcttctcttcttctccctatctatctactgtattgactcagtcagatactaatttctgtgaatataacttatccatcattgcttt

SEQ ID NO: 3946 - DNA, 964 bp, Zea mays
  Clone ID: 700345019_FLI
gggttttgctgctctccgaccccgagctccgaaggccgcagcatcaggcgcggcccccctcgcgtgtgaccgagatggcgctgccgaatcaggggaccgttgattaccccagcttcaagctcgtcatcgtcggcgatggtggaactggtaaaactacatttgtgaagaggcatctcactggagagtttgagaagaaatatgaaccaaccattggtgtggaagttcatccgttggatttcaccactaactgtggtaagatcaggttctactgctgggataccgcagggcaagagaagtttggtggcctcagggatggatactatatccatggccagtgtgcgatcatcatgtttgatgtaacctcaaggcttacttacaagaatgttcctacgtggcatagggacctgtgcagggtctgtgaaaacatccccattgtcctctgcggtaataaggttgatgtgaagaacaggcaggtcaaagccaagcaggttactttccacaggaagaagaatctgcagtactatgaaatttctgccaagagcaactacaactttgagaaacctttcctgtaccttgcaaggaagctggctggtgatccgaaccttcactttgttgaagctgttgctcttaagcctccggaagttaccatcgacatggctatgcagcagcagcatgaagctgagcttgctgcagcagctgcacaacctcttcctgatgacgatgatgatctgattgagtagaaaggatcatgagtcttggacttgagcaggagttgtgccttgcacgatttaagttgttctagggtggactctctcttgagttatcattgtctggatcatttttttctccttggacttgttgcaacttttgagtgtggaaatggattggaatagtcgccatgaatttgctggctactttatacatgtctttgttcataaaccttgttttaagatgaagttgtggc

SEQ ID NO: 3947 - DNA, 814 bp, Zea mays
  Clone ID: 700345191_FLI
gaaaaatatccccaaaccctagctcccgatctcgatggcgaaccctcgcgtcttcttcgacatgaccgtcggcggcgccccggcgggccggatcgtgatggagctgtacgccaacgaggtgcccaagaccgcggagaacttccgcgcgctgtgcacgggcgagaagggcgtgggcaagtccgggaagccgctccactacaagggctccaccttccaccgcgtcatccccgagttcatgtgccagggcggcgacttcacccgcggcaacggcaccggcggcgagtccatctacggcgagaagttccccgacgagaagttcgtgcgcaagcacaccgcccccggtgtgctctccatggccaacgccgggcccaacaccaacggctcccagttcttcatctgcaccgtcgcgaccccttggctcgacggcaagcacgtcgtcttcggccaggtcgtcgagggcatggacgtcgtcaaggccatcgagaaggtgggcacccgcaacggctccacctccaaggtggtcaaggtcgctgactgcggacagctctcctagatctctctgatctggtctgttcggccgccctccctccgtcatcgtcgactccccctgcgtccgttcctttggatctgaataagatggtggtgatctgagtggtggtcttagtttatcatgtatcgctcgcagtttaatttagcggtttaggtgtggatctgtgaaccccatggcgcctctgcttgattcgtgtttcacctgttatgttctgagattcatgataatgctatgagaactgaaattcccgtttcatggtttttt

SEQ ID NO: 3948 - DNA, 1526 bp, Zea mays
  Clone ID: 700345203_FLI
ctaaaagcacttgaagaagagatgcagtcttttgtcacctcaaagggcaaggttgccggaggacttcaagagcatgtaagaaagctcaaagagagctttaattctaggatagcagaattgcatggttttgcaaatgaactcaagcataaatctatgttgagctttgaaaaccttaattcgcaagttaccacacacacatctagccttgaggattgcatgaaggacctattggttgatgccgatgaactactcattgcactacaaaatgggctttctcagcatgaagtgaactttgctacgtttattgagcaacagcatgaggggctctctagaaatttagagggaacaaagtttgtttcggcaactacaatgaacttcttcagaactatagattcacatgcattgggactcctaaagattttggaagaatcaaagatggaacatcaaaagcaactcttccagcttcagaagaagtttgaggccgttgttgctgacgaagagaagtacttgatggagaaggttgcagggttgtttgcagaatcaaacgctcgaaagaaaaatatggttcaagatgacatatgcagcctcaataggactgtttctgagagttcgaacaatttacaaaccgaaactaccaagctgcatgattttacatcttctatgaaagagcaatgggaaggctacatgaagaaaactgaagaggcattccagcaaaatgtatcatctattgaacagaaaagaggcttcttggcagggaattttcagcagtgcaaggaaaaggtagaatcatgctcagaacaatggattactgcacaaaatttggtgttggcacttggaagaaggaatgcagaagccatcggtttggttataagtgatgggaatgaggtgagcaaccaactgggtgcaagaatttcatctgctgttgctgctggatttgaagataatgacatttcaagcaaatcccttctaagttgtattgacgattcattgaagttggaccatggtattcgcgagaatgtgaaatccatcgtcatgacatccagagcacaacttcatgacttggaacatggtcactatgagatgacaaaagcaataacagggaatgccgataggtctctgggagaagattataaggtggatgaagcaacttgttcaacaccgagaaggcgtgagataaacattccggacagccaatcgatcattgagttggtaacccccctagaagatatcgtgaagtcattttgggacagcagaacaccgacgaagcctgctctaaatgcaaaagggaagcagcagttggtagggtcgacgacccctgaaacacaaagagcccctctttccgcaataaattaggagtttcattactgtatatactacaaacattcttgtgtggtcaagtaatgttgatcaagaatgttgagagaagttactggtaaaggagagctgtgtattctccagattcatccaatgtatgaacggaatcatacatccaatgtattttggagtggagtgcaactccaaaatac

SEQ ID NO: 3949 - DNA, 1263 bp, Zea mays
  Clone ID: 700345208_FLI
ccgcaccgcacccaaccgcagcggagccgggagccgaaggccgagggtattcttccttcgccgctaagcacgcctcctctccacaggcagccgacccaggggaagcgtcgccgtctgcccccaccccgaatctgatgcttcatcgattgatttggagcggagcaggaggggagccattgcccgtgttctgattgctgctagaggtcgagggatggtaggggtgctgtcgaatcgcgtggatcgggacgacctcaaggccggggatcacatctacacttggcgggccgcctacatctacgcccaccacggaatatatgctggagatggcatggttatccattttacaagggcagctggacatgagattggaacaggaacattcttggactggttcctttatagctcctctccggcagcaactgagggtcctccctgccagaaatgtgggcacctagtcaagtccgatggggtcatcacctcttgcctcgattgcttcttagatgggggcagcctgtacctctttgactacgctgtgtcgcctgctttcttcctcgccaaagcacggggaggaacgtgcaccctggctgcctctgaccccagtgacgttgtgatccaccgtgcacggtacctcctggacaatgggtttggcatgtactccctgttcaagaacaactgcgaggacttcgccatatactgcaagactgggctgcttgtggagaccgctttcagtgttggccgtagcgggcaacttgcgtctctgactgctgccttcagcgccgtggcctcgtcccccttgcgtttcctgacaaccagtgctggtggcctggcaattgtgaccagcggcatgtactgtttcgggcggtatgtgtcggatattggtgtccggcgtgatgttgtcaaggtccctgtcgaaaggcttgtggagcagaatgttacttggattcctcagtgtgtggctacagagacagatatcgcggcaggagcaccgcagcagcagttggaggttccttgtgcggttgccgaggaagcatccgttatacagcccgcggcaccgtgatccattgctgaaatgtcatcatgtaccaggtgttggcatgagacaggacaactggaactacgtacttgtgtggaagtacatgtaatgatgtatctggtggtgttatgcaatccattgctgctgctgctgctaatggtgcaagcaatgatgatgatgatggatgtggttccatgaccactattaattattacagaattgagaagacc

SEQ ID NO: 3950 - DNA, 776 bp, Zea mays
  Clone ID: 700345212_FLI
ggcttctcctccccctcttatcaagtcctcctcgggttagggttccttagggttttgtggaggggcgatggcggcggctgatgtggagtaccgttgcttcgtcggcggacttgcctgggccaccagcaacgagtcgctggagaatgccttcgcctcctacggcgagatcctcgactccaaggtcatcaccgaccgggagacggggaggtcccgcggcttcggcttcgttaccttctcctccgagaactccatgctcgacgctatcgagaacatgaacggcaaggagctcgacggccgtaacatcaccgttaaccaggcccagtcccgtggcggcggcggcggcggcggcggcggtggctacggcggcggtcgcggcggcggcggctatggtggcgggcgccgtgacggcggttatggcggcggtggcggctacggcggtcggcgcgagggtggtggcggcggctacggaggcggtggcggctacggcggtcggcgcgagggtggtggtggcggctacggcggcggcggcggcggctggagggactgatgtgtggccccatcctggcttcggccgagttatcttatctatctatagtatcgtgttaccgttcgcttctgtcaccgtgttagtgtccgttctacctttggattaggtgttggtaccccttttgttcgctttggttgctcccgctatgaaacgagacgagagaagaatgagcaaggtttttgttcgcatctattgttgtccaatgatattgatatattgttcccctgtc

SEQ ID NO: 3951 - DNA, 772 bp, Zea mays
  Clone ID: 700345243_FLI
ttttcttgggcgttcttcggcttcgttgtcacaaggttcgagttcgtcaccgtctagtacgactgtgcgagggaggaagaggcgaggagaagatgcagatcttcgtgaagaccctgacggggaagaccatcaccctcgaggtggagagcagcgacaccgtcgacaacgtcaaagccaaaatccaggacaaggaagggattcccccagatcaacagcgactgatattcgctggcaagcagctggaggatggacgcacgctggctgactacaacatccaaaaggagtcaactcttcatttggtcctcaggcttaggggtggaaccatgatcaaggtcaaaactctcactgggaaagagatcgagatcgacattgaacccactgactcgattgacaggatcaaggagcgtgttgaagagaaagaaggcattcctcccgtgcagcaaaggctcatctatgctggtaagcagcttgctgatgacaagaccgcaaaggactacaacatcgagggtggatctgtcctccatcttgtccttgctctgaggggtggttactagtctaaacctgatgaactagcagtcagataaactgttgtgttggctgcgaaatgtgcaggcctgatgttgaacttgcaaggagatagtaacaaattatcagctttgcgcctttgcccagtggaaggggctgtcttccaagttattgtctgatatggaattgttccagattatcatgtctcggcgtttacccattattattatttgatttgaaccttgct

SEQ ID NO: 3952 - DNA, 699 bp, Zea mays
  Clone ID: 700345248_FLI
agcaagtatatcaagaattgtcatgttaactgaggcgctatttgaggtgttggatgaaattcaccgtcaacctgcatcactttcactttccatggtgtctgttcaggctcctgaatctgtagttgattcgttgccatgtgccatatctgcctaaccgaatatgaggacggagaccagataagaacccttccgtgcaagcacgagttccacctgcaatgcgttgacaagtggctgaaagaaatacacagggtgtgccctctgtgccgtggagacgtctgcgaagtcgcctcgtgaagaccttggcgctgccatccttccgatgtggcgccggtggatagggcaccaccgccaggcgccagctgttccgtggttgaagctggttcggtcaggcaatggtgatcttgtcaacttggacagttgacaccgcaagagcacgtcaactttgactgtctccctgccgaagagaatggccaaaccaaccctgcgaccgatgagtcgctgttcctgtcatcaacttttaagataccgagactttgtatacagtagcttttgtagcctcccgcctcgtgtatgacagcctgtacatatttgtaaattctggaatcaaatgtcacaatcccctgttctcgtgacctgatgttgtagggaacatattcggtgctgatggagccgggaacagagatgtgctgatggagatgg

SEQ ID NO: 3953 - DNA, 759 bp, Zea mays
  Clone ID: 700345268_FLI
ggtttgtgcaagaggagaagacaaatggatgatacgattgaatgttgggatcagccacacgtaagtctaggtatcgacctagtcgccgccggccggaacaagaagaccgagcgcactgcatacctcaagctcctcctcaagctgtaccgcttcaacgccgtgatcctcaagcggtacttcattagcaagaccaaccgccctgcctctctcgctccaccgtctcatcagcttcatggaaggggggaggaaacgtgactgacgacaagagggtctacgaagtatctgcagtgaaggtggctgcgtgggcacggattctgagcgcgggtgacgagtgcctcgcctttgaccattgtccattgtcagggaaaccgtgaaggactttggctctgcgtttggtgtgccacataaccacacgggcgcaagggaaggaagcttgagaaggcaagggggaggaggaaaacctctgcttccacctcggaagagaagcaacgaaacaacgaagagatgaaagagaaaatagcatcaaagaggggtgactgggctgtggcaccgaggtaacacggctcggcgtcatagatcttggcgctgaggtgcgtccttcgctggcaacaacagactgacgtggcggcgacgtggccgagctcaagtcatgattcatggcactgaggtccagtcaaaatcggcacctgggcatgcatgttacgacgttacgtatgtagcgagcatgcatttggacttttggagcctcgtcgttttcgt

SEQ ID NO: 3954 - DNA, 957 bp, Zea mays
  Clone ID: 700345282_FLI
cacaactacaaggtgaaattcagggagcctaccagataaaggttacaacgactgcattagctcttctcatatcaactcgtcatcctgagctatccaaggttgaagttcaagggcatcttattaagactagtgcaggtataacgacacgttcaaaagctcgagtgactcctgatcaatggaccaagattcctctcccagttaagatcttctcattgctggcagatactttaactgaaattcaggaacaaattggtgctggtgatgacgatgactccgaagaggataatgactgggaagaagttcagaatggtgatgctagtatatcagatgatatcatacactcagcatcggttccttcaatgactaatccatcagttgaacatttaaatgcaatggccaaggtttttgatgaggatgatgatgatagttatgacgatgatctgacaaaaaccgaccctcttaatgaggtgaagttagcggacttcctaacaaacatctttgctaacttgtgggagaataatcgaccaatatttgagtatctttgccagggcctatcggattcacagagatcagctgttgaaaaggttttgaggaggtgaagcgttaacttgggatcctgtcttccacctttcgggatataatatatcttcatattagttatcgagtcctgtttgcattgctgtggactggttttcttgctcattatatgttcattggtgtaaactgatacatctctgaagccggtgttatgaggttttgttagtgtaggtttctttatgttctttgtatttaaaatctacaagatgtgagtatttgttgtgccgggtgtggtgatgttgggtattcatgtctgaagaattcccggcttgacttgttcttacgttgaattcctccggagggaccttgattccttggctttattcatcaatttcatgcatgcctatttggaggagcgcc

SEQ ID NO: 3955 - DNA, 957 bp, Zea mays
  Clone ID: 700345290_FLI
gaaaaccgaaatcccccactcttctcacccgtttccccactcgctcgctgacacatcgcacattcgcaccataccagataccaccgccgctgcacacaaacccagaaaccaccggcaataaacaactcccgctcccagtctccgatccgaggaagccggaagaggggatttcgagccgcggcgatcggggctagagtggccctcgacgcgtccgcgggtggaattgccgagaagccgagagagagggcttggagcggagttgcgggaggtgggagagaaggcggcgatggggcgcctgttcctgatgcacctggacggcaacgtctacagctgcaaacactgcaagacccacctcggcgttgccagcgacatcatctccaaggccttccagtgcaagcacggcaaggcgtacctcttccataaggttgtcaacgtgacttctggagtaaaagaagaccgcatgatgatcacaggaatgcatactgtttctgatatcttctgtgttggctgtggatccatagttgggtggaaatatgatgctgcacatgagaagggccagagatacaaggaaggcaagtttattctggagaggtacaaggtgtcgggccctgacggaagccaatactgggttccacaagatgctcacttgggcggaagcgacgccgatgacatataaaacacgatccaacaagctcaagcctgtcgttgatcccctgtaaataacctgggtggcgttgctctttaggcagccgacagccggggattgctccattgaaataattcgccggcgtaaattgttgctgttccaggtgacatgatcgtatccctccctccctcccgttgtccctggaagtcattagatgttaccgctgtatatgtgcgtaacctgtgttgcttataagtccatctgagttgtatgccaagcactagtgaccaaataagtaaagtaaatttctc

SEQ ID NO: 3956 - DNA, 1490 bp, Zea mays
  Clone ID: 700345322_FLI
gactgcagacgcccggaccacaggaacatccaagtaccgaacactaccggccacacgctcgagaataggcggcggtgcaggtcctcctccatctctgtcgtgggttcaacttcactgtgaatacgctgacgctacgagaagtcatcacggaaggggtctcgaagcaaggtgcaaagactcacctgccgtctctgatgggctttgctggctgggtatccatgctgctcttcctcctggtcgccggtgctgtagcaaatgaccagatcttcaccacttcaggtgtgccatttgggcggagttcgcgtgagccaagttaccgcgtcgaattccatcctgttgattcaccattccatccagagaatggtcaagaatcggtaccaatggctagtcatgatgggaaacgttataaatgctttctaccagttgaagaaactaaaaccatgaagtcaatgcttccgcaaaatgcaactaatgttataatagaaagtgaaaggagaattaagccaaaggagccagatgagttacttgaggttctcaaggaccagtgcttctacaggcatgaaggttggtggtcgtatgaattctgttatcatgggaaaatcaggcaggtccatgtagacgacgataaggttatccaagaatttgttctaggcgaattcgatgacgacgcgactgctgcataccatgaaaatatcacttctgagttagttgacgatgaccatcatgtgaaagatatatctcagaggtatcatgttcacttgtatacaaatgggactgtatgcgatctcacagatattccgcgggagacagaggttagatttgtctgctcggagcctactgtactgattagttcagtcaaggagatctcttcctgcagatatgttgtaacgattcaaagtcccatgctttgcaaaaacccgttattccaggaagaaaaacgaaccctctccatccactgcaatgagttgcctgctagagcggaatccagcgcggaggatgactcgcttccaaaagaagctcagatttccatcatccccgatcaggatgagctacatgatttcccagcctatgctacttgatttgcctccaataattatgtttgatgtagaaaaaaacaccattttggaggcgcaggggcaactgagcaacactatgtattaactatctcgtagatactacagcagaggctccttgtaaagcaggttgagacgatcattctgcagttcttattatataggatgattacgaaggtaacatgtttgggacagtaacatttgcttgaaatgtatatagtctacaacaagaataatgccagcattcttgaaatgtatcgcctaggagaatgctagcacttacgggtgtgacgaacgatctgctgtcggttgagatgaaaaggcgttcgccttctattaaggatgtaaatggtacaaaaggatgtaaatggtacagatattatctgttcgtatttaaatttaatccggtttgagatt

SEQ ID NO: 3957 - DNA, 534 bp, Zea mays
  Clone ID: 700345355_FLI
gccgcaagtccggcggcgtgcggttcaccatcaacggcttccggtacttcaacctggtgctgatcacgaacgtggccggcgcgggggacgtggtgcgcgcgagcgtgaaggcgtcgggcaccggggagtggctgcccatgtcgcggaactggggccagaactggcagtccagcgccatcctcgtcggccaggcgctctccttccgcgtcaccggcagcgaccgccgcacctccacctcctggaacgccgccccgcgggactggcgcttcggccagaccttcgagggcaagaacttcagggtctgactgtgagctcaggccgcgagtggcgcggcgagaagaagccagagctctcaaggccttgttccgccgtactattataccgtgattactgctactagtcgtcgttataaagcgcgtgttaggggtggtgggaatgtacgtgaatgccccgtttagggtcacgccgtctcgccctggttcatccaggttcaagtactctctgcaaaaaaaagggagcctttttcttcttctg

SEQ ID NO: 3958 - DNA, 731 bp, Zea mays
  Clone ID: 700345357_FLI
ggaaattttcttgggcgttcttcggcttcattgtcacaaggttcgagttcgtcaccgtctagtacgactgtgcgagggaggaagaggcgaggagaagatgcagatcttcgtgaagaccctgacggggaagaccatcaccctcgaggtggagagcagcgacaccgtcgacaacgtcaaggccaaaatccaggacaaggaagggattcccccagatcaacagcgactgatattcgctggcaagcagctggaggatggacgcacgctggctgactacaacatccaaaaggagtcaactcttcatttggtcctcaggcttaggggtggaaccatgatcaaggtcaaaactctcactgggaaagagatcgagatcgacattgaacccactgactcgattgacaggatcaaggagcgtgttgaagagaaagaaggcattcctcccgtgcagcaaaggctcatctatgctggtaagcagcttgctgatgacaagaccgcaaaggactacaacatcgagggtggatctgtcctccatcttgtccttgctctgaggggtggttactagtctaaacctgatgaactagcagtcagataaactgttgtgttggctgcgaaatgtgcaggcctgatgttgaacttgcaaggagataataacaaattatcagctttgcgcctgtgcccagtggaaggggctgtcttccaagttattgtctgatatggaattgttccagattatc

SEQ ID NO: 3959 - DNA, 420 bp, Zea mays
  Clone ID: 700345381_FLI
gaaaagatatcatcatatcaacgaagctaggccacaagactagcctgatacaccgtgatgcctgcaccacttgaggaagaaaggttcatattgtgagacaagggatatatgtaccatatcactgctctatcaagcatcagttctcattatgattcccatggacatgtggttgtccattacacagatgttgatacaaatgttcagctcctttttaggtaccgttgctcatgttgcagcccgaggttgtagctacacaggaacacaaattcagggatctgagcttcaatgatctatctggcccaatactgtctatactgggcaacttgacatacactaagaaattataagctattttttatttgttacacatttgtttcatagttgatacatcagtgatgattttacctatacagtgagttg

SEQ ID NO: 3960 - DNA, 1010 bp, Zea mays
  Clone ID: 700345393_FLI
gacgtggtctacaagtagctgttgctggtattcccaagactattgataatgatatagcggttatagacaagtcatttggttttgatactgctgtagaagaagcccagcgtgccattaatgcagctcatgtggaagcttcaagtgctgaaaatggaataggtttagtgaagcttatgggtcgctatagtggatttattgccatgtatgctactcttgcaagcagagatgtggactgctgtttgattcctgagtcacccttttatttggaaggggagggtggactatttgagtatatagataggaggttgaaggagaacaatcacatggttattgttgtcgcggagggagcaggacaggatcttattgctcaaagtatacctgctgcagatcagcaagatgcatctggaaataagctgcttcttgatgttggtctctggttgactcacaagattaaggattattgcaagagcaagaagatggagatgactattaaatacatagatccaacttacatgatccgtgctattccaagcaatgcatcagacaatgtctattgcaccctgctcgcacatagtgccattcatggtgcaatggcgggatacagctttacagtcggaatggttaatggcaggcatgcatatataccatttcatagggtaacatctacaaggaacaaggtgaggataactgacaggatgtgggcgaggctgctgtcttcaacaaaccaaccgagtttcctgagccagaaggacatcgacgcggccagagaagccgacaaggcggccaaccgcacgaagagcagagaggatgcgaagaagcaatctacaccagtgttggcaaatggtgagaaatagtgtgcttttgacagttctttgttgtatgcagtagctgctgcaagctggctgagatcagtaggccaaaactgcgaggtcgatgagttttacttccatttgcatccgaacagaattcacgtaataaaagcttcatagtgtgtatttgcgttagtaaac

SEQ ID NO: 3961 - DNA, 804 bp, Zea mays
  Clone ID: 700345412_FLI
agccaggtgctgactgctgaggctttctttggtctcttcgccggcgacgacacccgccagtatccacggtgtcattgcaagacaagatggtttccttcgagatgaatgacctcaagaagattgggcttggcctgacaggctttggaatattcttctcatttctgggaattgttttcttctttgacaaggggctcatcgcaatgggcaatattcttttcctgtcaggtttgggtttgacaattggtctgaaatcaactatgcagttcttcaccaagccaaagaattacaagggtactatctcatttggtgctggtttttttctggttctcattgggtggccgttttttggcatgctcttagaggcatatggctttattgtactcttcagtgggttctggccaacactttctgtgttcttgcagaggattcctatcatcggctggattttccaacaaccatttgtgacatcgttccttgaccgctacagaggaaaacgtgttccggtctagcaaccttttgcacaatatatgcttgcggtgtagcaactagcagcctgtatttttttactacagtagaaaccgattataccgatgtctgatccctcatgtttatatgttttctttaggattgctctttgtaaattacagcaatacagccccaaactggccaaatcaaaggtccattcctttgagaccaggatgcaggttcacccatgaaatggatctgttgaagaaactcttaagcttgtatggaagtaaaagctaatatgttcctttatatgataatataagttatatattattg

SEQ ID NO: 3962 - DNA, 747 bp, Zea mays
  Clone ID: 700345436_FLI
aacctacctgctccattttatgcttctccctcgctcgcctcgccctcgccgcaacgctttgcgatagagtttctgtctgctaccagcaccatcctagcaccccaccgcgtctagggtttcctgctccaatggccgccgcgggggcagacggggagcgcaggatcggggtggccatcgactactcggagagcgccaagaaggcgctggactgggccatcgacaacctgctccaccacggggacaccctcgtcgtcgtccacgtcctgcaccacggcgcggaggagaccaagcacacgctctgggccaagtccggatccccgctgatcccactctccgagttccgggagcccgaggtgatgcagggctacggcgtgcgccccgacgccgaggtgctcgacgcgatcgacacggcagcgcgccagaagcagctgaaggtggtggcgaagctgtactggggcgacgccagggagaagctctgcgacgccgtcgaggatctcaagatcgattccctcgtcatgggtagtcggggcctcggcccgatccagaggattctcctgggaagcgtgacaaactacgtgctgtcaaacgcatcgtgcccggtgacagtcgtcaaggggaagtagcggcctggacagcgtgccagtgatatgaatgaagatgctagcgtgcagtttgtgtgggttatagctaaacactatgttccgtcttgttgctgcatttcaataaagcatgtgtcttctagatttc

SEQ ID NO: 3963 - DNA, 3193 bp, Zea mays
  Clone ID: 700345526_FLI
cttcccaaccatcagtcaatgactccaaggcgttggtgccattgggtaatggattgtcgtcaaactcaacttttggtgctgaccctttctctgcaactccacgaccagaacagggttcaccttttccccccaacgttccaaacaatctgctcagctctacccctcctgcctcagctgctggacatcatcaccctcctaagccaatgcaggctggtcctgtgcagagtatatcctcgctttctcctcatactagccagttgccacacaatcagccacctccgaggcaacaacaatttaatgctacaccaagtgctccaggaccagtgagttcaaatattcccactggacaaattccttcaagcccaagccagcctcaggcaccatggccgaaaatcactcaagtagatgtcagaaaatacatgattgtatttatcaaggtagacagggatcgtgatgggaaaatcactggtgaagaggcaaggaatctatttttaagttggaggcttccaagagatgtcttaaggaaggtgtgggatttgtccgaccaggataaggatgggatgctatctttcaaggaattttgtattgctgtgtacttaatggagagacatcgagagcaccgtcctcttcctgacacagtaacagatgctatttgggctgagggcaccgcactaccctctactggacagtttgcagaaaatcctagtgcccccgctcctcaagcaagtgccggatatacaagtagaacaatgcaaggaccacatcatgggatgcttccctcatccatgaagccaccatctcggaggcctcttcctttagatgctgacgatactattaagccagagcaacaaaagccaaaggtccctgtcttggaggaacatctagttggccaactaagcaaggaggaacaagatacactggatgcaaagtttaatgaagcttcagtcgctgataagaaagtccaagagttggagaaggagatccttgattctagagagaagaccgagttttatcgcacgaagatgcaggagcttattctttacaaaagtaggtgcgacaataggtttaatgaagtctcagaaagtatgtctgctgataaacgtgaggtccaatctctttctgcaaaatatgatgagagatgcaagaaggttggagatgtggcatcaaagctaacaatggatgaggctactttccgtgagatccaggagaagaagttggaaatttataacgccatagttaagctgcaaaaaggggatgatagcgatgagaagtttcaggagcgggctaataagatacagtcagatcttgaggagcttgtgaaatcattgaatgagcaatgcaagagatatgggttgagagctaagccaactactttagtggagcttccttttggttggcaacctggaattcaagagacagcttatgcatgggatgaagaatgggataattttggagatgaaggattctctataataaaggaactaacagttgaagtggagcctcccgttgtagcaaagagtcagcctactgaggatgttaaagcatcttcaaatggggcatcaacagaaaaagaagacaacaagggtgataaatctgctgctgctgtggagcaggttgtcaaacctgaaacagcaccttcgaatatcaaaccagagtcagcaaaaagtcctccagttagtcctgtcaagaacaaagaggatggtcccgatgaacatgataaaaagcaatctggaacaaatgatgtctcaccacgtgagagtatcagcaaccgtggagcaatggattcccctactcatggagataaaacccatgatggacactcatggggcatggataatgactccctatggaactttgatcataaggagggtgagaatggtgattcagatctcttctttgggccacaaggccttcccccgataagaactggaggttcctcatctggtaattcagttgtcaaggaacagaagccgttctttgattctgttcctggtaccccagtggagaaatccgtctttgattccatcccaggcacgccatttcagaaatccgtctttgattctatcccaggcacgccagttcagaaatccgtgtttgattactctgtccctagcacaccgatgcagaactcagtctttgattattctgtcccaagcacgccgatgcagaagtcactctttgattctgtccctggtacaccggtgcagagatcagttttcgattctgttccgagcacaccaatgcagagatcagtttttgactctgttccgagcacgccgacgcagaaaccattcttcgactcctttccaagcacaccaatgcagagatcactgttcgattctgggccaagcagagcagaatctcctaccgccagcagcatgtatggcaaagagcagaagggattcttcgattcttcagtcccgagtactccaatgtacaactcaagcttcacgccaaggtatagcgaagcaggagacgattcattcgacaccatgtcccaatacagctcatttggcatgcacgagagcaattcctttggacagcgcgacagcttatcgagattcgattctttcagcagcaatgctgacaacggtgggaatgacacttttgcgaggtttgattctttccgcagcacttcagatcagggtgggggcaacagcttcatgaggtacgattccatgaacagcagcagcgaccatgacgggatcggcacgtttgcgaggtttgattcgatgaagagcagtaactacaacagccggggctactcgttcgacgacgaggacccctttgggacagggccgtttaaatcgacagagaccacgagccacagcccgacaaaacatgggacggacacatggagcgcgttttgacaggcaggggctgtatcatatattcaatagaggtcatgcgcttgtgcaccttactgcagatatatacacacgtacaggggcaagacaattttttgttgtgtgcatgggcctctgctccaacacacctggggaaggggaagggatgggacggggatttgcttgtgtgcttgctttgtgtttaattttgtacgtaggctgggaacatgtgtttggtgggatgatgatgatgatgctgctgctgctgcttataaactcaacattctttataccttgtattgtacaagtgcatgtacaagatgtgagtcgacccgtttgggttgagt

SEQ ID NO: 3964 - DNA, 1067 bp, Zea mays
  Clone ID: 700345528_FLI
gaagcatctttcccttgctgaagtccttcaggttctgaatatcataattaacacaaaaaagtggtttgtgcctcattcttcaggttggcagccgttgtcgtttaacataatagtggctgatgctactactgccactggtggaaaggcttagcatcggtacattatctgcttgtaccaattgaacatgttgaggttctggtcgttggtgcaagctgcgtccgcaaaagctaagttctgttgaggtttcctagcacaatgctctgcattttgccaagtttggggttaagttgttttacacacagtatatgttagctggagtgaaacagtaagtagccttagactgctaaattttagtgggagtcaatctgtcaactattgggcatgttgaaagaactctgggcagccctggctgtggctactcctatgggtgataattgtggtggtaagatgcttatgcaatcaagcataaagcggttcagagggactatcgtcttttgttcaggcagtataccgatgcctgatgctggtggttatgatctgccctcattgtaccaagatggcttcaaaggcgtccatgaaatatgagttgacatggaggaaattttctgtagtattagactattggtatagctgcatagctgttgctattaagctactcgttgaagccttgagctacccacattatattcccagttcctacatgtactcattgcagcaagcatggatggacggaccctgtgagtgtgaagttcagtgtatccacttttgaagcatggcaacagagtctgacatgcaagcaaactgcattaaagacagtcatgctgctagctgcaaggttacctatcgtttggtggcctctattggctctgccgggaaaggtttggagttcatctaagcgccttccagcatctttgctcccacctttagatggcgggatgtttattgtaatgctggcaaactattatggtgcttcttgtaaatcttactggttgctgattctaccaagtgctcaggttgacatgttgcctgagagtaaattgtttgatgactctattaaatgcttcgat

SEQ ID NO: 3965 - DNA, 1060 bp, Zea mays
  Clone ID: 700345531_FLI
tgctgcaataccagttattccaggtagaaaatcaagagtagaaacatttgcgggtgccaatcggacctacactatagaagctatgatgggtgacaagaaggccttacaagctggaactagtcacaaccttggccaaaacttttcacgagcttttggaacacagtttatggatgaaaatggtcaaatcgaacacgtctggcagacctcttgggctattagtactcggtttgttggtgggattatcatgacccatggcgatgatgccggtctaatgcttcctccaaggattgcacccattcaggtcataatagtaccaatatggaaaaagggtgatgagaaggctgttgttgtggaagctgtagattcagttcaaaaaatactcaaagaagcaggaattagagttaaagtggacgactcagagctgcgaactcctggatggaaattcaatcactatgagatgaaaggggttcctgtaagaatagagataggtccacgtgatgtcacaaataagagtgttgtggtttctaggcgtgatgtccctggaaagcaaggaaaggagtttggagtgtctatggagccttcgatattggtgaaccatataaagggtcgtctagatgacatacaagcatcccttttacagaaggccataacattccgtgatagtaacattgtcgacgtaagctcatatggcgagctgaaggaagctatttctgaaggaaagtgggctagaggtccttggtcagctagcgatgctgatgagctgaaagtgaaagaagagaccagcgccaccatcagatgctacccattcgagcagcctgagggcaccaagaaatgcttcatgactggcaaccccgcagaggaagtcgcaattttcgcaaagtcatactaggcccactgtgtgtccactgtcagagataagaacagcatttccttttcaattttataggattgtaccctgtctacctaaggtccagattgatgacggttcatggaacagcattgtgtgctgctgatatttaaaatgtaaatttgataatcaataggtcaattttgttccact

SEQ ID NO: 3966 - DNA, 1115 bp, Zea mays
  Clone ID: 700345535_FLI
gttggagtatatagttcgtggtgagcagaggaatctatttgagcttatgcatgctattgcaacaacacaagggttgaaaggcttttggaaagggaactttgtcaacatcctccgcactgctccattcaaggcagtcaacttctacgcatatgacagttacagaaagcaactgctcaaatggtctggtaacgaagaatctgcaaactttgagagatttattgctggtgcttttgctggtgttacagcaacgattatgtgcatacctatggatacaatcaggacaaagatggtagctcctggtggtgaagctttaggcggggtcattggtgttgcccgccacatgatccaaactgaaggattcttctcgctgtataagggattggtgccttctcttatcagcatggcaccctctggcgctgtattctatggagtgtatgacatactgaagatggcttatctgcattctcctgaaggaaagaaaagggtatcgatgatgaagcaacaaaaacaagagacaaatgcattggatcaacttgaactgggtactgtgaggactttactctatggggccattgctggttgctgtgctgaagctgctacatacccatttgaagtggtccgtaggcagctacagatgcaagtaaaagcaaccagaatgaatgcgcttgcaacatgccttaagattgttgaccaaggtggggtaccagcactgtatgctggtctaatccccagcttgttacaggttctaccatcagcatcgatcagctattttgtttatgagttaatgaagatagttctgaaagtggagtgaatacaaattcattggtgagcctacaagcaagttcaaatggctaccacgtatcttgatgaaattgccgggcatccccagtaacttatgctgtgagggtagtttcaggttggtaaaatggttgttcagctgaagctttgcacactagttgactaaattgcacacgcggtcctattcgagacccgattcagtggcttaatagaagattgttctcttcgactccgtcctagggaaaacatctcggccctgcccaatttccgttgacaaattttacatactttatcgttgatgtatgtgacacattgac

SEQ ID NO: 3967 - DNA, 562 bp, Zea mays
  Clone ID: 700345539_FLI
cggaaactaaaataatgtttagttttcgtatttggcaatttagggactaaaataaaataaaatgaagggactaaaaattaatcccaaaaaccaaacacattcgtaaggatatctgaatatgaaatgctaaaccagatgatgcatgtcatatctcactaacaccacacttaagctgtgctaatgctggtcgtcatcatgcagtaagctgctgaacaacgccactggatccggcaacacgaacacatcttcgacgcctacaagtgacgctgagggatctgcgatatggagactaagaactgggagggacaaagggctgttgctcttccttcggttggtacttagcattgcggtggctatcgtggtggattcgaacttttggacatgacaagaggttgctagctgtataacaaactaaagccagaaattttgggtggtatgttagaggaggaaggaaggaggtgggcgggggattgggttatgcttagtgattctttattgttagataagcattaataaattgctcatttttcttcatctgatgaaatgtgtctataatctgttg

SEQ ID NO: 3968 - DNA, 228 bp, Zea mays
  Clone ID: 700345541_FLI
agacggaaggagagcttgaaaataatgaccgaaacagccaacaaaaggaagcagattgatcaagttgtccactacttagaggaaagactgagagaactcgatgaagagaaagaagaactaaagaagtaccagcagctggacaaacagagaagatcacttgagtatactatattggaccatgagcttaatgacgcaaggaatgaattagcttcggttatcatccatcgc

SEQ ID NO: 3969 - DNA, 533 bp, Zea mays
  Clone ID: 700345546_FLI
ggaaagggttcgtactcatggcgccgccgcagccaaagtcgggccttttcgttggcatcaacaagggtcatgtcgtcaccaagcgcgagctgcctccccgcccgtgccaccgcaaggggaaatcaacgaagagggtgtctatggtcaggggcctgatcagagaggttgctgggtttgctccttatgagaagcgtatcactgagcttctgaaggttggcaaggacaagcgtgccctgaagcttgctaagagaaagcttggaactcacaagagggcaaagaagaagagagaggagatggcgggcgtcctcaggaagatgaggtcggctggtacgcacactgacaaaaagaaatagagagcatttcaagttcatggagctggctgccagagattatgttccagtgtctgattttccatacatgtagaacctaatagacatgtcaaagtattatgtatcgaaccagctcatgggattttgctccttccaatgcatccagggtttatgtatcgaaccaatttatgggatcttgctctt

SEQ ID NO: 3970 - DNA, 565 bp, Zea mays
  Clone ID: 700345580_FLI
gtcgtgggatccatgatcagaaacttaaacgtggggattctgagaacattaaggcttcaaatggtatgtttctgaaccatagtgacgttgacagctccaagccaccagtggttgaactacttggagagttcgtgcttgcaagtagctcaagagaaagatctaccaagaaattgtatcagaatgctggagatgctacagataagaaattgttgaaacctttgaaaaaggatgaggatgttgaaaagatgcagatgcattcaagcatcatccaaagccctagtgttggaagagccaaaaaagagcaggagaaatctataaaccgggagaagaccgatgcgacgccaactccactgagacgctcaagccgcctccgcaacaaggtgacttctccctgaccaaaatccaaggtgctcagctcgtcgttcgctaacctttggatgctgggttcctctgtggtgtggtggaaagctgtggacgggacagcacctagttgttacccaagctttgatattgtactttaggagcagaacaatgttttaccagaatatatgctgcgtatttgtcc

SEQ ID NO: 3971 - DNA, 1174 bp, Zea mays
  Clone ID: 700345584_FLI
gacagggcaggtgatctcgaccttttcaactgggaaggtcccatatgttgtgaagctcaatcctgatgaggataagcagcatattctccttgccggaatgagcgataagaagattgtgcaatgggatatgaagtcagggcagattacacaagagtatgatcagcatttaggggctgtgaacaccataacttttgtggataacaacaggagatttgtgacctcaagtgatgacaagtctcttcgtgtgtgggagtttggcatccctgtggtgattaagtacatcagtgagccgcacatgcattcaatgccatcgatgtcactgcatcccaactccaattggctggcagcacagagtttggacaatcagatactgatatacagcaccaaggagaggtttcagcttaataagaagaagagatttgctggccacattgtggcaggttatgcttgtcaggtgaacttctcacctgatgggaggtttgtgatgtctggtgatggcgagggtagctgctggttctgggactggaaaagctgcaggagattcaagactttgaagtgtcacaacggggtttgcattggatgtgagtggcatccgttggaaactagcaaggttgcaacctgtgggtgggatggtgtaattaaatactgggactgaacgttggcagagatattggttgagctcctgggaaaggttttgtaacaatccgattcacgccgaatgtcatggcatactgtaagtcacatgctcgacaagagaatcccggaggaaaaaacatgttgtgttttttgaggttacatatatgggagaaaaaggtggggttttgccgctacctttgtgttggttctgcctgttagatgtccaaatgtacaatattcgcaccatattcaaatttttagttgtatctctgccactagcaacttgtttgcggtttctggtaatcctgttccttcgaacgtttgtaccatctgaggaagtgtctgttgtgtagtatccccctccggtctgttttataacttaggggttgtttgtttgggattgtaatctgtccagatcaaaataagttaagattatataatttgggcagattataatcacaaacaaacaggcccttagatagttccctattttaatagctggggccaagtgaacaggaaataaatagagattgagctg

SEQ ID NO: 3972 - DNA, 537 bp, Zea mays
  Clone ID: 700345641_FLI
aacacatctcctcgcatttcttcccatccgatccccccttcgcaaccaaaaccccaactcgccccgcatcgatggcgcccaaggccgagaagaaacccgcggcgaagaagccggcggaggaggagcccgcggccgagaaggcgcccgccgggaagaagccgaaggcggagaagcgggtccccgctggcaagtccgctgccaaggaaggcggcgagggcaagaggggcaagaagaagggcaagaagagcgtggagacctacaagatctacatcttcaaggtgctgaagcaggtgcacccggacattggcatctcctccaaggccatgtccatcatgaactccttcattaacgatatcttcgagaagctcgctgctgaggccgccaagctcgcgcgctataacaagaagcctaccatcacctcccgtgagatccagacctccgtgcgcctcgtccttcccggggagctcgccaagcacgccgtctccgagggcaccaaggccgtcaccaagttcacctcggcctaggctgcgcggccgc

SEQ ID NO: 3973 - DNA, 1422 bp, Zea mays
  Clone ID: 700345689_FLI
ggcatcggcggcgactacccgctgagcgccaccatcatgtccgagtacgccaacaagaagacccgcggcgccttcatcgccgccgtgttcgccatgcaggggttcggcatcctcttcggcactatcgtggcaatcgtcgtctcggcggcgttccggaacgcgttcccggccccgccctacttcgtcgacgcccaggcgtcgctcgtcccggaggccgactatgtctggcgcgtcatcctcatgttcggcaccgtcccggccgcgctcacctactactggcgcatgaagatgcccgagacggcgcggtacacggcgctcatcgcccgcaacacgaagcaggccacggccgacatggccaaggtgctcaagaaggagatcgaggcagaagaggagcaggtggagcgccaggtggtcggcgccgacacatggggcctcttctcggcgcagttcctccggcgccatggcctccacctgttggccaccagcagcacgtggttcctgctggacatcgccttctacagccagaacctcttccagaaggacatcttcaccaaggtcgggtggataccgccggcgaggaccatgaacgccatcgaggaggtgtaccgcatctcgcgcgcccaggcgctgatcgcgctctgcggcaccatcccgggctactggttcaccgtcggcctcatcgacatcgtgggcaggttctggatccagatcatgggcttcttcatgatgaccgtgttcatgctcgcgctcggggtgccgtacgagcactggaccaaggcgtccaaccacaccggcttcgtcgtcctctacgggctcaccttcttcttcgcaaacttcgggcccaacagcaccaccttcatcgtgccggccgagatcttcccggcgaggctccggtccacgtgccacggcatatcggcagcggccggcaaggccggcgccatcatcggcgcgttcgggttcctgtacgcggcgcaggaccccaagaagcccgaccatggctactcgccgggcatcggcatccgcaacacgctcttcgtgctcgccggaaccaacttcctgggcatgctcatgtcggtgttcgtgccggagtccaagggcatgtcgcttgaggagatctccaaggagaacgtggatgatgaagctgacgccgaagtgtagagagaccgtctgcacctctgcgtgcagatgcacatgtgaattgtgttgtgatgcaccgatggtgttgtgtggttttgcttgtgtcactgtatctgcgcatacgctacgaataaccgtatctggctggctggctgctggccatgctcgcgcgtgcgtgtctgggtgctcgtgtgcagcaaatcaatcagccgctgtgtgatttgctaccttttgatattgttgctgattatgtaataattcaaaactattatgggtaatttctcg

SEQ ID NO: 3974 - DNA, 2319 bp, Zea mays
  Clone ID: 700345691_FLI
gagaaagtcttgatgatgaactgtccactgaaatcatagataaatgtgacgggataccattggctatcattgcaatagctagtttgttggttgaaagaccatgtgaggagtggtcaaaagtgtatgactcaatcagtcttgggaatggagacaatacaacaaagatattgtcctacagctactatgatcttccttcttatctcaagccatgtctactgcaactaagcatatttcctgaagactatcagtttgatacaaatgctgcaatatggatgtggataggtgagggtttagtccatcttgagaaagaggagggtagcctatttgtggttggagaaagatatttcaaggaacttgtgaatagaagcatgatccagccgatagaggacaaatatgatcggttggtagaagtgttcagtattcacgacattgtatttgatcttatccgtaagttgttgaaagatgaagacttcattacccttttggacagcagcgggcaacatgcatctcaagatagtttaagggagaagaaaatatgcgtgcctcgctctgactgcaagctacgccggctggctgtccgaaatcaccatgtgcagcgcttccctgaagacaccatggacatgccagaggcgctgaggtcacttaacattatatattgtaatattgcgattatgaccccacttcatagtttcagactctgtcgtgtgctatgtatagaatacagctatgtaccgatcagcctaaagcatctagggaagttgttgcatctcaagtacctagagctatatggcacgcctgtggatgaactccctaaggaaattgggcatctgaggtctcttcagacactgttattagtcaatactggactagatgagctgccaccggctgtttgctcacttacacggctgatgtgcctgatagctgaggggttcaaaaggttgccagctgacaagatggggaacctaacgtccctggaggagctacggctagagagcgtagttggtcagagtgccacccaagccctagtggcagagcttggcaagctgacgaggttgagggtggtcaacatcaccttttcagaggagcttgaggagagcttgcaagaagcattggtgcaatctctgttcaatctgtggggacttcaggagctagcgctttcttctaaatggtggcagcagggaagcgctatgtggggagacttggagccaccaaggcagctcaggcgcctgattattaaaggtatcgtcttctcacgacagcctcgatggatcaaccgctcttgcatggcacacctctgcttcttatctctgacggtgctcgctgttgaagcacaggacctagataacctagcgaggttgccagagctccggtacctcaagctagatggtgtcagctggcctccaaggtatgatgctggcccgggcgacttcaggaatctgaggttctgcgatgtgggtacaatgctcgtgtttcatatgggcgccatgccaaggcttgaagagctggtgtttggagtttgtgcaggatactggagttgggaacagaatggtgtgctgttggagcagttcccaacaatggatgtgattgaagatcttgacttgggcctggataacctcctttcacttgagcaagtcacggtcatagtcaactgctcaggcactactgctgcaaaagtgcaggaggtggaggccgtggtcatgcgtgccatggaaaatcatgccaaccgtccaaccataaaaatggaacgagtaggtgaaaaattcatcttatctgacgaagagcgggaggatctgcttcagcgacgcattgaaaaggaaggccgcttcctcgagttcaaggataaatctgatgctttcttcatcagacacctgcggttgattcgacatcttcgaaaatccgttatttcccacaactgtgcgggtgccagcatgtgcgaggtgcggaaagtggaagcagctcggagacatgcagccgaggttcatcctaaccatccaagtattgaactgaacagaaaaaacaatgacgaaatggcctcctcatctgaccatcccaacacagagctcaggaattgataactcggtatgtccaatccttccaacccagccgcagctttcacgtcgtctcatcccttcctacgggcttggagatttcgagtgatacagacgacatgattgtatatcgtatgtttatgacttaagtattgtgtggttaaaatttatgagtggacatgtatgattcaatgtgtggtcaagattgagataattggatttttgccactcacaatgttgtcttcttgttataattagcactgtgtctatg

SEQ ID NO: 3975 - DNA, 988 bp, Zea mays
  Clone ID: 700345701_FLI
atccagccgccaccaggtgcagagtctttcgtcatctcttctccggcgaagaacccccagtcgcccaccagatcacttgttaaactttgttgaggggtgatggcggtttctttcgcaaacctcagctccgaggcagggcttaaaaagcttgatgagtaccttctcactcgcagctacatcactggctaccaagcttccaaggatgacttggctgtctacacttcgttttcgtctgctccctcgtccaagtatatcaacgtagcaaggtggtttaatcacattgatgcgctcgtgaggctgagcggaattactgcagagggccaaggtgtgaaggttgaatcgtcagcagttccttcagccccaactccagatgttgctgaagcacaggccccagttgctgaggaggacgacgacgatgatgttgacctttttggtgaggagaccgaagatgagaagaaggctgctgaagagcgtgctgcagctgccaaggcttctggcaagaagaaagaatctgggaagtcatcagttttacttgatgtgaagccatgggacgatgagactgacatggccaagctcgaggaagctgttaggagtgtccagatggaagggttgctctggggcgcatccaagcttgtcccagttggatatggtatcaagaagctgcaaatcatgatgaccatcgtcgacgaccttgtctctgtcgacactctcattgaggactatctgtgcgctgagccagttaacgagtacgtacagagttgcgacatagttgccttcaacaagatctaggcgtgactttcgatcagtccttcccctggggtgctggcgatggtggtggctgggcaatgcaccagcctaatttatccatagctatatgtctgctttgtgtggccagtgatattgccgtgagtatttttggatcctattcgagtcgaatgtaccagtaccagagttaatttgctttaattcgaaacaccgttccagttgg

SEQ ID NO: 3976 - DNA, 653 bp, Zea mays
  Clone ID: 700345709_FLI
ctggcaagaccatcaccttggaggtggagagctctgacaccattgacaatgtgaaggccaagatccaggacaaggagggcattcccccagaccagcagcgtctgatctttgcgggcaagcagctggaggatggccgcactctcgcggactacaacatccagaaggagagcacccttcaccttgttctccgcctcagaggtggtatgcagatctttgtaaagaccctgactggaaaaaccataaccctggaggttgagagctcggacaccatcgacaatgtgaaggcgaagatccaggacaaggagggcatccccccggaccagcagcgtctgatcttcgccggcaaacagctggaggatggccgcaccctagcagactacaacatccaaaaggagagcaccctccaccttgtgctccgtctccgtggtggtcagtaagtcatgggtcgtttaagctgccgatgtgcctgcgtcgtctggtgccctctctccatatggaggttgtcaaagtatctgctgttcgtgtcatgagtcgtgtcagtgttggtttaataatggaccggttgtgttgtgtgtgcgtactacccagaactatgacaaatcatgaataagtttgatgtttgaaattaaagcctgtgctcattatgttctgtc

SEQ ID NO: 3977 - DNA, 295 bp, Zea mays
  Clone ID: 700345711_FLI
cggagaggacgaggtgacggacggagagggagacgactaacagacgctgctgacagagtggcgcacgagaggagaggagagttccgaaccccccttctccgctgtactgtacatgagctgctgacgtgtgtcggataagtagtagtagctggcgtcccggcgggtgctggaaagaataataataataataatgtaacgaaagatggccgccttgaggttgagggagcgaccgagcgtgaagcaacttggccgccatggacaatacaattgggacacagacacaccggtcgtctcc

SEQ ID NO: 3978 - DNA, 1046 bp, Zea mays
  Clone ID: 700345713_FLI
gtgaggatgatgatcccgctggttctgaggatgcatcaacaggagaggaagctgatggggactctgaggcaaatgatcatgctttgagtgatgatgaacatgatgagcctgctgcaaagaaaaagtcttcagatgttaaacaaaagaaagaaacaggttctgatgcaaaggaaaaggatgcaccaggaaaaaaaggttctacgaaacgtgcatcaaagccttctcaaaacagtaaaaatgagcctgaggtagagataaaaaaggttggcaagagagaaaagagttcaaaagaaactgacgtgtcaccagattcaaataagtcaaacaagaagatttctaaatccaaaaagggtgatggaaaagaaacccaaaacaataaagctgccaggtcatccaataagagtaaaggtaaagtcaaaggtgggtcagtggctgggactgccccaaccactgaacagcttcatgctgttgttagtggcattttgaaggaagttgacttcaacacagcaactttggctgatattctcaggcaattagggacccattttgaaatggacctcatggacagaaaagcagaagtgaagcgcattatagaagatgtaattaatagtatgtctgatgatgaaggtgaggaaggctcagaagatgaagctgaagacgatggtaaggcggataatttaaagagtgaacccgatggaggtgaagagaagtgattctgtggactggatgtggattgaacatcgaagggtcatttttcatggcagtctcctgtttggaggtttggctctgtacaattcgggcaccgcaagaacgagccggtgacctgggtactgcttacatgattgttaaccatttcaacagccatacgcatctagctgagcttgacttggtagtgaatgtagtctagtcgcttgtcatgtaatagctttgcgattgatagtttgctagcttaggtagctagcctgactgtaatatgcagaataattcttgtcttgtttccgtccattttatccatgtaaaactatgagttctgaatctttctgaac

SEQ ID NO: 3979 - DNA, 1800 bp, Zea mays
  Clone ID: 700345757_FLI
ctgctcctcttccgccgccgcaggatctcgtatcgccggagaccatgtaccgcgccgccgggagccacctccgctccctcaagcatcatggtgcttctaggcttgccagtacaagtgttgcgaagcagtcctcaggtggtctgttcagctggcttcttggtggaaaatcaagcgaactccctccccttgatgttccactcccaggcattagcattccctcacctctaccagattttgtagagccatctaagacaaaagtcactactcttccaaatggcgtcaagatcgcctcggagacatcatcgagcccagcagcatctgtgggtctgtacattgactgtggttccatttacgaaacacctgcttcatctggagtatcacatctgttggagagaatggccttcaagagcacagtgaatcggactcacttacggttagttcgtgaggtagaagccattggaggaaatgtctctgcatcagcttcccgtgaacaaatgagctatacctatgatgcattgaagagctatacaccagaaatggttgaagttctcattgacagtgtgaggaatccagcattcctcgattgggaggtcaaagagcagctccagaacataaaatctgaaatagctgatgcgtctgctaatcctcaaggtctacttctggaggcccttcattcggttggatattccggggcactggcaaaacctttgatggcttcagaatctgctgtaaaccggttggatgttagcagcttggaggaatttgttgctgaacattacactgctcccaggatggttcttgcagcatcaggagttgatcatgatgcgctgatttcagttgtagaaccacttctgtctgaccttccgtgcgtgaaacgtcctgaagagccaaaatctgtgtacgtgggaggagactatcgctgccaagcagattctccaaacacacacatcgcacttgcttttgaggtgccaggtggttggaatcaagagaaaactgcaatggttgtgacagtgcttcagatgctcatgggaggaggagggtccttctctgctggtgggcctggaaagggaatgcattctcgattgtatctccgtgtcttgaccaacttccaacagattgaatcattctctgctttcaatagcgtctataacaattcgggcctttttggaatttatgcagtcactagcccagacttttcatcgaaggctgtggatttggcagcaggggaactcctggagattgcgacacctggaaaagttacacaagaacaacttgatcgtgctaaagaggcaaccaaatctgcagttctgatgaacttggaatcaaggtctatagcatctgaagatattggaagacaggttcttacttatggggaaaggaagcccatcgagtatttcctgaaaacagttgaggagatcactttgaatgacattttgtcaaccgcaaaggagatgatgtctacaccactcacaatggcatcgtggggcgacgttattcatgttcctagctacgagtctgttagccgcaagtttcactcgaagtgagaggatccagcatgacctgttccaacaactgatgtgaagcctgcaacggccctcagctgggacagttactctcccacagaataaaaaaccatgtggtttctagcgcccctcctaattactccctctgcatgtatacgccaagcatgtttttttggtaagaatcatcaagccccttggcgactcgtttctgagtttcgcagcggcgctagattttattttatgtggacaagcgagctttctgggtgcgctcgtgcag

SEQ ID NO: 3980 - DNA, 987 bp, Zea mays
  Clone ID: 700345788_FLI
caaacacacgacagggtagctgtgatctactgtctagccaaagtaacttcagacaaccaatggaggaggatgttggaaacatagaggctagagccaatcatacactgaggcaaaagaaaccaagctttgatctccaggatttattaacagcaagtgattctccttcatggccagatagcaatttgagggtaaattttcagatgggagatgaaagagaagcaattggtggggactggatagataaggttgtagtgaacaacaataattcagccagtgattgggagggtgacaacgcagctttacctgactttttttaccagagatatcattcaggtatgagggagaagcagtaccagaggaacaacatgagacaaaaggatgaccacgagtatgaacagcaaaggcctcgattttactctacaaatactgatgattctgatgacattgacatagcaacaagtgattcctcagaatcagatgcattatggcagctcaatgtccaaagcatgaataactcaattagtgagagtggttcaaaggttaagaaaccacaaataaagcttagagatggttcagatgccaggacaccgattcattctcaaataccatcagggtcgagaaaagtcgcaaacggttcgagtagatctgttaggcagcctttaagcagaagcgacagcagaaggctttcatcaaatggaagacaaactggtggaaagtagggacttacaatgatcgcgtgcagtttttgcctttttcttttctgtgtttgtcacgagagattgtgaggttgctctcgagtacagcaatgagtgacaataaacccaattgagtgtgtcagtgtggtgagttgtgatctcaacaactggtgtgtgaggccattaactttttttccttattggcttatcaggctatgttgagttcttgctaattctctgtatcttgtccataatataaatacataatgaaaagaaaggaaattgattgatc

SEQ ID NO: 3981 - DNA, 1194 bp, Zea mays
  Clone ID: 700345814_FLI
gcattgcggcgcgcgagcacaccgaaccacccacctcggcggcggcggcggcggcttttctgcctgcgaagagagaaaccaaggagaggggcaactcggaagagggcgaggatgcctcggccggagttccaggcgccgccggatgtgttctacaacgagtcggaggcccgcaagtacaccacctcctcccgtatcatcgaaatccagtctaggatttccgagagggcgctggagttgcttgctctccccaacgatggcgtccccaagctacttctcgacataggatgtggttctggacttagtggtgagacattgacggagcatggccaccactggattggctacgatatttcaaagtctatgctcgatgttgccttggagcgtgaaacggaaggagacctcctacttgcagatatggggcagggcttgggcttgcggccaggagttattgatggtgcaattagtatttcagcaattcagtggttatgcaatgctgacaagtcttctcatgaaccaagattgcggttaaaggctttcttcggttcattatatagatgcctagcaaggggagcaagagctgttctacagttttatgctgataatgtgaagcagagtgaaatgattgtgacttttgccatgcgtgctggttttgctggcggagtggttgttgactggcctcatagttcaaaagcgaagaagtcctaccttgtcctcacttgtggaccaccttcagttactacatcacttccaaaaggtaaaggtgaaaatggtgaggcgtgcagcgatgatgacgataatgagagcagtggcgaagatggcgacagaacagtgggcatatatgaaaggaataggccgaagaagcggcagaagacgaaaaagaacggcaaaggcaaggactggctcctgagaaaaaaggagcagatgagaagaagaggacatgatgtgcccgccgacacgaagtacaccgggcgtaagcggaaaggctatttctagctctgtgcaatgccgccttgcctgcaatgctggctgttcagttatgatgctagttcatttagcagaagcagaaggatttttgtaaagggtgaagcgaggagttgtactggtattcgggagtcattgcatttttagacaacgatgtgaaactgtcatttttgtagaacgtggatgttgagatgaatacagttggtttgcgtg

SEQ ID NO: 3982 - DNA, 2138 bp, Zea mays
  Clone ID: 700345831_FLI
gtcttttcggcggacttcaccgcatacaccgctgcccgcgcgcagccgcgcaggtgcatctgcgccgccgccggcccgccgcacccgcacgtctccttatacccatccggccatctacacacggcagtccacgctcgtggcaccgcactcactccgaatcctgaagcaacaaacaccagaagcgcaccaactccccaaccaccggagaccgcaccccagcaaaggatggcatctgactccacggccgccgtgacggtggacggcagcgcgcttgcggggcgcgcgctggccgcggcgggcacgcggcacatgttcggggtggtgggcatccccgtcacctccctcgcgtcccgtgccgccgcggccggggtccgcttcctcgctttccgcaacgagcagtccgcggggtacgccgccgccgcctacggcttcctcacgggctccccgggcgccctactcaccgtctccggcccaggatgcgtccacgggctcgcgggcctctcccacgccaccgccaacgcctggccgctcctcatgatctccggatcctgcgatcaggctgacgccggcaggggcgacttccaggagctcgaccagatcgccgccactaagcccttcgccaagctcgccgtcaaggcaacaaccatcgccgacatcccgcgcctcgtcttccaggccctcgccgccgccgtgtccggccgtcccggagggtgctacctcgatatcccgtccgacgtcctccaccaaaccctccctgaatccgaggccgcggctctcatagcagcagcagccgccgattcggccgcatccgatccttccccgtcaatgcacaagtctcttgacgagggaatcgccaaagctgcggacctgctccggtgtgcggagcggcctctggttgtgattgggaagggtgcggcgtatgcgcgcgcggaggaagcgattcggaagctggtggacaccacgggcatccccttcctcccgacgccgatggggaaaggggtcgtgcctgactcgcatccactctccgccacggcggcacgctcactcgccatcgggcagtgtgatgtggctctggtcatcggtgctaggcttaattggttgcttcactttggcgagccacccaagtggtccaaggatgtcaagttcattcttgttgacgtctccgaggaggagattgagctccggaagccacacgtggggattgttggggacgcgaagagagtaactgagctgatcaaccgggagatcaaggacaatccattctgcttggcaaggtcgcacccatgggtcgaagcgatcaccaagaaggccaatgacaatgttcttaagatggaggcgcagctagcgaaggatgttgtgccattcaatttcatgacaccattgcggatcatccgggatgcaatccttgccgaggggagtcctgctccagtagtggtatcagaaggggcaaataccatggatgttggcagggctgtacttgtgcagaatgaaccaaggacaagactggatgcagggacatgggggacgatgggggttggattggggtactgtattgcggctgcagcagctgaacctgaacgactcgtggttgctgtggagggcgattctggattcggcttcagtgcaatggaggttgagacgttggtgaggtaccagctgcctgttgttgtaatcgttttcaacaacaacggtgtctacggcggcgaccggagaagccctgacgagataaccggaccatacaaagatgacccagccccaacctcatttgttccggcagcagggtaccataagatgatggaggcttttggagggaaagggtatcttgtggagacaccagacgagctcaaatctgccctttcagaatcgttccgcgccaggaaaccagcggtgattaatgttatcattgatccttacgccggcgcagagagcggtcgaatgcagcacaagaactgaaggcgttgggcttttgtaccataccatagcaggatgcagatgcgacttgatacaaataagcagcaaccgtcaatcaatccttttgtttcttttttacgacctcgcttcgttgttcgtggtacagacgtggggcgcttttaattggaagtcccatttgaaggcatgtgaatgtgttatgattatct

SEQ ID NO: 3983 - DNA, 1405 bp, Zea mays
  Clone ID: 700345841_FLI
ctctctgatccgcggcaccgccgctggcgctcgcggtgaggcgtcgaaggtcaaccccctatcttccacctcgggggactgcctacccggtggatcgacgcagcagctttattggttccccggagacctgcaagtgcaaggcgagctagacctagcaaccgctccctgccgaccttcggcgtcttgggagtaaacatttctgtccaaccaataccgaagatctcccatcggctctgtcgatttgcaatggagcccggcagcccagccccgaagaaatcacggctggtgcactcagcggactgcgaaatggaggaggcgcaggcgccttccagttccaatgcagcggggggcgtgaaccagagctcgcactggacccagtggcagatcctggactccatcctcccgaccggcggcttcgcgcactcgtacggcctcgaggccgccatgcagtcccgcgtggtgaacgaccaggaggacctgaggtcgttcgtcgtccaggtcctggacagcgccggcagcctgctgctgccgttcgtgcactgcgcatgcgcaggcaagtcccccggcgacgcagcggcgtgggccaagctggaccggttgctggacgccacgttgacgaacgaggtcgccaggaaggcgtccgcggctcagggctcggctctgctgcgggtggccgcgtccgtcttcgccgaggttccggcgctgcaggagctccggcggacgttgctgggctccaagagcgtgtcgttccaccacgcgcctgtgtttgggctggtgtgcggcttggttggattcgacggcgagacggcgcagcgggcgtacatgttcgtgacgatgagggacgtgctctctgccgccacgaggctcaatctgatcggcccgctggctgcttcggtgctgcagcaccagcttgcgccggatgccgagaggatggtgcggaaatggagggaccgtgatgtctctgaggcgtcacagactgccccgctgctcgatgccgtgcagggctgccacgcttacatgttctccaggctgttttgttcgtgacaacaagccatacatgatacatttccctggacaaaactggcagccttccatggccatggctgatggctccaagtgatctccaacgtagcagctaaatggacagacaaagctaaaatagctgcccacgagctactgtagcagtataaaacaccttccaacagggcagctaaacgagacaggcaaaaaggatggaaagagagaggaaagccataatagcttgtactgtggctggcagccatttcctttttctgtgtctgagaacatgacctcaccatagcttgtactgtggctggcagccatttcctttttttgtgtctgagaacatgaccccaccatctccatctgcttcatttgttggact

SEQ ID NO: 3984 - DNA, 1403 bp, Zea mays
  Clone ID: 700345843_FLI
attcaatctttcatagacagggtggccgaccgtcttccgagttggaaagctgatcttatgactagagccggtaggaagattatggttcagcatgtgctctccagtatgatcatatatttggctatggccattgattttcctcaatgggctttggaggcaattgataaaattagaaagggttttctttggaaaggccgcaaggaagtcaggggaggacattgtctggttgcttggggaagggtgtgcagacccctccatttgggagggctgggtatttctagtttaaaggaactttgctgggcccttcgtatgagatggttatggcttcataaaactgatcctgaaaaaccttgggctaatctccctatccaagttccaaaaaaggcagaagctttcttctccactgttttggtctctaaggttggaaatggagcacacactctgttttggacaaataaatggatcttggggcagaatgtgtgtagtctggcgcctaggttattcgccatcattcctaaaaggattgcaaatagaagaactgtgcttgaagctcttgccaacagaaaatggatatctgatataaagggtgctctgtctgtgggagttctagtggattatctgaatctttgggagcttctttcagaaatagtgttgcagcctgaagtggaggataagcacatttttagtattgcagcagatggtaaatactcggctaagtcggcttatgagggcctctttgctgggtcaacgtcctttggtctctatcacctgatttggaaaacctgggcacctctaaagtgtcggttctttctttggctggttgctaacaaaagatgctggaccgctgacaggcttgcgaagagaggcttagatcatccagctaggtgcctcttttgtgaccaggaagctgaaactattgatcacatcctcgtctcctgtgtgttcacaagagtattctggtttactcttcttaaaccgtttgggtttcagagactggctccccagcctggacattcttcatttatggcttggtgggagcagatttctgggttggcttctggtatccgtggtaaaggtcttaattctcttgtggccttaggagcttggataacctggaagcatcgtaatagttgtgtttttgatggttgtactcctagtttagatctgtccattaatttagccagggaggagaggcagtcttgggagatggctggggctaagggtctttcataccttgctgccctaattcctggagactagggagttgtttagtttgatggattttttcagtttgctgtgtttctggcccccatgaggaggccttgtaatttgtccagatctctttgatctggatatatctcttcttcttaatatattgaggcgcagttctcctgcgttttccc

SEQ ID NO: 3985 - DNA, 920 bp, Zea mays
  Clone ID: 700345850_FLI
caaggatgcttctgccgtgctgctctccgaggaattccatgaggttttcccgttgtacctttatactggaacctcagatcaagcggacgatgagtactcattggattcaattgttaaatttggtatcaatgggaagaagacctccggtgggaaaccgggcttcttgtacagctctctacggaattcacagtcggcacaaggcactatgagggtgaagaagaatctggtggtcagtggattggggaagacccatcaggtgtacaagtatgtgggaactgatggatgctacttcagggatgtgagcagcaggaactatactatagtttccgaccgctccgatgattcttgttcaaaaagagcatatagctctgtcagcgcgaagttgaatgatcagccagcaagaagaaagttgctggcgaacaaattgtaaagcacggaaaaggatctagttcgtccacgtttcagttttttactttgcttcttgaataaaagctgtttggcagctcgtgcttcagaaagtaggtaagaaacttgaatgtccctttataaacacgccaattcggatctagtggcaaggtattgttatcagtgactatcaattgcatcaccatcatgtctatagttgcacaggatgatgcacgacaggacgagggatgaccactttatactggcagccaatactagttagtactaatcaagattctgacacgatcacactattaatttatgccagcattgcttactccgcatagattggatttgttccggatttcgatctccttcaaggcatcagcagattcttgttgctcttctctgtcctctttgcagatgtgtgttttggaagttttttttccctttcgaaaagctctttgcagatgtgtggtggtacttattttttatgtcaagacatacttggacct

SEQ ID NO: 3986 - DNA, 1500 bp, Zea mays
  Clone ID: 700345874_FLI
ggacttcctcgtgctgtgtctgtctgtctgtcgctctcgctctcagacgactgggccgccgccgcttggtgctgaggctttggttggtctcttcggcggcgacgagcacccaccagttctgtagaaatggctgatggtgaggacatccagcctcttgtctgcgacaatggcaccggaatggtcaaggctggttttgctggcgacgatgcaccaagggcggtttttcctagcattgttggccgtcctcgccacactggtgtcatggtagggatgggacagaaggatgcatatgttggcgatgaggcacagtccaagagaggtattctcacgctcaagtacccgattgagcacggtattgtgagcaactgggatgacatggagaaaatatggcatcatactttctacaacgagcttcgtgttgccccagaggagcaccctgtgttgctcactgaggctcctttgaacccaaaggccaacagggagaagatgacccaaattatgtttgagactttcaatgttcctgccatgtatgttgcaatccaagcagtgctctcactctatgctagtgggcgtactactggtattgttcttgactctggtgatggtgtgagccacactgtgcccatttacgaaggatatgcccttcctcatgcgattcttcgtttggatcttgctggtcgggacctcacagactccctcatgaaaatcctgactgagaggggttactccttcacaacctctgccgagcgagaaattgtaagggacatcaaggagaagctggcatatatagctcttgactatgagcaagagttggaaactgccaagaacagctcctcagttgaaaagagctatgagctacctgatggccaagtaatcaccattggtgcagagagattcagatgccctgaggtcctcttccagccatccatgattggtatggaggctgccggaatccatgagacaacatacaattcaatcatgaagtgcgacgtggatatcaggaaggacctctacggcaacattgtgctcagtggaggttcaactatgttccctggaatcgctgatcgtatgagcaaggagatcacttcccttgcaccaagcagcatgaagatcaaggtcgttgcaccgcctgagaggaagtatagtgtctggataggagggtccatcctagcctcgctgagcactttccaacagatgtggatatctaaggaggagtacgatgagtctggcccggcaattgttcacaggaagtgcttctaggcttcgcaagttcctcatcgttgcctagtctcaagttatgtccccttcatttctcaagatacgtgtggcagatttgcatggtacggttcatttatcaagttatgcccaccccctctttgtatgttgtggctccatgtgcgagcacgctgtctgtcgtgacacctggttcgtcagatgttttgtcaaacttgcttggcttgattggttgtacttgtacctgtaagagctgatagttatatg

SEQ ID NO: 3987 - DNA, 1159 bp, Zea mays
  Clone ID: 700345882_FLI
gaggcatataagcatacagaagcaagggcaataaatacatcaatgaccaaaggaacttacactatggatgagagttcatccggcatagatggtgcttgtaatgaacacggttcatgtaatgcttcagccatggaatgcagtgataattcggattcggagtgtgaaatcttccgagtcaagcgcaggtccacctcatttgacaaacctacttctgaagctaagacatcaaccttgtctgaacagcaggttctgaggcggctgaagaaggtacatcctgaagtacagcaagtcatcagtaagcgtcaagaagaatctggtaatggttcagttcgcgctgcccacatgagccagaaaagctcaaatcctgcccctgctgatgacgaaacagaggacatggctcccataatgtggagaataaagcggcgacagtcagaaacccaagatgctacatgtcctggtacgagaccgcagtcatatccgccttccagtggtggttctggagaagagtttgtggaaagaactagagatgctgcagtagaactccgtccaaaacgagtgaaaatccggctaccttctaatgccagtaggcagattgagcagcagcgcagttcagggcagagatttgctagggaggacaggttgccgcttggttttccacgtacattttagggaatcacaggtgctactaacctctacttgagcagacgaattctttgtttaggtacactgttaactacaaaacgtggtgacagaagggaggagtgggagggatcagttgcagactgactttagaattggcaggaaaggaagcggctatctaatcgattcttttgtgcagcagggcctccaatttgaggccactgggggcacgcttagaagatacacgtgataatattcttgttgctggaggttccgtgtcactgccgatagctctttgatgcctggctatcagtgacacagattaaagagaacctcgctaccttgatatgtccgctagtgtttagagcatgtagctagcttagctgttatctctctcactgtaccaacggcctttcccttgtaatttcctgtaaacaggcttagctgctacactatggctaactctattcttttgttggtttagccttaacgttaaattcaatgcatttcttttttggtt

SEQ ID NO: 3988 - DNA, 915 bp, Zea mays
  Clone ID: 700345912_FLI
cagccaaaaaaggacggacttgcgcgacagggtcgaagactcagaaggggaatctccggaggatggaggtgggcaggactccgcggcgacgggcgtccccagcggcagcggcggcggcggcggcggcggctgtgccttcgctgcttctgttcgccgtgctattcgtgggccgggcggcggcagcgttgggcggcccggggccggcgctatacaagcacgcgtcgttcttcgaccgcgacggcgacggcgtcgtctccttcgcggagacgtacggcgcgtttcgggccctcgggtttggactcggcctgtccagcgccagcgccgccttcatcaatggcgcccttggcagcaagtgcagacctcaaaacgcgacgtcgtcgaaactggacatctacatagaggacatccggagagggaagcacgggagcgactccggctcgtacgacgcccaaggaaggttcgttccggagaagttcgaggagatattcgccaggcacgcgaggacggtccccgacgccctgacctcggacgagatcgaccagctgctccaagcgaacagagagcccggggactacagcggctgggctggcgcggaagcggagtggaagatcctgtacagtctcggcaaggacggggacggcctcctccgcaaggacgtcgcgaggagcgtctacgacgggacactgttccaccggctcgcgcccagatggaaatctcccgacagcgacatggagagaagctgataagcgtggtccgggagaactgaaccgagaggaccgtcctattgatgtcgtcttgcgctgggctgctctgaactgaacaagtctggacatgccgtcaagcgacatgtgggtgtgaacactctttcgggtcagattattaacaagaagggtgtgaccgtgtgagtgtgaacag

SEQ ID NO: 3989 - DNA, 509 bp, Zea mays
  Clone ID: 700345914_FLI
gtttttttgttgtgctaaatactgaacataatttgggtgtgttaatattttatttattgtctgcacatggtttgcgttcttctgatgatggctcatggatcctgtaaaatatgtgttaggatttggatatccatgcgggcactaccacagtccacagggtgctcatctcttgtgttcttggctcttgcaagcattaggtcgtttctaaaaccacattggcaaaatgaactctatggtgtttgaggttgctgaattggatggagcaacaatgatttgtcgcactaacaataaaagaaaaggttacttgttggttttaaatgttagtaattactacgaagtacaataatttgtatggagcgcatccagtttagcaactattccatattttaatctatcttttttataagtttgagttcatgtgacttaatttagaaacttgaactcacaaacttcctcttatttggtctctatatggtggaattatgtcattctataatctctgttcattt

SEQ ID NO: 3990 - DNA, 1262 bp, Zea mays
  Clone ID: 700345973_FLI
agatggtctcggtgtccggcgagccgctcgagaggctgggagcctacatggtggaaggtctcgtcgccaggctcgccgcctctggcagctccatctacaaggctctgaggtgtaaggagcccaggagctccgacctcctctcctacatgcacttcctgtatgaggcctgcccctacttcaagttcggctacatgtcggccaacggcgcgatcgcggaggccgtcaagggagaagacaggatccatatcatcgacttccacatcgctcagggggcgcagtgggtctctctcctccaagcccttgcggcccggcctggcgggccaccgttcgtgagggtcaccggcattgatgatcccgtttcagcttacgcccgaggcggcggcttagagttggtcggcaagaggctgtcacacatcgctggcctctacaaggtgccctttcagttcgacgcggtcgccatctccggcagcgaggtggaggaggggcatctgggcgtcgtccctggcgaagccgtcgccgtcaactttactctagagctgcaccatatccccgacgagaccgtgagcacggcgaaccacagggaccgggtactgaggctggtcaagggcctgtcgcccagggtgctcacgctggtggagcaggagtccaacaccaacacggcccccttcgcgcagcggttcgcggagacgctggactactacgcggccatcttcgagtccatcgacctggcgctgcccaggggcgacagggagcggatcaacatcgagcagcactgcctggctcgggagatcgtcaacctggtggcctgcgagggcgaggagcgggtggagcggcacgaggtgttcggcaagtggaaggcgcgcctcatgatggccgggttcaagccgtccccgctcagcgcgctggtcaacgccaccatcaagacgctgctgcagagctactcgccggactacaagctcgccgagagggaaggcgtgctctacctcggctggaagaacaggcccctcattgtttcatcggcatggcactagtgttgacttcgagagaatgttggtctcgtggagaatgtttcttgtgactttctacctcgttgttagtatagatatgattggctgagcactaaaactatatatataggaagcctgtggtggtactgagttgtacaacacctataacctgatgttgtgatggcagtcactaccagcctgataatgtctagcagtaaattcgagtatatgtttcagttaatcagttttgctttg

SEQ ID NO: 3991 - DNA, 2101 bp, Zea mays
  Clone ID: 700345995_FLI
ggataacaataacatactaacaacaacagactgtgacggtggactgccagcaagccctcgtttgagattcaatagagaaggttcattacttgcagttaccacaagtgataatggaataaaaatacttgccaacactgatggacaacgcttgcttaggatgcttgagagtagagcatttgagggctctagaggacctcctcaacaaataaacaccaagcctccaattgtcgcccttggtcctgtttcaaatgtcagcagtcctatagcagtaaatgccgagcgacctgatcggatcttgcctgcagtgtcgacaagtggcttggcacctatggatgctagcagaactccagatgttaagccaagaataacagatgaatccgaaaaggtcaaaacctggaagttggctgacattgttgataatggacatcttcgagccctgcatttgacagacacagacactaatccaagcaaaattgtccgtttgttatatacaaataatggggttgcactcttggctcttggctccaatgctgttcataagttgtggaaatggcaacggagcgacagaaatcctagcggcaagtctactgcatctgttgcacctcacctgtggcaacctgcaaatgggattctgatgacaaatgacacgaatgatggcaacccagaagaagcaaccgcctgcattgcattgtcaaaaaatgactcctatgttatgtctgcatctggtggcaaagtctcgttgttcaatatgatgacattcaaggtcatgactactttcatggcacctccacctgctgcaactttccttgcattccacccacaagataataatatcatcgccattggaatggaggactctaccatccaaatctacaatgtccgcattgatgatgtcaaaagtaagctcaagggacatcagaagaagattacggggctggccttttctcaatcaatgaacgtgctagtatcatcaggtgctgatgctcagctatgtgtgtggagtattgatggctgggaaaaaaagaaatcaagatatatccaacccccagcaaaccgacctggcactttggttggtgacacaagggtgcagtttcacaatgaccaaacacatcttttggtcgtccatgagagccagttgggaatctatgatgggaatcttgactgtttgcgcttgtggtctccaagagatgcactcccagctccgatatcgagtgcgatatactcgtgcgacggtctcttggtttacgctgggttctgcgatggtgctatcggagtcttcgaagcagaatctcttaggctgcgctgccggattgctccttccgcttacattccaccttcaatactagcctgtgctggacgggtctacccgttggtagtcgctgcacaccccatggagcctaaccagatcgcgatcggcatgagcgacggcaaggtccatgtggtggagccattagacggggacccgaagtggggatcggcacctccacaggacaatggagcgcacccgcacccgcatccagcgatatcagcggcaccgtcgaccgccaccaaccaggcatctgatcagccaacaaggtgactctggcctgcagcactggaggagattcgttagcgcagagactggtaggacctgtaggagatagggagaaaaggtaaacgattagatgacgagaggatgatgctatatttatcaagtccgcagcgccctgcctctcttgtgacggcccgcgacacaagtgtggtgattgacagtgacatcgctcactctaagttaggttttggttcttccctggcccccggaaatcatcacctggcgccgccacattcgaatggagatggatctgctggcatcatcttgcttcctcttttgtaaagcttttcctgctgagtttagtggtaccttagattgtcgtccatttctgccctgttctccgggcagctatttgtagtgtaaaaatatggtggcgtgctggatggtgttatttatgcgtgcgtggcctgtcatgacgaattccaccatgtttggggctatttgatggatgtttactgatcatggctcgaaattatttttttcttcgtgccatttgcaattgtagaccgt

SEQ ID NO: 3992 - DNA, 1680 bp, Zea mays
  Clone ID: 700346018_FLI
ggaaaggcaaaggagaaaatttcgtagcaataaataaataaataaataaaattaataaaagaaaggtggcgtagaggataggaggagaaccaaggttgcgtctcgaaggttcttgcctcgttgggaagggatggcgtcggaggtggaggacgaggcggcgacgccgctgctcgccaacggtgcagccgacgtccgccggagggtgcgccgccgcgccgcttcctgtcgtttgattttcgttttctcttttctcggatttggctgcttttatgagccctgatcttgtccggcgggtgccgtggtgtgcagagggaccaggcgaaggcaattctgtccacgcaggccgtcaggatcgccaccaaggccgagcagcatgagcgcttcatctttaaggtcacacacttgctgggtgttcttggatttgggggattttgctatctcttgggtgccagaccacaggatgtgccatatgtgtactgcctgttctatgtcatatttgttccgctccgctggatttactaccgctacaagaaatggcattactaccttctggacttctgctactatgccaacacctttctccttgtaatgattctcttctacccagaggatgaaaaactttttatggtttgcttctcgtttgcagagggtccgcttgcttgggcattaattgtgtggcgttgcagcttggttttcagttcatttgacaaacttgttagtgtcctgatacatctcttacctgggattgttctattcactatccggtggtggaatccacaaacatttgctgccatgcacccagaaggaagagatgctagagtcacatggccatatgtggaggacaaatcatatctgtggacatggcttttttttgttccgctagctgcttacaccctgtggcaacttatgtatttcctcatagttaatgtcctgcgtcgacagaggttgttaagggaccctgaagtcatgacatcctacagggagctctcgaagaaagcacagaaagcgaacaacatctggtggaggctgagcggactgctgggtgaccggaaccggcaggtcatgtacatactgctccaggcgctgttcacagtggcaacaatggcactgaccgtacctatattcctgtcctaccggatgcacgtggtgttcctgatactcaaggtgtgcgcgtcgacatggaacggtggcagcttcatcttggaggtgatgcctcggcaagtagtgcagaagcagctgaagaaactggacatgaagcccatggaacaggggagctcgacacaaggtgcgccaggtggtgatggtggcacattgggtaaccaccaccagcacacatccgaggagcatatccaggagtgaggaaattgaagctggatgtaagattagattttgatgttcactgacacaacctttgttgtcatcgagtgcgctttgtgttggagtttttctttagttcttcccagtttgtgagttgtgacatctagtcatctataggtttataggctggacgatatggggtgagagattgtgcgtgcccatcttttgtcgggcttgggcaaagatatgtcgagatgtttactttctctgtagaatttcgtgaagctgttgcattgttcgtttgaagatggcgacgatgttcagatgatgcttcatgttgaaggacatatctttatttgcttc

SEQ ID NO: 3993 - DNA, 726 bp, Zea mays
  Clone ID: 700346030_FLI
aagattaaacacatcatcataccatgaaaataaaggggtttcataggataatacgacaataatcaacacaacacacacttaatgcaacttcacttatctatatagaaaatgaaactgcaaagcagtcatgactcataagaaagtacatgtgaagcattatcacggctaagcattatcacaactacctagcttcatgtatcccttaataagggaaactgcgagtgcaaactcattccacattccattccagatcagaagtagccagaatatgcaaggcatccatgtaagcagacaacacttctgaattcagcacaaccatttcaaaggatatgctcccaagagttgtcacacaccttagaaataaggtggcacgttgggatacataggaggagccctgccacctggcccaggaggagacattccaccttgagggtcgtggcctcggaaaccagaacctggaagagggtagtttcctccttcaccaaatgcgcctgcaggcagcccacctgctccctgttgcatgcggtacatggagcctccacccattccaaggccaccatatgcccccatcccagcagcaccaaactgagatgatcccccaaatgagccaccacccaatcccccaggcccaaatccaccagcaccagccaacccagtgggcacctggcctcccaccgaccctaacccacctgcgcctcctccacccatggaagatggcatgttagc

SEQ ID NO: 3994 - DNA, 1339 bp, Zea mays
  Clone ID: 700346046_FLI
ggctagctatcaggagagatccatcgctcaggaacaggaagaagtgaggcgacagctctgcaggatggcatcggagaaggtggagacgatcgtggcagggaactacatggagatggagcacgagcccggcggcggcggagaccatgaccagcaacccagcggcggcgcggcgtcgtccacttcatccagctccaggggcggcggcaagaagaaggccctgtcgagcctgttctggcacggcgggtcggtgtacgacgcgtggttcagctgcgcgtcgaaccaggtggcgcaggtgctgctgacgctgccctactccttctcgcagctgggcatggcatccggggtggtgttccagctcttctacggcctcatgggcagctggaccgcctacctcatcagcatcctctacgtcgagtaccgcaccaggaaggagcgcgagaaggtcgacttcaggaaccatgtcatccagtggtttgaggttctggatgggctactggggaagcactggaggaacgtcggcctcttcttcaactgcactttcctcctcttcggctccgtcatccagctcatcgcatgtgcaagcaacatctactacatcaacgacaagtatgacaagcggacgtggacgtacatcttcggcgcctgctgcgccaccaccgtgttcatcccctccttccacaactaccggatctggtccttcctcggcctcctcatgaccacctacaccgcatggtacctcaccattgccgccatcgcacacggtcaggtggaaggtgtgacgcactcgggcccaagcaagatggtgctctacttcaccggtgccaccaacatcctctacacctttggaggccatgctgtcactgtggagatcatgcacgcgatgtggaaaccgcacaagttcaagctcatctacctggtggcgacgctgtacgtgctgacgctgacgctgccgtccgcctccgccgtctactgggccttcggcgacatgctcctggaccactccaacgccttcgccctcctcccgcgctccggcttccgcgacgccgcagtcatcttcatgctcatccaccagttcatcacgttcgggttcgcgtgcacgccactctacttcgtgtgggagaagctgatcggcgtgcacgagacggggagcgtggccctgcgcgccgccgcgcggctgcccatcgtggcgcccatctggttcctggccgtcgtcttcccgtttttcggccccatcaactccaccgtgggctcgctgctggtcagcttcaccgtctacatcatcccggcgctggcgcacatggccaccttcttgccgccggccgccagggagaacgccgtg

SEQ ID NO: 3995 - DNA, 2040 bp, Zea mays
  Clone ID: 700346056_FLI
caataagggtctcagtggtagtatctcaccgtccatcgggaagattagctcacttaaggtgctaaatcttgctaacaataacatcactggtactgtgcctgaggaggttgccgcgttgccttcgctgacagaggttgatttgtcaaacaacaatctatatgggaaacttcctacatttgcttccaagagtgcagtggtgaaaactgctggtaaccctaacataggcaaggatgctcctgcaccaacagcaggatcaggtggtagcaacgacagtctatcggggggaggcagcagcggaagcattggtaacaatgggggttcctctccatcttctgttggagtcattgtaggctcagtggctggtacagtcgttggactaggccttgttgctgcattgggattctattgttacaagaggaaacagaagcctttcggaagggtgcagagtccacatgccatggttatccatccgcgacactcaggttcagatgacatggttaaaatcacagttgcagggggaaatgctaacgatggtgctcgcgcaagcgagacatatagccaagcgagcaatggtccacgcgacatccatgttgttgaaagtggaaatatggtcatttcaatccaagttctccgcaatgtgaccaacaacttcagtgaggagaacatccttggtcgaggagggtttggcactgtttacaagggcgagcttcatgacggcacgaaaattgctgtaaagcggatggaggctggtgttatgggtaacaaggggctaaatgagtttaaatcagagattgctgttttgaccaaggtccgacaccgcaatcttgtttcactgctgggctactgccttgatggcaatgagaggattctagtgtatgagtacatgccacagggggcactgagccaacacctgtttgagtggtctgagaaaaatttgcgaccattggaatggaaaaaacgacttagcattgcacttgatgttgcaagaggcgtcgagtaccttcacagccttgcccagcagacctttatccacagagacttgaagccatcaaacatacttcttggtgatgacatgaaggccaaggtggcggactttggattggtccggcttgcaccagctgatgggaagtgtgtctccgtagagacaagacttgctggcacttttgggtaccttgcaccagagtatgcagtcactggacgagtgaccacaaaagctgatgtcttcagctttggtgtcatcttgatggaactgattacaggacgcaaggcacttgatgagactcagcccgaggatagcatgcatttagttacatggttccggaggacgcagctcaacaaggaaacattccgcaaagcaatcgaccctgtcattgacctcgacgaggaaacctacgctagtgttagtaccgtctcagagcttgctggccactgctgcgctagggaagcgcaccagaggcctgacatgggccatgctgtcaatgtgctctctaccctttcggaagtttggaaaccagccgatccggactcggatgacagctacggtatcgaccttaacatgtccctgcctcaggctctgaagagatggcaggcgttcgaggacagcagccactttgacggtgcgacctcgtcgtttgttgcgagcctggataacactcagaccagcatccctacgaggcctcctgggttcgcggactcgttcacctctgccgacggaagataaagacatttagcgctgctagtaagggtgtgcaaaaaccttatgtttccgttgaaatggaagctcgggcgatccttgttcattcttttagtctcttcacccccgccaccaatctttccatgtctctttattcgtctctgtactgccgtgtagctgctctttggtcgtgtatgctgtgatcttgtcccgaaaattgcctggaagttcgaagactttgctaactggtctatgtcgtttgctaagattaaagtagaagaatgctagagctgtatggttgtatcgggtactgacaatttgcaaaggaaggtgaccctgtgttcgtc

SEQ ID NO: 3996 - DNA, 619 bp, Zea mays
  Clone ID: 700346058_FLI
cttgattgttccaggtattagcagtcgaccggttcctcggagcacgatgaagtttgttgctgcctacctgcttgctgtcctcgctgggaacgccagcccctccgctgacgatttgactgccattctggagtcagttggctgtgaagttgacaatgaaaagatggaactcctgctgtcccaactgagcggtaaggacatcaccgagctcattgccgcgggcagggagaagtttgcttcagtcccatgtggtggcggcggtgtcgctgttgcggcagctgcacctgctgctggcggagctgctcctgcagctgaggcaaagaaagaagagaaggtggaagagaaggaagaaagcgatgatgatatgggcttcagcctcttcgactaggctgcacagtcatcacagtattgttttgggcagtgaaaccagaggaaaaccagagtcatgtttagattttaagcttgttttatgttggaaagtactggaaagactgctacttgtctttatatttggtaattcagccgtagattgctatgctggttgggatttactcgtgaaccagagtttttctgtcttatatatcctgaattggttatcccaaagtttcttggctttttaact

SEQ ID NO: 3997 - DNA, 131 bp, Zea mays
  Clone ID: 700346081_FLI
gtggcaccagcaaactatgttgcccttcccaaggactgctcagacatttctaccctttgaagtgtaatcacctactctgaccatcgattgacttctcacttgatcgacctacatactatatagtcttgact

SEQ ID NO: 3998 - DNA, 1458 bp, Zea mays
  Clone ID: 700346134_FLI
ctctctctctctcccctccctgtctccctccccctctcggagtctcggtcgtggcgacgacgactgggcaggccgacgagcacccaccaggaaaagtattgctcctagcctcctacagctagttctttttatgattaagctccaatgaaggattctcaggatattcagagcacaacagagttgcagtcatcagcacagggtactaatgaagtgcaaagtcagcaaccaaacccgatgaccactgatgctcctgcaggaaattcgggttccttgtctatagctagtaatgacagtaagaaggtgtctcgcgaagacattgaacttgttcagaatttaatagagcgttgtcttcagctatacatgaacaaaggagaagttgttagaactctttctactcgtgctagaatagaacctggcttcactactttagtatggcagaaactcgaagaagagaactccgagttctttagggcttactatatccggttgaaattgaaacggcaaatcatcttgttcaatcatttattgcaacaccagtacaatttgatgaaatatccagcacctccaaatgttccattggctccaatacaaaatggaattcatcatatgccagtgcagttagcaatttaccaatggggtatccagtacttccgcagcctatcatgccggctcccggccagcctcacatggacccaatggcctgtggtctgtccaatggtcatgtggtcaatggaatacctgcaccaggtggttatcatccgatgcgcatgaactctggaaatgacatggttgtggacaacggagcgcccgaagcaccacatgctggtgctaccggcagcgtcatgtcatccgagatggccgtgagcccctcatcagcggcttcaagcaaccatgctccatttatgccgccggagatcccaggcatggccatggacgtgccaggcctagactcgacattcggatctgacgtagggaatggacctctgcaattaggaccagatggctcgtcgagagactccattagatccttggggcagctctggaacttcagcctctctgatctaacggcggatttgacgagtttgggagatttggacgtgctggagaactacaccggcacccctttcctgccttcggactcggacattctgctcgactccccggaccaagatgacatagtcgaatattttgctgacgccatcaacgggtctcagtcagacgaggagaggtcatagcgaagctagctcaaggtttttcaggcagggcgcagggatgtgtcttctcatggcctgctgcgagagatgctgcggctaatgtaatgtaactgtgccttgggcccgcgcccctgtgtgctgcggcaagtgtagctggtttaattagactttttttttaatttgtagctggttaattagaatcctaattctttggaataaaaaagtagtagctggagttatcggt

SEQ ID NO: 3999 - DNA, 469 bp, Zea mays
  Clone ID: 700346164_FLI
cttcccaatctccaaagctatccttgtttgtcaccccattcttggctacaatagcagttcctcttgaagaaaaaacttcaacggtgtattctcgatacttttctatcatgaaatgatttaaatttgtttgcctacttgatcccagtgtattctgatgtcatctagagagaaagatcatggataatattcgataatacaagtttcctttgcagcgctacatggccctcgtggatctcgaggtaactgatcattaagtttcattgttatgcatagtatattagtatagctgatataaggagttcatttgggctatacttttctctggtaccatcttatcataggaagggaacgagaggcttttctacaagctgctcattgacaacattgaggagccgttggtgaggcctgccaaaagtatggatccatattgagtcgccctcagtgtctttatatcagtttgaaggacaag

SEQ ID NO: 4000 - DNA, 1336 bp, Zea mays
  Clone ID: 700346218_FLI
cacaaattcctccatgtgctggtcattctttgatttcttggggtaacaaatttttatctattgctgggcatacaaaagatccatctgaaggcattacagtgaaggaatttgatccgcatacttgtacctggtcaattgccaagacttatgggaaaccaccggtgtctcgtggaggtcaaacagtgactcttgttggaacgacactagttttgtttggtggtgaagatgcaaaacggtgtctcttgaatgacttgcacatccttgatcttgaaaccatgacatgggatgatgtggatgcaataggcaaccctccttctccaaggtcagatcatgctgctgcttgccatgctgaccgctatcttttaatttttggtggggggtctcatgcaacatgtttcaatgacctacatgtccttgatttgcagacgatggaatggtcaagacccaaacaacaaggcctgactccaagcccaagagctggacatgcaggtgcaactgtcggtgagaactggtacatagttgggggtggcaataataaaagtggtgtttctgaaacactagtgctcaatatgtcaactctgacatggtcagttgttagcactgtggaaggacgtgttcctcttgccagtgagggcatgactttagtgcatagcaattacaatggttatgattatctcgtctcttttggaggatacaatggacgatacagcaacgaggtttacactcttaaactcagcctcaaatcagattcacagccaattgtagaagaagaaactgtctcagatactatatctagggtcagagaacctgagaccgaaatttctcaagatgggaggatacgcgagattgccatggacagtgccgattcagacctgaaatgatgaagcaagtgaacagcttgtagcagatcttaaagctcagaaagaggaactagaagcaacaattaacagggaacagctgcaaactgtgcaacttaaagaagacattgctcaagcagagaccagaaatgcagagctgacaaaggaacttcaagctgtccgtggccaacttgcttctgagcaatcaagatgtttcaaacttgaggttgacgttgcggaacttcgacaaaagcttcagagtatggacgccctggaaaaggaggtcgaactgcttcggcgacagaaagctgcttcggagcaagcggcgctggacgcaaagcagaggcaaggttcgggtggtatgtggggttggctcgctggaagtccgccaccatcacagtagttcgtacaggccgtggttcatatattttacttgtaacattacatatcatttgacatttgtctacattttttttgtc

SEQ ID NO: 4001 - DNA, 870 bp, Zea mays
  Clone ID: 700346223_FLI
ggaaaaccatcagagtacaacacctacaatgacatagaggctgtttatgattgcttgagaacggagtatgggatagaagaagaggatctaatcctgtatgggcaatccgttggaagtggaccaacgttgcatctagcctcacgtctcgagaagttaagaggggttgtcctccacagcggcatactctctggcatacgggttctgtatccagtgaaagtgacgctttggttcgacatcttcaagaacatcgacaaaataaagcaggtggactgccctgtgttagtcatacatggcacagccgacgacatcgtggacttggctcacggcaagcggctgtgggagctagccaaggacaagtatgagccgctgtggatcaaaggcggtgggcactgcaacctggagacgtacccggagtacatcaggcacatgcgcaagttcataagcgccatggagaagctggccaaggacagcagcaaggcggcccaggcgccgccgccgtcgagcatggccgccgaagaaagacacaccaagtgcttgagattcgggaagagatgagatgccggcgacctggacctgggaaggaaacgcggtgcagcagcaaccctagttcgtgtatcatccgtgtgagattgagttcagacttcagagtagagagtagacagagtggagtgacagacagacctgtggctgctgtagtatgctgtacgtgctggagttcaggactagagagatgtctttgttttcctaggggcgccacggattagcctgttcgcagctgaattttttcttgttttttttttctgttttcgctatctgtattgtagtcactgtgcaaaaaaaatcgttttgattgattggctgcaaaaagtg

SEQ ID NO: 4002 - DNA, 1039 bp, Zea mays
  Clone ID: 700346227_FLI
gagacatccagttgatgccatttgtggattactatagcctgattctttggaagaccatagcgatctgcatctatgggacaaatgtcctgtcagccaactatgtgatgaaaactgatgacgatgcttttgttcgagtagatgaagtactttcttcccttgaccgaactaatgtcaaccatggactgctgtatggtcgtgtcaattctgattcccagccacatcgagatccatatagcaagtggtacataacccctgaggaatggcctgaggagagttatcctccctgggcgcatggaccaggatatattgtttcaaaggacatagctaaagaagtttacaggaaacacaagagtggggagttaaagatgttcaagctggaggatgtcgcaatgggaatatggatcaatgagatgaagaaggatggcttggatgtcaagtatgagaatgatgggaggattttggttgaaggatgcgaggatggctatgtgattgctcattaccaagaaccaagggatatgatgtgcctctgggatcagtttcagaaaacaaaacgaggaacatgttgcaaagaataacagaaatcatgcgaatggtgttttatgttacggtggctgctgttggccgttgcttgaatagacaccttcacgctaaaacgttcttgatgtatacagccctgcctaagaggattctaaaagagctggaactggaaggcaagcaaacaattttttggatatcttcaagtttgtttcgtctgcagtttgaagagtttcaagtcaaactacggcatgggatatgcattgtacacagaatgtagggttacatttgtttttggcataggtaggagggtactgctttgcttactgtgcggcgtataaaatagtatcttgctagaatgtaggatacagcgacggcagtttacgttaggatagactgagacagtcttaccagttaccattttttttgaaaggaatgcattttgcatcttgtgtaaagctgtttggtgtccattctcttgtataatcgattcaatgttcatccc

SEQ ID NO: 4003 - DNA, 1977 bp, Zea mays
  Clone ID: 700346230_FLI
gaggaatttggtgcagcttgaaaatgcttactactccatgaggtcctctgtggacacctgtgaaactaatgtaatcaaacgtccagataacgaggctttgagggtccgtgaaaatttccatcagcgtcacagtgattctgatgcaaagggagagaaaacagaccgtcttggatgcttttttgatggtttatgcaaatatgcccggcacaataggtttgaagtacgaggaattttgaagaatgcagatgtacttagctctccaaatgtcatctgttcattgagttttgatagggatgaagaatattttgctgctgctggagtttcaaagaaaataaaaatatttgaatttgatgcactcttaaatgatcgtgttgatattcattacccactggtagaaatgcctagcaagtccaagctgagctgtgtctgttggaacagctatataaagaactacctggcatcaacagactatgatggtactgttcagctatgggatgctggctctggtcaaggattcacacagtttacagagcaccgcaaaagggcttggtctgtgagtttttcacaagtcgaccctactaagttggcaagtggcagtgatgattgttgcgtgaaagtatggagtattaatcagaaaaactctattgatacaatccgaaacgtggccaatgtatgctgtgtacaattctctccatactcctcccgcatgctagcttttggttcagctgattacaaaatatactgttatgatctgaggaacacaaggataccttggtgtactatttcgggacatggaaaggctgtcagttatgtaaggttcttggatccagaaacacttatctctgcatcaaccgacaacacattgaagatatgggatcttaaccagactaattgcagtggattatctgctgattcttgcagcctgactctgaatggtcatagcaacgagaagaattttgtagggctatctgttcatgatggatacataacttgtggctctgaaaccaatgaagtgttttcttactacaaagatttccccatgccaataacttctcataggtttggttccattgacccgataactggacaagtgacaaatgaagacaaccagcagtttgtgtcgagtgtttgctggagagggaagtcaaacatggtagtggctgccaactccagtggcagcatcaaagtgcttgagcttgtgtgaatgatccaacgagagtgtcatattggagagaagaaggttctagggttgccatgcgggcctgtgatgctctcgtgccctcggtgatgctccaatggccctgcttatccggtgtctgcatcctcaatggaagcactaagcgaactgggtacctcttctaggtctgcatttcactgttttgccagggcactaaaagatgcgactgctctgtgcaagcaacctacagcaccgatcattggtcattattggaagctttgcttgaaactcccaagcgaaccaaagaaaaataaaataaaatcaagagtatgttgtgtttggaaatctctggcattttggcacggtaccttattcatcatcgtaaggagggccccaggtctgtacagaattagggggccatggggctgatgaaatagaacatgtgatgcatgcaaacttcttttgggctagagaggctgacggacgccgtggcgccttactgaatcagttgggaatttaactcagttttgatgtgcgccggacttgccatgactgttaagagcgaacgatggagagaaagaaatgatcctgtagctcgaagaagttaatcgtgccgtgtgaatgtttcaaggagaatgtgtgtagtaattttctttctacctcccttcattattgtacatatgtttagggctgcctaatggaaggccttgtaactagagtagagatgctcaaaagactcggtcatgagttcagtataatgaatgatcttctcaaaagattaattactggcagatttatac

SEQ ID NO: 4004 - DNA, 1505 bp, Zea mays
  Clone ID: 700346241_FLI
gcatccacagctgttctatgaggcgaagctgtacaataccctccaaggaggaagtggcattgctaacgtcaagtggtgcggtgtggatggagaagagaatgttctcgtcattgatttgctgggtccgagtttggaggacctgttttgttattgtggccggaaattcacgctgaagactgtcctgatgttggctgaccagatgattacaagaatagagttcatgcattccaaagggtacttacacagagacatcaaacctgacaactttctgatgggtcttggtcggaaagcaaaccaggtatatataattgattttggccttgcaaaaagataccgtgattccactacgaatcgccatattccttacagagaaaataagagcttgactggtacagcgcgctatgcaagttgcaacacccaccttggaatagaacaaagccgcagagatgatttggtatctctaggctatgtgcttttgtattttctccgaggaagccttccttggcagggactaaaagccgcaacaaaggcacagaagtatgacaagatatgtgagaaaaagatatcgactcctatcgaggtcttatgcaaatcctgtccggtccagttttcatcttacttccattattgccattcattggcatttgatcagcgacctgactatgcatttgtgaagcgacttttccgtgacttgtttatcagccaagattatgagtttgattatgtcttcgactggacagttttgaaatacaaacaaggccacaaacaaaagcaaagtcctggggcacctattgctcgacctattcaagcacatggaccgaaacaagcaggtgtaaatggtgttattaatcataacgaagcccaggagcatgtagagacaagtcgtccaacagggcaagctgcatggtcgcaagacaaacaggcaaccaacaatgatcggaatcctgatgtgcggcataccgtgaaccttagacaagacatggctgctggaaaagcacagctgacaacatctgtggctcttcctagttcccagtggaaaaattatagcgattcaagacataaaggacaatttgatgctgttcaccacaatcagggtattgtaaacataactagctcatctaacagttggcttcctacattccagcacaatgccccaggaaaatgacagatcatatctggtggagcaaagaggaagtgctttgagagttagaggaggcccctgttcatctgagttggttcagagttaagcattgcacaatctgtagacttgatgtctcatgtattgttactgaggtggctcctgaagcactggtgcatttgatgatactattagctgataatatggaaggtttgctcgcggttgtgatgactcttgaatgcttgggcagtttgttggacccctgcttaaatgcttctttgtagtagttctggatgccttgtaaattgcttacatgttaatatatgtatgggttgaacattgcaaataagatgatctgagctttgcc

SEQ ID NO: 4005 - DNA, 2122 bp, Zea mays
  Clone ID: 700346245_FLI
gagcaatggcttgtcatactcaccaccaaagctcacaactcctccacctactgataaacctgctatcagctcagctgtttccacttccatatttgccgtatccagtagcagtccagctatttcatcgtctcctgcatttacgggatttagtttttcttccagtgctccggttggattgtcattggtaacatcagctaaatctgatggcacaactgctgaaaataaggcagctagcaccttatcatttggtatagggggtacaaaagctgaagtgaaatctgttgcaccagatgcaagcagcaaggcatcatcggaactttttatttcacctgtgtcatcaagtattgcaagcttttcaagttcccccgccacatctacgcctactttcaccgcagttgcaccttcaagtgatgctgctggaatatctgtggctgcaccatctagtacttccactgcaccaggtttacagtctgcttcaaccccttcatttacatttccgagctctggaaacaacctttttgggttcagctccccagcccaatctactggcctcagtacatcgtcacttgctggtagtacctctcaaccaccagctgctagcacactctttggtagtaagccgacgcagtcagacggaacaatacaacaaacatcccagagttcaaaaccacaatctggctcaccattcccggtcatgactcctggagttggagcatcctcgtctggacctgggacgctatcttttggacttggagcttcctcaactggttcaggcactgcatcttttggtgtcggagcttcatcttccgcacctggaactttatcaacttttggtgcagcagctcactcttctggacctggagttttctcttttggggcaggaacttcctcatcaggacctagcactgcctcttttggtgcagcaacttccacatcagggactggatttggcaattcaccatttggaactggagctacttttgcgaatccatttagctctagttcaagcactgggttcacattttcttcacctagctcttctgctggtgcatcaacagcggccagtacgagtgtatttgccagcacctctacagcttcttcagcctcagcttttagcaacccttttggctcaagttcatccccacccagcacatttacatttgggcaatcaggttcttcaggcaacacttttgcatttggagcgcagccagctccaacgttcccatctcaaccatcacttttctcatttagttcagccaacactagcatgaattcgtctccacagcctgcatttggaatgataaataccaacacagccttcagcatggcttcccccggaaatgatcagatgaacgaagacagcatggcagatgacactagtcaggcagcacctgcgccagcgccagtatttggttcatcatttggacagcagaacaactcatctgctgccccggtatttggtgctcccgcggtccagccaggtggtgtttttcagttcgggggccaacaaggttcagcacagcagaacccgtccttcccagctgttggcagtctagagtttcagggtgggaacttttcgttgggcagcgggggtggtggcggtgacaagtcgaaccgaagagtgatcaaggtcaaaaggacaccaaagaagagataagggtgcgccctctgttggaatcttcctttgatggtgtcatttgtgattggatcgcactgcttgggaacgaagtcaagtacgacgaggttttatggccacgcagatttccctgcagcagggcgatagcgctatatatctcatggctggcttgtaaacgcatccaccaaggtcagtgtagtctcctgtgcactcaattcatttcctcatcggggccggcggcctgcatgttgtgtaatatgcctgtgctcatggggtgtaaaatagaacaaaaaagtgttgtaatttttgttttcttgcctccaaatgccgacttgatttcttatctgtggtttggctacggtatatttgtatcggagtgtaacgcactgttgtatttttgtttttgggtttattacattcaacaaggtcagaactgtatcgtagaatacctgtccatacttaatcctgcctacgcattgattgttt

SEQ ID NO: 4006 - DNA, 964 bp, Zea mays
  Clone ID: 700346262_FLI
agcagtagcaagagggatagagcaaggccacacacacacacacaccactaggctaggttagccttttaatcgtcgtcgagaagcaagaagggcgcgcacgcaagcaggcaagcaagaagagagccgatcgaccgagagctagcacgcgatggcgaggtcttccaagatgatggtggcggcagctctgctggccttggccctggccgtgtcgaccgccgaggcgaggaacatcaagaccacgacgacggagaagaaggacgacgcggtggtgcagccgcagaccttcccgcccttcgaccgcctcggcggcggcgcgtccccggcgttcggcggcctccccggcggcagcattcctggcagcagcattcccgggttcagcatgcccggcagcggcagcagcctacccgggttcagcttgcccggcagcggcagcatgcccctcttcggcggcggctccccgggcttcagcggcttcggcggcatgcccgggtcgcccaccgccggctccgtccccgagcacgccaacaagccctgaacgccaacaagcgtggtagtagagtggtgctactgttactgtagtacgtcgtcgtcttcatgcatgcgtggttcgtggtttcccctagctccatacgagcagtagttgggccttgcacgtaccgtacgtctagctagctatatatatatagcttgtgttctactgccttttagtttaattacctgcctgcattggagagttggatctgtttcatttggtggtgtttgctttactattaggtcagtatctgtttgtggagacttggtgtttaatttatttagccgtttgtgactggttgtagctagcggtggtgcggtggtgatgttcttgaggcatgaataatgctacatgcatgtgatgtatccatgttttgtgtgtggtaaacctgttgtttgtataagctgtatgcatgggtctttaatttgtttt

SEQ ID NO: 4007 - DNA, 1552 bp, Zea mays
  Clone ID: 700346311_FLI
cgagctcgtccccgtcttgtttcgtctcctctcgtctcgtcacgcgagatatttctacgggacgggacccgcgttgcttccccgcctcgccgtcccgcgcgcgccagccgggcccggggaagccatgaactgcctccagaacctgctcaaggagcctccaatcgtggggtccaggtcgatgaggcggccctctccgctgaatctggcgatggtccgcggcggcagtcgccgatcaaacaccgtcaaaactttgcaggcccctggggcgtccacttccggtgccgagagcagcgccgtggagatgggcaccgagaagtccgaagtgtacagcactaacatgacgcaggctatgggagcagcgttgacatatagacatgaactcgggatgaactacaatttcatacgcccagacttgattgtaggatcctgcttacagagtccacttgatgttgataagcttcggaagattggtgtcaaaattgtattctgcttgcagcaagattcagatcttgaatattttggagtcgacatccgtgccattcaagattattctctacaattcaaagatattgtgcactgccgtgcggaaattagggattttgatgcttttgatttgcgattgaggcttcctgctgtggttagcaaattgcacaaacttatcaactgtaatggtggtgtaacatatatacattgtactgctggacttggaagagctcctgctgttgcattggcttatatgttctggattcttgggtacagtctcaatgaaggacatcggctgctacagagtaaaagggcttgctttccgaagttggaagccattaagttggcaactgctgacattctgacaggattatccaaaaacacaatcactttgaagtgggaagctgatggttcttcctctgttgaaatttctgggctcgacattggctggggtcagagaattcctttgacatatgatgaggagaaaggagcttggtttcttgagaaagagttgcctgaaggacggtatgaatacaaatacgtagtggatggcaaatggctatgcaacgagcatgagctgataacgaaaccgaatgctgacggccacgtgaacaactatgtccaggtctccagagacggcacgagcgatgaagagaaggagctaagggagcggttgactggtccggaccctgatctcacggaccaggagaggctgatgatcagagagtacttggaacagtacgcggatgccgccgagcgctaggaggtccaaagaatgatgatgactgacgaagagacgacggtccgaagccgacctgaccgcaccttcctttacggcgaggtcgggctttcccctctcttgtcaatcaaatactcgtagcttaaccgtgcaaaagggcacgttctgctcgcatacttggagaatgatgatgaaggagcaaaatgtacgtagctgtgcagaaataacaaaggtagtagcgtaaaactactgtactgaccataatgttactactatatgctccttcctggctatgaataataataataaataaaagagtaaataaacctc

SEQ ID NO: 4008 - DNA, 1197 bp, Zea mays
  Clone ID: 700346329_FLI
gcgaagaagaccgcgcaggaggaggcgctgctctccgaggagcgtcgcatcgacgagctcgacctcccacggcacgaggtggtgcggcgcctccgcgtgctgcgcgagcccgtcacgctgttcggggaggacgacgacgcccgcctcgcgcgcttcaagctcgtgctcaagtccggcgtcatcgacgacattgacgacatcgacatgaccgagggacagaccaacgacttcctccgcgacatgatcgagatgcgcaagcggcagaagtccgggagggacacctacgccaagggcaagagcaagcgtgtaggtgggggtgatggtggcgacgggggtgctgctggagacagtgcagatgatggggatgccaaggggagcggcgatgatgctgacacagacaaggactccaagaggatgaggaccaagtttgaggagctttgcaatgaagacaagattttggtgttctttaagaagctgcttaatgagtggaaccaggaattggatgagatgactgagctagagaagcggacagcaaaggggaagtccatggttgcaacattcaagcagtgtgcacggtatctcagtccgctgtttgagttctgcagaaagaaggttcttcctgatgacatccgtcgagcattgcttgttattgtcaagtgttgcatgaagcgagattatttagcagcaatggaccaatatatcaagctggcaatcgggaatgcaccatggcccattggagttacaatggttggcatccacgagcgttctgcccgagaaaagatctacacaaacagcgtcgcccacatcatgaatgacgagaccactcgcaagtatcttcagtcaatcaagaggctcatgacgctttgccagcggcgttaccctgcactgccctcaaaatcagtggagttcaacagcctggcaaatgggagtgacctgcaggcgcttctatcggaagagaatggttcaggtaaagcttccgaggaaaggctccggttgatgccagcatcaaaagagtgatgccttcgcagactagattggattacaagtagagcttgagatacttgtgtaatatatacaatcaatcctgcctgtttttttttcttttctgtttgtgctgaagagaaaagcaacagagttatgtatgctaattaaatcgctttaccgcgacatctaatcgggcaaagtttttattaatat

SEQ ID NO: 4009 - DNA, 1026 bp, Zea mays
  Clone ID: 700346343_FLI
gatcgctccgtgtccgaggagagcggcggcggcgcaaggagtcttcctgtccgacgccggcaacgtcgacaccgctggcaaacttctctccgattgtccctgctccagtaagagtaggcgaggatgagcctcccccatcttgggtgttggtgcctgacccattttctcaagttttgctatggatatgagcaatagagatcaccttaggaggagggaggaggatgatgatgacctcttccttttcattctcccttccctacatctcttgggctatcttggacgtagtaaaaagaaattgaggcatacatcagcgctgaccggggaggaaaaggttcgagagctacttgaaggccatatcaagaactacagggtatcatttagaatggaaccttacattttcaaatccttggcgaactatcttagaatggaaggattggttaaagatacaagaatcaaagttgaggaaaaacttggcttcttcctatacatgattagccacaatgcgacatttgaagatctccaagtcttttttggtcatagcaatgatacatttcaccgtgtcatcaaacatttcttcgacattgttatccctggccttagcatgcggttcctaaagcctccttccaatcaagttcatcctaaaattcatggagacaaccgattttatccatacttcaagaattgcataggttcaatagatggaacccatgttccagtatcaatgtcacccgatcaagccgcaccattcaggaataggttgggagtagttgtacttggttccctgcagctgacaggaaatattggtcatatggagacagttctgcacagcgttctgagtgccgatatgagctatatatatgttgcatttctccatgtttgggctcagcatgtaatagaactgaaggaaggttgttgtgagacttgtatgacatgcttaaatttctggataaaatctagcatataataagtctattacatgcttaaatttctagagaaatgacatgttctatgtttaaatttctagag

SEQ ID NO: 4010 - DNA, 227 bp, Zea mays
  Clone ID: 700346349_FLI
attcagtttgcttttttacacgaaaagcaaactgaatctaaaagggaagtaaagaagcgtaccactattctgcacagggttttgatagcagagaccgtctgtctccttttaagttttaacagcaaattacaaggattggaggtagagctaggaagtgttaactaactccattccccatctcatcggttttggagctcttgtgctgccgtaagttgaccatccatgtt

SEQ ID NO: 4011 - DNA, 655 bp, Zea mays
  Clone ID: 700346357_FLI
aagaacactcggggttaggagatctgacccaatggccgcgaccaaggtgtgcaacgttaggttcgagggcaacgtgatcaccaccaccgtgacggcctccggcgcggccgtggagagctggctcgacgagatcctctccgtccaccgccgccgcctgcacaagctcgtcgtcgggctggacgtcgagtggcgccccagcttcagccgcgcctacagcaaaacagccatcgtccagctctgcgtcgggcgccgctgcctcatcttccagcttctccacgccgactacgtccccaacacgctggatgagttcctcagcgaccccgactacacattcgtcggcgtgggcgtggctgcggacgtcgagcggctcgagaacgactacgacctggaggtggcgaacgcggaggacctggccgaactcgcggccaaggagatggggcgcccggacctccgcaacgcgggcctgcagggcatcgcgagagccgtcatggacgcccacgtcgagaagccgcagtgggtgaggacgggcccctgggacgcgtcatccctctccgacgagcagatcgagtacgccaccatcgacgcttttgtctctttcgaggttggccggatgctgctcagcggctactattgatcgatcgagccgttaatgcag

SEQ ID NO: 4012 - DNA, 1022 bp, Zea mays
  Clone ID: 700346374_FLI
gacagaactgggggctcatttgtcaagtgccgagctgtaaattgtttggtattctttcatgcttggtgtgcacatcagaggggtttgctgcaaagtgagcctgaaggcgagcacaatgaaaatattggcttttatgggcgatgcgtgtctcacgccattgttttttctagtcacgttaatcctaagaaagaatactttagaaacaacaattggacatgtgcacgtacagagggttttaaaggccgaaagggagaaggcttttctgatagtagccataaaaaatatgaagagtacagtggcgagttcggtgtttcccaagaacagataaatgcttggttacgcataaatggttcaaagccctgcggacgaggacagaaggagtacatccattacaagcagttaaaagggtggaagcatttggttgtttacaaatctggcatacatggacttggtctctacacatcagtctttattccacgcggctctatggttgtagaatatgtgggtgaaattgttgggcaacgggttgctgacagaagagagatcgaataccagtccgggaaacggcaacaatataagagtgcatgttatttctttaagattgacagggagcatattattgatgccacccgcaaaggtgggattgcaagattcgtcaatcattcatgccagccaaactgcgttgcgaaaataatctcagtcaggaatgagaagaaggtaatgttctttgcagaacggcacataaacccaggggaggaaattacgtacgattaccacttcaaccgggaagatgaaggccagaggatcctttgcttttgtagatcaagatactgcaggcggtacctcaattagtttccggtgggcgtaacatgtctatatataacttatatatctatatgtatatcttatatatttacaaattacaattgcgattcatgcctgctgtatatgtaggaacttgcatctagaactgcctgtttatcttttgtgaagtcaaatgagttatcagctgttcatgtgac

SEQ ID NO: 4013 - DNA, 878 bp, Zea mays
  Clone ID: 700346392_FLI
tcctcttcttccgtcgctctcgctctcggtctcggactacggttgagcgaagtcgtcactgtaatctactgatctgcaaatggcggaggcggaggcgacggtggggcgactgatgctgtactcgtactggcgcagctcgtgctcccaccgtgcccgcatcgctctcaatctcaaaggtgtggattacgagtacaaggcggtgaaccttctcaagggcgagcagtctgatccagaattcgtcaagcttaatcctatgaagttcgtccctgcgttggttgatggcagttctgtaataggtgactcttacgcgataacactgtatttggaggacaagtacccagagcctcctcttctacctcaagaccttcaaaagaaagctttgaatcaccagattgcaagcattgtagcttctggtattcaacctctccataacctcacagtgttgaggttcattgaccagaaggttggtgcaggggagagtgtgttgtggactcaacaacaaatcgagagaggtttcacagctattgagaacctgatacaactaaaaggatgcgccgggaagtatgcaacaggagatgaagtccaactggcagatgtattccttgcaccccagatctatgcagccattgaacgcactaaaattgacatgtcaaactaccccactcttgctaggctccactcggagtacatgtcacaccctgcgtttgaagcagcgctccctggcaagcaaccggacgccccttcatcctcctaggaactgcaccctagtgtgttgttcctctgaatatatatatatatatatgtatacttctgtaagaattaataattacagagtttcgtctgctatgtcgaaaaatgtcaaaagtttttgtgatttc

SEQ ID NO: 4014 - DNA, 2496 bp, Zea mays
  Clone ID: 700346396_FLI
ggagcagagagaagcgcaggagaggggaccgctgaccaccgagggagccgggcaagatgttcgacagtctgctcaactccaagttctacaacaaatgcaagcacgcgatcaagtgcacccggacccggctggatctgctgcggcggaagaagcaagcgatggtcaagttcctcaagaaggacgtcgctgacctcctcaccagcggccttgaatcgcacgccttcgcacggatggaagggctgatcattgagatgaaccaagcatcgtgctatgatacaatagaagagtactgcgaatatattgtgaagcagctcaaccacatgcagaaagagagtgaatgcccgcaagaagccttggaagctgtgtctactctaatatttgctgcagctagatttcctgatttgcctgaactgtgtgacctcagacatatattcacagagagatatgggagttctgtcgagccttttgttaattctgagtttgttcagaacctccagaataaatcatttactgatgaagagaagttgcgagtaatgaaacgtgttgctgaagaattctcagttccatttgatagcagggcactgcaatggaagataacttgtggctctcaaaataaacatggtcttccaaagaagagttcacttaaacaggagatggaacgagatggacacaaggttgataggcatgctgttcatgaaagaaaatcaaaagctatgcctgaaggctatgaacagaagcaggaaatgaacgtaaaacccaaagatatccatgtcgttcctgatggcattggccagttaggcgaaaaaaacagaaagaactactctgataaacctagtgagagaaggcacatggataatcctttgcctcctttggacatgaaagaaaagaatggtcagaaagacatgaagaaatctggcaaaaaggatagtgaccgtcggagggaactgatggatgcggaggtgttagacatcaatggcttgaaaaaacaggatgttggtacgatgaaaccttccggtggccccgatcgtagttggggacatgctgacctggggcttaaaactctgggcatagaaaaacaagaaattgatccaatttccaccttgaatggtaaagcagtgaacaagcctcctccttattctaagccctacagagcaccaatgggcgagaaggttgctgaagacaggcagcctgtgccagagaaggcaaccaatatgcgtcctccttatgttaagccaaatttcgaaaaacatgcaaatcaaggcgcaaatggccacaagcagagtggcaccgaagaaacaatccaccagaagcgtgaaccaatctatgaccctgtctccgtgagaagtaggattccaaggccacctgcacatgctgatgaatatgctggaatggaggaaaagatggcaaaccaagcacctgatggccgaagaagacactcaagcaagaggaatggtgcccatgacaatcatgaccagagaggtgcccatgtaccacccttagaaggcatggaggtcgatgacgatatcaacaacgcgaggccttttcaccgagttcctagcgagcaaagaaagcacagaagcaggcagaacggatcgacgagcggcagtgactacaattgggccagcgaaggccacgagtccgatggcgacgatgtgaacacatcgatcgatttcggcaacctgctgcctcgagcccccagttcgcacaggaaacacaggagccggagcgccgatcctcgcaaggcaggaggccgcggcgacgacgaggagaggatgatggacaagcttctgatgcactacagcaagaaagggctggacagggaggagcgcaaggagagagccaacaagtcccggaccccgttcccacaagacgaccagcgcggcgacggagccggagaactgtctagcaaaggaggaggagcgtctgcaccccgccctgaaagagccgcatccttgccttcagaatccgcaagccccaaggcaaaggcgaaggcgaagccccctgctcggtccatgtccatgcagccagagatgtcgagggggaacgtgcatccgagcatgccggatttcgatgaactcgctgcccgcatcagtgctctaaggaacgcgtgagctgtgccccaaaactgaactgattgcccttcagttcagcgacgcttctgttgtttcaggaacaaacctgtaccatggaatctgaaacctggtggtgcctgcgagtcacggggggataagagaacacttgaggagatgtaactggtctgttttcgcagcaattttttttgtgtgtcttggtggtataattgttctcgtgttgctctgagtgtgtcttggtggtagggttgttaagatgtggcaattcatagggataccatactaccataccgatagccagctacagcgatctggatgtggttgtttgttgtactcatagaacagatactgttggtgtgtaagatgtccattgatgctgctacgatgataaagaaattccttcttt

SEQ ID NO: 4015 - DNA, 1128 bp, Zea mays
  Clone ID: 700346418_FLI
ctagctagcatgtacgccgttccccaacctctggcgtagtcttgttcatcttcgatctcctccatctcccttcatcctctctctcgctgtttgaggagaactgcctgcccctgctccctcttccgctcctccccgcgccccgctcgccatccccagacttcatttcaggccgggatggacgactacgcccgggagatgatggagctcaagacgctcgtcacccgcaccctcgagaagaagggcgtcctcgccaagattagggctgagctaagagcaagcgtgtttgaagccattgaagaggaggatcgggtggagaatgatgatggagggaaccctgctttgcttggtagctgcaatgaccgagctaagcaactgcatgcttcaccttcaggtaggttactaactgcacttgtatgcgaatacttggagtgggcgcaactaagtcacacaatgaaagtttacttgccagagtgtaacctgcccaaggacttctggaagaatgaactgaaagacttctctaacaaaagtggagctgaagggagcaggagtgctgaaagtggtccaatgcttttagatgttctcgaaggttatctgaaatatgagaatttgtctcaaacaaggatgggcggcaggaggatgatgagttcagaatctgatccatcactaaatgttgaacatcggagcatgaggagggcaccattatcgtcagctgggaacctccctcctatggggaggccaatctcttcgtcgcagcaggcatcagatcgcagagggggatcttcagcttccaacacaaggaaagatgagtacaactggagatacgataccaccgatgatatatctgaagaggtgctacgggcatcgactgctctagaaagtgttcagctagaccgcaaatctcggaatctgccaacatcttggaggcattcaggggatggcgccgagtaacaacaaggctttggagctggttgcttgacttgaccctgtatcatgtaatttgtatgccaatcatttgcagtgatacgatgcttggattgctgctatcttagagaagtggtaaactggttatgcgtgtttgtcttgtaacgaacaaaacaactttagtgttagtttcatgttgcaattttc

SEQ ID NO: 4016 - DNA, 1521 bp, Zea mays
  Clone ID: 700346514_FLI
ccgtggtcgagatggtgacgggggcgctccggaggtcgctcatgctgtgcagcagcagcgccggcgccggcgtgcgcgagccggagcaggaggaggacggggcgactcccccgggtggtatgcagatagggggaccaacggatgtgcggcacgtctcgcacgtcaccttcgaccgcttcgttggcttcctcggcctccccgctgacctcgagcccgacgtgcctcgccccgtgccgagcgccagtgtgagcgtatttggagtttcaccaacttccatgcagtgctcgtatgatagaagaggaaacagtgtgccaactatactcttgactatgcaaaagaagttatattcacttgggggtcttcaggctgaagggatattcaggataaatgcagacaatagccaggaactatatgtgagggatcaactaaacagggggattgttccagatggtgttgatttgcactgccttgccggactgatgaaggcatggttccgggaacttccaagtggagtactggactcgttgactccagaacaagtgatgcactgcaacactgaagaagagtgtagccatcttgcaagcaccctacctcctgtcgaagcagcattgcttgaatgggccatcagtctcatggcagatgtcgtggaaaacgaaagctacaacaagatgaacgctcgcaacatcgctatggttttcgcaccgaatatgaccaagatggcggaccccttgactgctttgatacatgccgttcaagtgatgaatttcctcaagacattgatcttgagaactgtaaaagaaagggaggaggctgctaaagtagccagggcgttcccatcgagctctggttccccgagcgacaaagatgagcctcaaactgtagaacagttggacatgctcttcgtctgttcaagtcagcaaaatgtagagtatcctatggttgatgaggctaagtttgaccagttcctttttagagtggaagaagctcttcaccatgagacgcaaggcagcacagatggacccaagaatcatgacagcggtagaggtgaccagagaagtaacagtgagatcactccattggacaccggtttgaccggccaaaatgagttcagtaacaacagcgaggaaggtctctttgacaagtttaaatttaggaaaggggtagggaggctctgcaggcaccctgtgtttcagctgagtaggtccatgaagaagtcagatgaagcggagcaagcatgtgtatagggcatgcctgtgcagtggataatattgacacacctgtatttctctgcagcttgtttactgtgtaggtcttcggctattctcctagattgtgtgcctagaaggcattggccccattattagtactgatttgggtgtatatgtgactatgtcagctgttcacttattgctgtcctaattgttaagaagctatcatgcactagtgatttttcttagtttgtcagatagaatctcgtgtgtgattttcatttggagggtgactccgaattgctttgtgctt

SEQ ID NO: 4017 - DNA, 496 bp, Zea mays
  Clone ID: 700346524_FLI
gaaatctcgtaattcagtaccatccggctcccaggggcaaactgcaaagccaaggccattccccgtgcctgatgggataccgaaaacacaggaagagctcaccgaagaagaggaagcgttgatgccagagtctccatacacaaggttgctgagaaggatgggtagataccctgaatggtacaccccacgccctgatcatgagactgactgaatcaagtcatctaccatccaggtgtcccttttggaagttttgcagcatgataatctgaagctgaagctcgttttatggtatgtggtaatattttagtgttgcacctatgctgctttgcagattagacttgtccttttctacttattaatgaaaaccggtgtgtgcggtttatgctgtaaatacctggagtgttcagaatatgttttgttcgaggttctgtgtactgaagtacggagtactaatgaatttccttgtacataacatcgaataaaatcactgggtttt

SEQ ID NO: 4018 - DNA, 714 bp, Zea mays
  Clone ID: 700346549_FLI
acgagccataaaccagagctagtaggattgccgtggttctgtaatgtaaagagcaaaaccacggcaatcctacgagccataaaccagagctagtactgaacaatttcactacacgccttggtcatcgtgttggaaggatgatccagtctctcttccctcaagatcccaatttccgcgggcgccgtgttgtgaccttccacaaccagcgagactacatatttttccgccatcacaggtacatcttcgagacaaaagaaaagaaggttgcttcgaaggaaaagacatctggaagcaaaagcggatctgagaagcagcaagtgatttgtcggcttcaggaatgtgggcctcgcttcaccctcaagctgctcaccttgcagcatgggaccttcgacacgaggagcggggagtacgagtgggttcacaagccggatatggatacgagcaggcggagattcttcttgtgatgccccaactccatcctgcggaacttcttttcttaaaaaaaaactttgacccctgttttgctgaagcagttttgtggaaccatcagtgagcagcaagtgatacggacttttatttttattttttattgttctggtttcggcgccagtgcgttgaacaccaaaaccaaaagtgccggatgctccgatcctaaggcctgaacagtctatgcctccgtgatcagattaactcagatgattatccttatcttgt

SEQ ID NO: 4019 - DNA, 1058 bp, Zea mays
  Clone ID: 700346561_FLI
atgtacgccacgggtttgcttgacgatcagttccagcagctccagctgctccaggaccccagcgcccctgacttcgtctccgaggtcgtcacgctcttctgtcaggacggcgagcggatcatcgaagagctggccaaactgctggagaagcccaacgtggattttgacagggttgacgcctttgtgcatcagctcaagggaagcagtgcaaagtgattaccttgcccatacctttttcttgaattgaatgtgtaatgctagtaggaatgtacatgttttgtttccatttcagcgctggaatggggtatgcaacttagtaaccaggtttccggatcgatgggatcgaggaacgggaacgtggtacgcggtacgctactaaaactaggatttaacactactggaacgagattgttcccacattcccggaacggaacgaatgttcccggaacgaggaacgtggccaagttcccagttcccggttactaagtattggtgctcagaaggttaagaacacttgcattcagttccgcgaattctgtcagcagaagagcagagatgggtgcctcaaggtactggagacaatgaggattaacttctatgagctgcgtggcaagtttcagaccatgcttcagctggagcgtcaggtcaatggctttccccccaacaagtaaaccagatggtggagtggaccttcatgttaggatgatgcttgcacctttcaagtttcagaacattctgaatgagctcctcaattggtttctgggaagtcttgtaatagcttagcagcaagattagcgttgacaccaccgtagcagtagtcattgtcgtcaagtagttgtcctaaatgtctgtgctgggttatggatctcctgcaagcagttgcaggcttgcagctgttctgtttactctagtagtttatgttggagtagtcgctctcaataaatctgtgctaggagtctattggtggattattagtcagtcagtttctgggattcctggtggtgaagcaaaacaatgttatggctatcggttaataataatagtttgctgtgtttggc

SEQ ID NO: 4020 - DNA, 203 bp, Zea mays
  Clone ID: 700346585_FLI
cttttggtggcttcaagttatctcagttctagcttagtttagggtagtgtcactgaatggtgttcatgtacatattggtatgttggcttatgttaggattcagataatacttatgtccatatgcagctcttagcaaactcttatatatatcataccagatatgttttagatggttatatttatatatgatagttctgcacttt

SEQ ID NO: 4021 - DNA, 909 bp, Zea mays
  Clone ID: 700346619_FLI
caaacacacaatggcaccagaaaggatgctcctcggcgtctgtgccgtgctgatggtggtcggcgtcacgaacgcggcggagggccaggtggcgtcggtcgtcgtgggcctggcgaggtgcgccgacagcacgaggaagaacatgaaggctgaggccggtttcaagggtcttcaggtggcgatcaagtgcaagaacagcaacggcgagtacgagacaaaggccgtgagtgagatccaaagctccggagccttcagcgtcccactcgccgccgacctccacggcgccgactgccacgcgcagctccacagcgccgccaataacgcgccttgccctgggcaggagccgtccaggatcgcgcccatgtcaggcggcaccttcgtcgccgtgcctggcaagatgcactacccgtccgcggagtgcgcgtccgcgtttctctgctccccgatcaagaagcacttgttagatcacttccacaaggcacccctgccggtgccggagtaccacccggtgcctgaccacagcaagccgccggtgccggagtaccacccggtgcctgagcacagcaagccggcgccggagtaccaccctcccacgccggaataccaccctcccactccagtgtacgggcagccaaagccaactccgatctaccatcctcccgctgagcactgagttcgatcaacaacgaacgccagagctagaagaacggcaggcttctgttagttattaattcagtactgcacgtgttactagtgcgcctcatgcatggagaataaaatggtgtgaaatatagctgggagcttgtactttattagttatcgattgttgtttatctttaacttgcttaccgaaatcgtgttgtgcatcttgtctttttgtcaatgtaagcagagcctgttctcagtcct

SEQ ID NO: 4022 - DNA, 2194 bp, Zea mays
  Clone ID: 700346627_FLI
ggcagccagcagggccgggcgggcaccgagcgctgttgtgtcggtgcccaagctgggaaaaaaatcgccggagggaagagaagccccggcggctcccttggttggcacttggcaagcaagcagcaacccatacccgtctccagccgagatctgtctcgagctccggccgcaagccggcaggcgaccgcagaggcgcagattccggatcgaccggcatggacgcgggggacaccatggagaggggcgttcgtgctgtgctccggcctaagctgctcgctctcccgtcaggtctcacgcgctctatctcaatgggcactccacgcctgccgacgccctgcacgccgcgctctcccttcctgatcactccacaccggctggcatccttcacgccggatcgtcagcgatccattggagcgaggagccatggagacatggaaaagactcaggggccagagactcaggacggcgacttgcaagtgccgctccttgatgataagaactgcgccggcagcaaggcgccattggtagttcttgggttcgagtgcttggagagcacagctttcaatggcatctcgacgaacctggtgatgtacctggagaccgtcctccacggcagcaacgtggccagcgcctccaacgtcacgctgtggttcggcaccagctacctgacaccagtcttcggcgccatcatcgccgacgccttctggggcaactacaacaccatcctcgtctccctcgccatctaccttcttgggatgattctggtgaccttatcggcgttcctgccgacggacacggtgctcggcggctcctcggtgttcggcgcgcacacggtagcgttcgtggggctttacctcgtcgcgatcgggagcggcggggtgcggtcatcgctgctgacgttcggcgcggagcagttcgatgacgacaatgcggcggatcgcgagaacaagctgtccttcttcagctggttttacctatgcgtcgactttggcccgatcgtctccggcctgttcatcgtgtggatccaggagaacatcagctggggcctcggctttggcatctctaccgcctgcatcgcgctggccttgggcgcattcgtgctcgccacgcccatgtacaagcgctcgacgcccaccgccggcaaggcgtccgtcatctccgactccgagacgggcttggaagcgatatcggaggaggcgggctcgtcgcagaagctccgcgccgcgacgaaggcagaggagttcaagaccctgctgggacttctgcccatctgggcgaccagcatcatcgtctcctcggcgtacacgcagatgaacaccaccttcatccagcaaggcagcgccatgaacgtgtccgtcctgtcggtgcaggtgccaccggcgtcgatgggctcgttcgaggtggtctgcgtcctcatatgggtgctgctgtacggccacgtgatcgtgccggcgctgaggggatgcgggttctcgttcggcggcgacggcgaaccgtctcagctgcagcgcatgggcgccggccggctcctcatggccctggcgatggcggtcgcggcgctcgtggagatgaagcggctcggcagcgcggcgcgcggggaggagatcaccatcgcgtggcagattccgcagtacttcttcctggccggcgcggaggtgttgtgctacatcgcgcagctggagttcttctacgaagaggcgccggaaaccatgaagagcacgtgcacgtcgctcgcgctgctcaccatcgccctgggcagctacctcagctccttcatctacgctatcgtggcagcattcacggccacggcggacagtcccggatggatctccgacaacctaaaccagggccatctcgactacttcttctggaccatggccgccatttcagcgctcaacttcgtcgtgtacagcgtgttcgccaggaactacaagcccaagagtcaagactatgctctcatgacgtgactacaaacagctctgctccctttctcgtctggtacattcgactcggttcctgtgttgcatgtttgccaatttgtggcttgcgaagggtaatttgcgagttctcgttcaaccgctagtgcgtctgtcaatatgagactgtacataacatatgtactagccaggtgcctgtgcattacgacggcatacaaaatattgaataaaatggtaacgcacaactaaatcagttc

SEQ ID NO: 4023 - DNA, 232 bp, Zea mays
  Clone ID: 700346634_FLI
gtggcaatggtttttgatgccaccctcctacgttacaagacggccaaccagattggttatggaaccaaccaaatgtgcagcaagcacaccttattcaagtttgttggcaccaatagatatatgttatttctagttaaattctttgtagcgctgcgccgatgaagcctaacatggtgcgagttttgttgtttcgccttttgtacagtatatatctttgcccagtcatttcgtc

SEQ ID NO: 4024 - DNA, 2555 bp, Zea mays
  Clone ID: 700346690_FLI
gtccgccgcggcggcgcttttaccacggccaccaccgccaaatcctgccgccaccgtccattcactcttcgcctacctatccgacccggccgccctccaccacctacccgccccgctccttgccttctcccaactccgccacctgctgccgcccgccgccgccacccaactcctccttcgccccatcgcctcgctcctccaactccaccgctccgacctccgcataggcctccagcttcacgggctctccctgtccctcggcctctcctgctactcgcacttactgccccgcctcctctccttctactcacaccacccgtcgctcctccccgccgcctcctccctcgccgccggttccacgtgccccgaaccctacaatgtcctcatctccaactgcctcaaccacggcctcccgcaccacgcgctggccgcgtaccatgagatgatcgacaaggatgccgttccccctgatgccttcacttaccccaaagtgctccgtgcctgtgccgagaccgggaacctcgctctcgggcgggcggtgcacgtgcgcgccgtggacgccggcatggacgggcacctgtttttccagaacgcactggtgtccatgtacgccaagtgttgggaccttgcggctgcgcgcacggtgttcgacggaatggaacatagggatgtggtgtcgtggaactcgatgatctctggctacgctgcatctggacagtggagaaaggcagtagagctatttcttcgaatgcaggctgagggtgcggagatgaactcagtgacatggaacacgatcgccggcggttacattcagatgcatgattacagggcagcagttggattaattcgggatatggtgagaggtggtgcgagcattgattttgtgactttggtgattggatcaaacgcatgctcacgggcaggatggttgaggcttgggaaagagatacatgggttggcagtccgaatgcaatgtcacgaaatcgacagtgtgatcaatgcagtgatcacaatgtatgccaggtgcaacgatatggagcgtgctctcatgctgttcaagatgataagatgcccgggtctagtagcatggaatacaacgatagctggttttgcattattggatgatgcagaagcagcttctagacttttccgtgaaatggtggtatgcggtgatgtgcaaccgaattatgttactgtggtcacctaccttgccttgtgtgcccgtgttgctaacctgcagcatgggcgggagcttcacacgcacattgttaagcaaggattcaaagggtatcgtctactgtggaactctcttattgatatgtactcaaaatcagggaggctttcagtggctcaaaatgtatttgatactatggatgaccctgacatgatatccttcacttcaatgatagcaggatatggaatgcaaggaaaaggaattatttctctgcgctttttcaaacagatgattgacagtgggatcatgccagatgccatcatcatggttactgtactctctgcttgtagccactctgggcttgtgggtgaaggggaagagctttttgacaagatggtgaagtcatatggtataaagccccagatggagcactattcttgcatggttgatctatatgcacgtgctggactattggaaaaggcggaagaattgctcaaccagactcccttccctccgacatcaacaatggttgcagcattagtaggagcttgccatgagcaaggtaacataataattggtgaaaggtcagcaagaaggctcttggagatgaagacagagaacgctgggcacttcgttctgattgctaacatgtatgcagctgcaggttgctggaatgagctagcaacagtcagaaaactgatgagagatctgggtgtcatgaaagcacctgggttagcatgggccgaccttggtaacgggtttaccccttttctggttggggataggtcgaaccctctagctccagaaatctatgaggttttggatgaactaactgaacaaatgagtaatatgaataattgcagtgatccggacatactatccatggaggaacacatggagtaatgtgttcatggtaggacaaggacagattgcggctttggtgtaaaatggagttcattaatacaatgtagagatttcaccatgaagcgaaagggttaaaagggaaaaggtgatgtccttcaagaagcagctcatgtaagtgctactgtgcgagaagatgggcttaccaacatacactcaacgtttatgcatgttgaatgtttcctcgaacgtccaggcaatcacaagttgcttcctcatcgatggtgtcttagctgggatgcatgctaggtgatcgctacggtcacgacaagacttgacggctgtaaggtgaaggtagcctcaactcgatgccaggataactgatactgatttttgagggtgtgcattcagtattaaccagctgcctgatttgagatatgtccacaaacgatgtctttttcgccacactctgcaaagtacttcaagcaaatgggttacacagccgtaactcataactcgt

SEQ ID NO: 4025 - DNA, 783 bp, Zea mays
  Clone ID: 700346708_FLI
gtgaagagcaagggggcggagaagcccgccaagggcaggaaagggaaggccggcaaggaccccaacaagcctaagagggctcccagcgctttcttcgtgttcatggaggaatttcgcaaggagttcaaggagaagaaccctaagaacaagtctgtcgctgcggtggggaaagctgctggcgacaggtggaaatccctgagcgagtcggacaaggctccctatgtagccaaggctaacaagctcaagctcgagtacaacaaggccatcgctgcctacaacaagggcgagagcactgcagctaagaaggctcctgccaaggaggaagaggaggaagatgaagaggagtctgacaagtccaagtcggaggtcaatgacgaggatgatgaagagggtagtgaggaggatgaagatgatgacgagtgatggagctcctcgagacaatggaccgtgcttcatccaacaatggagcggctacacaaggccccgtggcgatcacaaaaaaggagcctatatccatgtactagaattattcagtttcactccacatcgtgatgttttatttttacttttgtcgtgctataacggatagcgctcctcgttggcgccactggcgggtggttctgcctctggtctggtgtgtttgtgtgtggtcacacttgccagccagcagaggcgcctgcttgtacctagattactgtttccattgtcgtcatcatcggctaacattgtcataatgtcagtttgggtaatgttagattaagtaattattgtgttctgtattct

SEQ ID NO: 4026 - DNA, 1559 bp, Zea mays
  Clone ID: 700346822_FLI
gagctgttcagatgactggagttcacattcatcttctgctggcaacccagacataccgtatgtggttgtctccaagtcatcaattgtgactgctgtatgcaaggagattcttggctgctacaggaagttacttggcattcctgatctgttgaatcaaccaaacatgtcaattctgaagcaacttttgcagactttacagccaactgaaaattttgatgatgttctttccgagttccaaccatctcttgctccttgcaatgttgattacctgtattgtggagcatgtaaaatgttggaggatattatggattcagtgtcctcattttcataccttctgtcttctgatgtgttaattactatacaatcaatcgtaaattctgttgttgtgttgttggacaaatctggggaaccaaatggaaaaaatatacacatgggatgctccaaagcaatcattccctttctgcgaaagcgtcttggatactcagctcataagctgctcagtgctgatgtccctagcgaagatgctggaaaaggatggcagactaaaggtgatcttatacagaagatattgcaaatatatctcaggaatagtgactctacttcagatctacttgctgagataggtcgtgaattgcctaaggaaccttcgctcaaaacaaaagataaccaagatgtatcgtatggttttccaacattgtgttcctccactattacctcttggtaccgtgtgcttcacgaggagaacacagggagtttaaacaagacgatcaaacaagcactgaaggctagaggatcagttgatactattcttcaagagattcagaaatcagtggatgcatttgtctctctaataggaatgtgcaagtcccacgaaaaggtttctatgcatgcaatggcagttaaacatggggggaaatttattgacacatttctgaaagccttcaactttctagagagacatttcgagcaacataatgacaccatagttaaaatgctaaaacaactccagaaaggaacaagaataatccaatccatatgctcagatgctaagggtaacaagcggacaatgatcacaagcaaagtacctcctgcaaagagatccatggagcggttcttgttccaggtcaaggcgctgctacacagctgctccgccgagaaggaattccagatgggcaatttgaagcacaaggacttgcaaggccatgtggtgagctctcaggcgtatggaaacgtggatgaggaagatgaggagcagacggagatcgactccgaccttccagctgatgagcatgataatggcaatgccatggaggaggatgctgtggaaggtagcaacgagacgccgatggaggaggaagaggaatagtggcataggtaccaatctgtacatctctttctctctaagccggccaaaaatctgtccccaaaattaacagttttgtgtgtgcatttagtgtagaaaaaaagataggatccccatcagaatctaggttgcaacgtcacttgtaaatatggatgtctgaacaagtagtttatatattgctagcagtggtcgtttc

SEQ ID NO: 4027 - DNA, 1179 bp, Zea mays
  Clone ID: 700346834_FLI
cggttcttcacttatgaggaattgtatcagatcacaaattgcttctcatcacagaacctgctaggggaaggtgggttcggatcagtgtataagggttgcttggctgatggaagagaggttgcggttaagaaactgaaagatggcggcgggcagggggaacgtgagttccatgctgaggtggatattatcagtcgtgtgcatcatcgccatctagtttctcttgtggggtattgcatttcagatgaccagagattgcttgtctacgattttgtgcccaacgacacacttcactatcatcttcatggacgtggagtaccagttttggagtggccagctagggttaaaattgcggctggttcggctcgtggaatagcctatcttcacgaagattgtcaacccagaataatccacagggatataaagtcctccaatatcttgctggataataactttgaagcactggttgctgattttggtcttgcaaggttagctatggatgcttgcactcatgtaaccacacgagtgatgggaactttcgggtaccttgctccagagtacgcgtcaagcggcaagttgactgagagatctgatgtattctcattcggtgtcgtcctcttggagcttattactggtagaaagcctgtcgacgcatcaaagccattgggtgacgagagccttgttgagtgggctaggccattgctcacgcaggcgcttgagaccggcaacgccggggagctggtggacgcccggcttaacaagaactacaacgaagtcgagatgttccgtatgatcgaagctgctgcagcttgcattcggcattcagcatccaggagaccgaggatgagccaggtcgtgcgggtgctcgacagtctcgctgatgtcgatctaactaacggcgtgcagccaggcaagagcgagatgttcaacgtcgcgagcacggccgagatcaggctgttccagcggatggcgttcggcagccaagatttcacgacggatttcagccagtccagctggaacaacagccagagcagaggtcttgatgcctctggttcgaggccattgtaatcctcctcgtcgtcgtaaatttcgtagatctaactagctagggcgtttcgtgatgatttttttttacctcgtgtaattctttctgagtggatcaatagtgattgttctttcacc

SEQ ID NO: 4028 - DNA, 400 bp, Zea mays
  Clone ID: 700346895_FLI
ggagaatcttctggcatgcatgtgaattcaaagccacggagacctcatgttgatgatgatcttgatgagcattcaaagcgttctagggtagaagatattgaccaatatagtggagaagaatattctgagtgatgaactgtaaatcataattatcttgcaccaacgaattttatcagtacatgtgaagccttaaaaggtttcaagcaataggcacaagtggtttcatggtgcatggtcatgcagtgaaagaaaatgtctgacaacaagaggacattggggcttggccaatttgttgatctctgtagtgataatagaaagcgtcacattgttctaaagaagttgtcttcaaagtcttggatgatgcgtatattgcagttgctccacatgttccaggatagtg

SEQ ID NO: 4029 - DNA, 552 bp, Zea mays
  Clone ID: 700346916_FLI
atgagattaagaacagcagttgatcttttccaactgtgattcaatgtccttcgtggcttttaaaagttcaactgctgttcttaatctcatttggtcagaatatgaacttttaaaagccacgaaggacattgaatcacagttggaaaagatctcctctccattgctgattcttcacggagccgcagacatggtaaccgatcctcaggtcagcaaattcctttatgagaaagccagcacgaaggacaagaccctcaagctctatgaaggcagctaccattcaatcttagagggagaaccagatgaccggatttcaactgccattaacgacatcatttcatggctagattcacactgttaaatacccctttgtctatagcctctcatgtcctcatccattgttttggatttatagttccttattagagtaccatgggtctctagtgctttaaattttgccatggtgtgcagagataagtatctctcgaattaattagttgtgcttgctatcttgacactgttggttttatgttaattgcggacaccgcattcaat

SEQ ID NO: 4030 - DNA, 2155 bp, Zea mays
  Clone ID: 700346926_FLI
ctttcatctctgaggggtttcccgtcttcctcgcctgctctaatggctaaagaacaggatggatcccccaaggtgcgccacccagaattccaaaggatgcgcgtaactctcaccataggtgtcattggcctctgtgtcacagcatacattcttggtgcttggcaaggtacctcgaacggcattagttcccccttaataagtaccagaacccagtgcaaagatcccgtgcgatcatctggtgctcgcctggatttccaagcccaccaccaggtgggcttcaatgaatcggcgcttgctgtggagaaattcccaccttgccagctcaagtacagtgagtataccccttgccaagatccaaggaaagctaggaagttcccaaagaaaatgatgcagtacagggagcggcactgcccaaagaaagaagacatgctccggtgcttgatccctgcgcctccaaactatagcaaccccttccagtggccaaaaagtcgcgactatgcttggttcaataacattcctcatcgggagctcagtattgagaaggctgttcagaactggattcatgtcgagggagacctgcttagattccctggaggtggcactatgttcccacatggtgccgatgcttatattgatgacataaatgcccttgtaccattaaatgaaggcaacatccgaactgcgcttgatactggatgtggagttgcaagctggggtgcttatcttatgaataggaacatcatcaccatgtcttttgcgccaagggattcacatgaggcacaggtacagtttgcattagagcggggggtaccagccatgattggagtgatggggactgagagaatcccatatccggctagagcatttgacatggcacactgctcgagatgtttgatcccatggaataagcttgatggtgtctatctaattgaagtagacagggttcttaggcctgggggctactggatcctctctgggcctccaatccattggaagaggcactaccagggctgggagaggacagaaggagacctgaagcaagagcaagatgagattgaggacttggcgaaacggctctgctggaagaaggtcgtagagaaaggtgatcttgctatatggcagaaatctatcaaccacgtagaatgtgttgacagtaggaaggtttatgatgctccgcagatttgtaagagcaatgatgtggattctgcttggtacaagaaaatggacacttgcatatctcctctcccagatgtgaagagtgaagatgaagttgctggcggagtccttgagacatggcccaaaagagcatttgctgtccccccaagagtaatccgcggttcagttccaggcctcacccctgagaagttccaagaggataacaaggtgtggtcagagagagtggatcactacaagaaattgattccaccactgggcaaaagacgatacaggaatgtgatggacatgaatgcggggataggtggctttgcagctgcattgatgaagtaccctctttgggtgatgaatgttgtgccttcaggcttggcccatgacaccctgggtgttatttacgaacgagggtttattggcacgtaccatgattggtgtgaggctttctcaacgtacccgaggacctacgacctcatccatgctgataaagttttcagcagttaccaggacaggtgtgacataacgtacatcctactggagatggaccgaattctaaggcctgaggggactgtgatcatcagggacaacgtagaggtgttggtgaaggtacaagctatcactggaggcatgaggtggaagagccaaatcatggaccatgagtccggtccattcaacactgacaagatcctagtggctgtcaagacttactggaccgggaagctcgtgcaaaaacaataatcgtcgccttgttactgtttttcgtctgcgaaaatgtaggcatgacttgcctgtcagttctgtcttcattgccatttttttatcctaacttcaggatatctgtatataggaggcatgtgaaccatgtagctggaattggtatcaaacatcattagccacgtagcgtatgtgacacattgcaatggtgtataagatgttcactcatatatttggtgtgatattgcaatctaataacatgatgcttggtgtg

SEQ ID NO: 4031 - DNA, 1978 bp, Zea mays
  Clone ID: 700346942_FLI
actcaagaacagcaaggttaacctggctgatgccaaagccatctgcctgatggagtgcccaaatccagctgtagatggattgaactatatttgtgattatccagaagggaacatagacctctctgttgatgattggatcaatagggactatgactattatgagtttctcacaccagacatgaagaatagctcacttcaactccagggtccatgctaccctataatatttccaactgtaaatgtctattggagctgccaatttattgcacgtgcatccaatgtttctttgaagcactggcatgagacgggtggtgtcagcattgatgaaaatatcctcattgataaaacagtgcacaaggccatcgattctagatctgctgtattaaagagatatattgcagacattgggaagtcctggcctgtgttcatcgtttgtggtggaattctccctgttttcctgtcagttatctggttgcttatgattcgttatttcgttgctgccatgacttggattacagtagtcctcttcaatgcccttgttatatctgtaacgatgttcttttacatcaaagctggctggataggcaatgaccccttaactgttgtcattggtgaaagtgatccatatgttcacataagtggacgggaaataagtcaccttcatactattacaatcctaatgacagcagtaatgatcattgctttcctgtcctcaatagctattgtccgccgtatactgatagcaacacctgtcttaaaggttgctgcaaaggtcattggtgaagttcaggcactgatagcttttccacttttgccgtgcctgatcctttctatcttgtatatgttctggttttctgctacactccatctcttcagctctggtcaagttgtccgaaatgattgcaatactgattgttgttcatatgatctgaagctgggaaaagtaaattgtgacaactgctgtgggtacagcatccattacacccctcatatcagcattgccattctatttcacttatttggttgctactgggcgactcaattcattctcgcatgctcttcaactgtggttgcgggatcagttgcttcatactactgggcgcgtggtgaaatatcacatgatataccatttctcactgtagtctcttcactgaagcgactgatgcgctacagccttggatctgttgctctgggttcacttgttgtatctgttgttgaatgggtgcggtttatactagaatgccttcgtcgcaagttgaagctagttgattctgcccgagagagctgctttggaaaagcgacgtcctcctcttctgaatgctgcctgggttgcatagactggaccctcaagtcagtaaatcgaaatgcctacattatgattgccatcaccgggaaaggtttcttcaaagcttcagtgctcgcaactggattaataatgaagaacattctgcgcatcggaaaagtcaacgtcattggagatgtcatcctcttcctgggaaaactctgtgtgagcctattctgtgcgcttttcgcctttctgatgttagacacccacaagtacaagtccgcacacaacaagatatcctctccagttatccctgtcctggtaacatgggccctcggctacgtagtcgcgaagcttttctttgcggtggttgagatgtcgatcgacaccataatcctctcgttctgccaggacgccgaggagcaccaggggaacgcgcagtatgcacccccagctctgatggaaactctggacgaacagggcgaactgcagagactaactcaagggccttgactgtcttttcctcttggtagtagcatggaaacttagcggcagcctaatgttttgttaccccgttccgttctcttggcttgtgaagaggtttgccatttttgcttgctaccctaattccatgtacaagtctgaatctgacatgttctcctggcccaattggcatgtgtaggcagcttatct

SEQ ID NO: 4032 - DNA, 2545 bp, Zea mays
  Clone ID: 700346970_FLI
agacggccatgcagggtttcactgagaaaattgtgggaatgatgaagagcgaaaacctctttgcatcccaaggtggcccaattatcctctctcagattgagaatgagtatgggccagaaggcagggagtttggtgccgcaggtcaggcatatatcaactgggcagcaaagatggcagtcggattgggtactggtgtgccgtgggtgatgtgcaaggaggaggatgcacctgatccagtgatcaatgcatgcaatggtttctactgtgatgcattttctcctaacaaaccttacaagcccacaatgtggactgaagcttggagtggctggttcacggaatttggtgggaccatccgccaacgaccggttgaagatcttgcatttgctgttgctagatttgtacaaaagggtggttcttttatcaattactacatgtatcatggaggaacaaattttgggcgcattgctgggggtcccttcatcacaacaagctatgattatgatgctccaattgatgaatatggacttgttagagaaccaaagcacagtcatcttaaagaactccacagagctgttaagttatgcgagcaggctttggtttctgttgacccagcaattactacccttggtaccatgcaagaggcccgcgtcttccaatctccatctggttgtgcagctttccttgcaaactacaattctaactcctatgcgaaagttgtgttcaacaatgagcaatacagcctaccaccttggtcgattagcatccttcctgattgcaaaaatgttgtttttaacagtgccacagttggtgttcagacatctcagatgcaaatgtggggagatggtgcctcatcaatgacgtgggagaggtatgatgaggaggttgattctctggcagctgctccattgctcaccacaactggtttgcttgagcagcttaatgtcacgagagacagcagtgattatttgtggtacatcaccagtgttgacataagctcatctgaaaactttctacaaggtggcggcaagcctctgtctctcagtgtgcagtctgctggtcatgccttgcatgtctttgtcaatggacagcttcaaggttctgcatatggtactagggaagatcgaagaatcaaatacaatggcaatgctaaccttcgagctggtactaacaaaattgcactgctgagtgttgcctgtggattgccgaatgttggagtgcattatgagacgtggaacactggtgttggtggtcctgttgtgcttcatgggctggatgaaggttcacgagaccttacttggcagacttggtcctatcaggttggcctgaaaggcgaacagatgaatctgaactccatagaaggctcaagctcagttgaatggatgcaagggtcattgatagctcaaaaccagcagccattggcctggtatagggcttacttcgagactcccagcggggacgagccattggctttggatatgggtagcatggggaagggccaaatctggataaatgggcaaagcattggacgctactggatagcatatgcagatggagactgcaaagaatgcagttacacgggaaccttccgggcacccaagtgtcaatcaggctgtggtcagcccacacaacgttggtatcatgtgccaaagtcctggctgcagcccaccagaaacctgctggtagtcttcgaggaacttggtggggattcatcgaagatcgccctagtgaagaggtcagtctcaagtgtatgtgctgatgtatctgaggatcacccaaacatcaagaactggcagatcgaaagctacggcgagcgcgagtaccacagggccaaagtgcacttaagatgtgcgcgtgggcagtccatttccgcaatcaaattcgcaagctttgggacacctacgggaacctgtggagatttccagcaaggagattgccactcagctaactctcacacagtcctagagaagaaatgcattggactccaaagatgcgtcgtcgccatctcccccgagagctttggaggagacccctgcccgagcgtgacgaaaagggtggcggtccaggcagtatgttctcccgtcgcgtagccttacttctccaagcaatggatttggaaggcggtcgacaaaaaaaaaataaaaaatggtcgaaaccagtgcagggtgagtggaactgtaagtatcgtcgactttgattattagatgtggctggcttgagaggttagcagcattcgttgtcggattccagattaggatttgtagtctgctgcatctccatgaattgttcaaagcggccggctggataatgttgtagctggtccaggaatgcagctgtagagagagagagagagagagagagagagaggagtggaggcagaagagtgactgattatgcattcttttgctgtggtgttagtagctgtgtacccgtgacacatgtcgtctttcttggaacggagaaagatgcaggtgaagtgtgcattgtgcccttttgttctactgctactgctagtggtaaggcaggagccttgcaattgtcgggggag

SEQ ID NO: 4033 - DNA, 454 bp, Zea mays
  Clone ID: 700347009_FLI
cttttacagagaaatgtgatatattcagccttggtgttatcatgtgggagctgtgcacattgagtcgcccatgggaaggcatctccccagttcaagtggtgtacgcagttgctaatgaaggttcacggcttgagattcctgaaggacctctcggcaggttaattgcagattgctgggcagagcctgagaatcggccgagctgccaggagatcctaacccgtttgctggactgcgaatacactgtcagctgaaatggaagctgctcgctcgtccactcaattcctgcacaggtggaaacatttcttgtataaaacctgtaaaaaaaggctgccgattctgcggacttgaggtcacatatcgaagcgctgtgttttttttaaacaatggcgaccctttctccaaaaaaaaatgtaaaaatgattccctggttatagaagaacatgtctgattcgat

SEQ ID NO: 4034 - DNA, 1004 bp, Zea mays
  Clone ID: 700347045_FLI
ctcgtgtggccgtcgtctcccgttcggaacgccaagccccccctccggcgaaatggcccccaagcgaggtggcagggcgccggtgccggccaagaagaagacggataaagtgacgaaccctctattcgagaagaggccgaagcagttcggcatcggcggcgcgttgccgcccaagaaggacctgcaccggttcgtcaagtggcccaaggtcgtgcgtatccagcggcagcgccgcatcctcaagcagcgcctcaaggtaccaccggcgctcaaccagttcacccgcaccctcgacaagaacctcgctacgaacctgtttaagatgcttctcaagtaccggcctgaagacaaggctgccaagaaggagaggcttctgaagagggcccaagctgagaatgaaggaaaaactgttgagtcgaagaaaccaattgttgtgaagtatggccttaaccatgtgacttacctcattgagcagaacaaggctcagcttgttgtcatcgctcacgacgtggatccgatcgaacttgttgtgtggcttccagccctgtgcaggaagatggaggtcccttactgcattgttaaaggaaaggctcgccttggatcgattgttcacaagaagaatgcatcagtcttgtgtcttaccactgtcaagaacgaggataagcttgagttcagcaagattttggaggctattaaggcaaacttcaacgacaagttcgatgaggtcaggaagaagtggggaggtggcatcatgggatccaagtcgcaggccaagaccaaggcccgggaaaagctgctcgccaaggaggctgcgcagcggatgacctagattgtctactgctgtgtctgccctgtagtttaacggggaagaactgatgaactcgtattgtggttttccgaatctagtttcatatgtttctgtccaccagaccatgtttagaagctttgcaagacagagtttacagtgtttatgtgatgcctcagatccatgcagctttgcttct

SEQ ID NO: 4035 - DNA, 952 bp, Zea mays
  Clone ID: 700347172_FLI
aacagaaaaccacgcgccctgcaggggttcttgccctcgcctggcttatataaacccagcccctcctgcccccctactacgcagtgcatacatcctcaccacactgcaccatcattgcattagcaagcagtgaagcacaaagcacaaacaaagcaagccgatcgaattaataggtgcagcatagtgctcgatagcttgctcagcagcaagcaagcaagctaggtagccgtgtgaggttggtcgatcgacgagatgaagaagggagcaatggcctcattggtccctctggttgttgcgctcctcttgtgcccgtcgtcgtcgctggcaatggcatccggcgccggccctgcgcagtgggggaagaagctggacccgcacttctacgaccagtcgtgccctcacgcgcagcacatcgtggcgtccatcgtggggaaggcgcaccaccaggacccccgcatggccgcctccctcctccgcctccacttccacgactgcttcgtcaagggctgcgacgcttcgctgctgctggacagcagcgggtccatcgtgagcgaaaagcggtccaaccccaaccgggactccgccaggggcttcgaggtcatcgacgagatcaaggccgcgctcgaggctgcctgcccggccaccgtctcctgcgccgacatcctggcgcttgcagcccgcgactccaccgtcatgactggcggccctgggtggatcgtgccgctggggcggagggactcccgtggcgctagcgtgcagggctccaacaacgacatccctgctcccaacaacactctccccaccatcatcacaaagttcaagctccagggcctcgacatcgtcgacctcgtcgcactcctcggtagccacaccatcggcgactcccggtgcacaagcttccggcagcgcctgtacaaccagacggggaacggcctcccggacttcaccctgg

SEQ ID NO: 4036 - DNA, 1319 bp, Zea mays
  Clone ID: 700347191_FLI
gagcacccgaggagactccgtgcgaccgaagccagagccagcggaaccgaacgggggtgtgctggagggggacgccgcgctgctggccgagatgcgtgggaggattgacgaggagatccgcaagcttgatgagaaaattgctgatgcggaggagaacttgggtgagagcgaagtccgtgaagcacatcttgccaaatctttgtactttataagggtcggtgagaaggaaaaggccctggaacagcttaaagtcactgaaggaaaaactgtagctgttggccaaaagatggatcttgtgttccacactttgcagattggttttttctacatggattttgatctgatatcaaaatccatcgataaggcaaagaacttgtttgaggaaggaggcgattgggagaggaagaacagattgaaagtatatgaaggcttgtactgcatggcaaccagaaacttcaagaaagctgccagcttatttttagactcgatttcgactttcacaacttatgagatattcccatatgatacgttcatcttctatacagtcctcacaagtgtcatcacattggatcgtgtatctctgaaacaaaaggtggtagatgcaccagaaatcctggctgtaattggcaaagtacctcacctctccgagtttctcaactccctgtacaactgccagtataagtcgttcttcgttgcattttctggtctgacagagcaaatcaagttagaccgttatcttcagcctcatttccgctactacatgagggaagtgcgcaccgtggtatactcacagttcttagagtcatacaagagtgtgacaatggaagcaatggccactgcgttcggtgtaactgttgatttcattgaccaggaactgtcacggttcattgcagctgggaagctgcactgcaagattgataaggttgctggcgttctggagactaaccgacctgatgagaggaatgctttctaccaggcaccatcaagcaaggggacttcttgctgaaccgcatccagaagctttcacgggtcattgacctgtaaggactgtttgtgttggagctattcctgcaatcggcgcctgcaaatgtttaccaccctacgtcttccacaagacatctctgcttgagtggggattggggaacaagccctaagaacatctgtgttttaagtgcagaatatttgtgttttaatcagtaaacgctgtcctgtcatttcaagtttcctatctgtggctctgtctgtgattttcttccttaagttgttagcttgacaatctggtgcccttttgacctacatacatagcccctgtttgtttc

SEQ ID NO: 4037 - DNA, 873 bp, Zea mays
  Clone ID: 700347220_FLI
ggtcactgggcaagagactgtaaagctggtgactggaaaaacaaatgctaccgttgtggagaaaggggccatatagaaagaaattgccagaacagtcctaggagtctcaggcgagagagaagttactcacggtccccatctccccgccgtggacggggccgcagtcgaagctatggcaggagcaggagccggagtcggagctatagtcgatcaagatccctgtctagatctcctaggggaggtcgtcgtgaccgtgacgataggagatcaaggagtcctagctatagcaggagccccatgcgatctgcctcgccaccagtaaaggaaaaggagcgcagccccgcacctgatggaagcaggagcccaaggagtcgcagcccccaggatcaggtgatgagcccaccaccaaaggataatggcgaaggcaatggctcagaccgtggcggcagccccagagggagggagaacagcaggagctgcagccgcagccgcagtccatctggtagtaaccgcagccctgcggccaatggacgtagccggagtcctggaggtgagcggagcccgagtcctggaggtgagcggagcccgagtcctagaggtgagcggagcccgagtcctagggctgaccgtagcccaagccccaatggcaatggtaacaatgatgctgctgctgatgtcgatgctgatgctgctgcccgcagtggctcccccactggaagcaagtcaccctgagcgctggcggtcccagattgtggtggtgcttctcaatgcaatgggcaatcgtattgctattttttgctaccatatcgaagacacaatagctacatcattttcttctctgaaacaaggactttattttgcttgctttgagat

SEQ ID NO: 4038 - DNA, 1542 bp, Zea mays
  Clone ID: 700347284_FLI
ctgctacttacctttttttacagcagtgcatgttcgtctcatggtgctgcattcagtttacaatgtgtctgaaggatttgaagaccccacccccagatagtggatgggcttttttttacatattgtatgtgtcaacaggtaatcagaaggctggctcagaatcgtgaggctgcacgcaaaagccggctgcggaagaaggcgtacattcagcagctcgagagctgtaagctgaagctttctcagatggaacaggacatgcagcgagcccgtacccagggcctctttcttggaggagatccgggtgcaagcaccagttcaggtgccgccatgtttgacgtggagtacgcccggtggctggacaaccacagccggcgcctggccgagctgaacggagccctacacgcgcacctggcagacggtgacctcagagccatcgtcgacgacgccctcacccaccacgacgagctgttccagctcaaggccatggcggccaaatccgacgtgttccacctcatcactggggtgtggacgacccccgccgagcgctgcttcctctggatgggtggattcaggccctccgatctgctcaagacactgctgccccagctagatccactgacagagcagcaagtggtcggcatatgcagccttcagcagtcatcacagcaggcagaggaagctctctcgcagggcttggagcagctgcatcagtcgcttgctgacaccatggccggtgggtctctgactgacgacgccaacatgagcttcatgagccaaatggctcttgccctcggcaaactggccaaccttgaaggctttgtgatacaggccgttaacttgaggcaacagactcttcatcagatgcaccggattctgacagttcggcaggcagctcgatgtctcttggcaattggcgagtaccacaaccgccttcgtgccttaagttccctctgggcttctagacctcgagagatactggtgaccgatgaaggcaattgtgagataagcatcgcagcacaaccatcccaaaaccaattttcaaccttctgactgacacatgttgtggaactaaccctcagcataggagcaagagaaaaatgactgggaagagaatgactgggaagagagattgtttggatgcacgtagcagatatctgagagctacagaggaaagctgggaaatagaagaagctctaaaacaaggagtgtttctggaaattctttagttttcaaaaaacactttctgaaaatgtgtgtacaagaaaattccaggaaggtgaaattgcttcattgactgcagtgggaaggggaaagagagaagctagaatctcatgtcgagtactccagtacaatgtgttcttttgtctggtctaaattcttgtaacagctcttcctatgatggaagaatccattcaacaattccacctatgattactggattgagtatgttgaataggttggttgaggctatctagtaatttttatgactatgtttatccattatctaggactatttggttactatattatataatctttatc

SEQ ID NO: 4039 - DNA, 2037 bp, Zea mays
  Clone ID: 700347289_FLI
aaatcaacccgttcgttcctcccttctcccccctctccccacatcgggcagcctcccccctctctctcaccgctcaggtcaggccaggcccggcgggagagagatccggcgagagacgcggcctcttgctcccctcaacccccttaaagaagcgcatagaagcttcggaaggtgcccctccgcggctcgaaggaggggaggggacgccgcggacaatgacggcgatggaagccgccgtcgacgctatgctcgccgccgcgagccgtgccttcacgagcacctttgccatcgccatccagatccaggggtgcatgatctgtttagtccttgctctcgggtgggcggctgcttcaattgtcagaaaaggggttataaagaacatgaggcgcaacattgtagatggaaatagttttgcatttctttgtgacaacatagatgagcttgagcactctgttcaggagaatttacctagagtctctgtagtcatgcctttgaagggctttggcgaacataatttgcaaaattggcgaactcagattacatcactttatggtgggccactggaattcttgtttatcgtcgagagcaaagatgatcctgcttatcatgctgtttcccgtttgatcacagagtacaaggacaatctggaggcaaaggtggtcgttgctgggttgtcaacaacctgtagccagaaaattcacaatcaattgatcggtgttgaaaagatgcacaatgataccaagtatgtattgtttcttgatgatgatgtgaggctgcatcctgggactatcggagctctcacaaaagaaatggagaagaatcctgagatatttatacaaactggatatccccttgacttaccttctggcagtttgggcagctattgcatatatgaataccacatgccttgttcgatgggatttgcaactggtgggaagactttcttcttgtggggtggctgtatgatgatgcatgctgatgattttaggcaagaccggtacggcattgtcagtggattaagagatggcggttactcagatgatatgacactcgctgcaatagcaggacagcacaaaaggctcatattttcaccacctgttgctgtgtttccacacccccttgccagtgatcttagcttctccagatactggaattacctcaggaaacaaacttttgttctcgagtcatatgtatcgaatgtaaactggatgatgaaccgtgcattatttacaagccattgctatctgtcatgggggtttgtctggccatacattatggctttggtccatgttttagctgctcttcgggcaccgtacagcaaagttgtaaaggaagcatccgattcatcttggggtttgttcctggtgggcctcttgttcacatgcactctgatcgagctcgtttcaatgtggaatttgactaaggtggaaattcaactgtgcaatatgctgtctcctgaaggaccgaaagtatctcttgattcatacaactgggggctcgtgttcatcgctgtgttggtagacaacttcctctatccagtatccgcaatccggtcgcatttctcccaatcaatcaactggtctggcatccggtactacttgagggacgggaaaataagcaagatcgagagagagaacagttcgaagtacactgatcttggagggaagcatctatacggcaagaggacataccctcctaacaaatcgttgctcggttacctgtcaagaactctagtgcaatggcatcagccaaagaaatatgacgtataggaaggtcgaccgggggagattcagccctcgattgtgtggggggcttcttgttgtacacctcttttggtttcaactttctttcatgcctctctctctctctctctcctctctgattgtttagtggttattaggttcattcatattaaattttgtggtgttcaatcggcgccaccactttgaaagggttgcattgcacctcatagttctttgtaacactagagatatgtaacgatttggctgaagaagtgaaatgttccatgttggtgag

SEQ ID NO: 4040 - DNA, 769 bp, Zea mays
  Clone ID: 700347345_FLI
ggtggttacaggaactggaacgataacaacgaaagaaggcccttcggtcaaggtggtggctggtctcagtcttccgactggaatgccaacaaaggaagtggcgaaggaaatcaagctttctcgaagagcaagcccagctgggacgcgcagaacgcctctggtggagatgaccaggcaggaaagaagagtgacacagacaactcctggagccagaaccgatcatctccatctatcctgggtcagccaagcggtgatgctaataacaagtctagcgcttgggacggcgctcccaacggaggagctggcaggggaggttcaggttcttggggaaagagcgacgaggatggctggaactcgtcgtcgggaggatcagccagagagaagccttcgtggggtggtggggcagaagctcctcccaggaaggaggacgacggcgcatggggcaaaggcggcgaggggagccggagcctaggaggaggaggagagggtggtagcagcagttcctgggataaaccggcagatggtgcatggagcggcaacaacaagggtggcagtggcagtggtgggtggtaactggtaagcttgcgacttattggcgctgactgcatgtaaatattgtgcccgcgctgtgtgaactgttctggtgcgtgtctagttcgtatcagttacttggccatgcgtactctaaactaaaataaaacatggcttgtgactgtgactagttaaatgtagcctgttgctgacagtaattaggtgccttaactttcag

SEQ ID NO: 4041 - DNA, 527 bp, Zea mays
  Clone ID: 700347377_FLI
gggaaatcaaggaaagggcagaaagtaaaagtagaaatgtgcatgaaaggtgggtttaaggacagcttgatgacggcgtagctgacgaacagcacttgaatcaccagaattcatgatctggactgttttttcttagaccaataacagcaggaaaatgttagcttatcttacttagggctagtttgttaactccatttttccaagacattcttatttttctaagggaaaattaactaattttccttgggaaaatggaattcccttagaaaaacgaggttgccaaactagcccttaaagatttgcctatggattatttcctgcttgctatcggtgcgatcggtataccttaaactgattgtaagtttatgctttagagtgattgtttttgaacaaaactagctacatttctgactgctggaagcaaacttgagtgcctcaagtagctggcaggtagaaaatcctttgctttgtacgcactattgctcctttgccctgcacatttgctgaagcgaacaagttttaatgtg

SEQ ID NO: 4042 - DNA, 871 bp, Zea mays
  Clone ID: 700347436_FLI
aaactaccaaagagctaataggcggcagatggagcttcaaacgcaagctctcggctcgcagtacacacagcatgagcattacaatgcgtcaccgagcacgtcatatggaagccaaccgctgacactggaagacttgtctcggcgtcatttccagcaagacttgcgcaggcctttacgccctcaccctcgtgtcggtgtgctcggttcattgctgcagcaggagatcgcaaactggtctgggaactgcgggccgcagtctgggtacagactaggtgattgtaaagggacaaggccgcctgatgccaacagagcaggaaactacgagaccttgagctcggcaggatggaacaccctgcagttgggttctgttagctctgctgccaatctggagtaccggtttccatggtatggtacgggtcagccttcgaccagtggcaatgggaggaccattcatccgttggataagctcgtgaggaaggatatctgtgtgactaacagaaacccagccgatttcactgtaattagtgacaagaacgagtacatgagaaccctttgaaagagagaaaggctttgtttaagcaatcatcattggtagagcgaggaaggctttgagcagcagctaccgggagccgggtgcagcctccagttttgttctgtgcaaatgttttatacataggcgaagaactaatgtcgggttgccatggaaaaccccaataaacttgtgtgttgtaggtagataggcagatgtacaagacaagcatgcgtggctgtggccatagtaatgtttttctttttctttttggttttgcctttttttttggtactcctgtcccagaataaactgcaatttctacaattcaaaatttatccc

SEQ ID NO: 4043 - DNA, 1461 bp, Zea mays
  Clone ID: 700347471_FLI
atgcgctcacatggagactcccacacgaactcgaatcacctccgcctcgccacctcttcatcttcttccccagtagccgctgccaccaccactgcagcagccaaaccacgtgacacctcccgcgccgctcaaccccacagcatccgctgccaccgccgctcacctccccggcgctcccggctacaaccactgcaagcatgaggcagccaaccagcgcgggcggcgacgctgggttcttgcgcgcggaccagatcgacctcaagagcctggacgagcagctcgagcgccacctcggacatcccgcggagcgggtagttggcccagtctctgggacagggagccgccgcggcgaaacggccaagctgggtccggaggagctgacgccactgcagcggtgccgtgaggactgggagatcgaccctaccaagctcatcatcaagggcgtcatcgcgcgcggcacctttggcaccgtccaccgcggcgtctacgacggccaggacgtcgctgtaaaattgcttgactggggcgaagatggccatagatcagaacaagaaattggtgcactaagagcagcgtttgcacaagaggtcgctgtctggcataagcttgagcatccaaacgttactaagtttattggggctataatgggcgcaagagatttaaatatacaaacggaacatggacagcttggcatgccaagcaatatttgctgtgttgttgttgagtaccttgctggaggtgcgctgaaaaattttctgataaagaacaggagaaggaagcttgcctttaaagttgtggtccaaatagctcttgaccttgccaggggattatgctatctccactcaaagaaaatagtgcaccgtgatgtcaagactgaaaacatgcttctggacaagacgagaacggtaaaaattgctgattttggtgttgctcgagttgaggcttcaaatcctagcgatatgacgggcgaaacagggacgcttggttacatggctcctgaggttctcaatggccatgcttacaacaggaagtgtgacgtgtacagctttgggatctgcctgtgggagatatactgctgtgacatgccgtaccctgatctcagtttttctgaggtcacctctgccgtcgttcgccagaatctgaggcctgagataccgcgctgctgcccgagctcgctagcgaatgtgatgaagcgatgctgggacgcgaacccggacaagcgtcccgagatggcggaggtggtgtccatgctggaggcgatcgacacgtccaagggtggcggcatgatccctaaggaccagacgcagggctgcctctcgtgcttccgccagtaccgaggtccctaacgcagggttgtttatttatacccggtgaaatgatgatattggtctctacactacaactcagtgtaatctaatcgcagaagtggctatataatggagaagcttatcattgcttgcc

SEQ ID NO: 4044 - DNA, 3777 bp, Zea mays
  Clone ID: 700347478_FLI
atgagtccgtctcgacagtgaccggacctcttcgttagggtttcgcgcctcttctcaccgtctgcctactactagggatagacctccggcaaggcctccctcgcgccggcggcgtcagcagcggatatgggtgttccggcgttctaccgatggctggcggagaagtacccgatggtggtggtggacgtggtggaggaggagcccgtagagatcgagggcgtcaaggtgcccgtcgacacctccaagcccaaccccaacagcctcgagttcgacaacctctacctcgatatgaacggaatcatacacccctgcttccacccggaggacaggccctccccaacaacatttggtgaggttttccagtgcatgtttgattatatcgacagactattcgtcatggttcgcccccggaggcttttgtacatggccattgatggtgttgctcctcgtgctaagatgaaccagcagcgctcaagacgattcagggctgcaaaagatgcagctgatgcggctgcagaagaagaacggttacgtgaagagtttgaaagggaaggcagaaagcttcctccaaagcagcaatcacaaacatgtgattcaaatgttattactccagggactgaatttatggctgttttatcagttgctttgcagtattacatccatcgtagattgaattatgatcctggatggaaacaaattaaagggaacataaaatcatgtcatatattcgtggccaacggaatctgtctggttttaacccaaatacgcgccattgcctgtatggcctggacgcagatctgatcatgctagctttggcgacacatgaagtacacttctcaatactgagagaggtagtttatacacctggacagcaggataaatgcttcttgtgtggtcaggtgggacatctagcagcaaactgtgaaggaaaggtgaaaagaaaagctggggagtttgatgagaagggtggtgctattgttcccaagaagccctatcagttcttgaatatatggaccctgcgggaatatttagaatacgagttcagaatgccaaacccacctttcaagattgattttgaacgcattgttgatgatttcatcttcatgtgcttctttgttggcaacgattttcttccacatatgccgacgctagagatccgtgagggagctattaatttgctaatggcagtgtacaagaaggaatttccctcaatgggtggatatttaactgattcttgcacgcctgatctgagcagagttgagcacttcattcaagcagttggttcatatgaggacaaaatatttcagaaaagagcacgtttgcatcagcgtcaagcggaaaggataaaacgggaaaaagctcaagcaaagcggggtgatgatctggatccccatgttagggatgaccttattgtacctattcaacgttttcaagggtctcgcctagcctctggggctgtacctgtgccatatgagcagaatggatcccataaagacaataaagaaaggaatagtcgagctcggaaagctgcacgagtatcaacgtcaggttccagcattgcctcagccttagttgaagctgaaaatgacctcgaagcccaagaatgtgaaaacaaagaagaactgaagtcaatgcttaaagatgcacttcgcgagaaatctgatatttttaattctgacaatccagaggaggataaggtgaaacttggagaaccaggatggagggaaaggtactatgaagagaaatttggggcaagaacacccgagcagattgaagaaatacgcagagatgttgttctcaaatacacagaaggattgtgttgggtaatgcactactattatgaaggggtatgctcatggcaatggttctacccttatcattatgctccgtttgcttcggatctaagtggattgggccaacttaatattaaatttgaacttgggacaccattcaaaccttttgatcaacttatgggtgttttcccagctgcaagtgcccatgcgctaccgctacagtatcgacgattgatgaccgatccaaattcaccaataattgatttttatcctacagattttgaagtagatatgaatgggaagagatattcttggcaagggattgcaaaactaccgtttattgatgaagatcgtttgttggctgagataaaaaaagttgagcatactttgacgcctgaagaagcaaggagaaacagtatcatgtgtgatatgctttttgtgaatgggtcacatccactttcgccttatatctactctctcaacagcaaatttgggcatctgcctgacaaaaggagaaatgaaattaaagaaaaacttgatccttctgctagtggaggaatgaatggatacataacactttgcagtggggatccatgccctcctatctttaggtctcctgtggacgggctggaggatattatggacaatcaagtgatatgttcaatctacaatcttccagaccatcataagcacatagcccagccgccagttggtgttatcatgcccaagaagattgttgaagccggtgatctgaaaccacctccagtgctgtggcatgaagatagtggcaggcggcctcatgataatagcaacaggcaaaacccatctggtgccatatcaggccgtcaacttggagaggcagctcaccgacttgtcataaacagcttaaatgctcagggtagggggcaacatagtggcacatcaatgccatatcgaactataatgaatggcttgcatcatctggatgtagcgtcccctgtcagcaatcaaggcatgcgtccacaagtggggcagtctgccggacctcctggttggtatgttcctaggggtagtgtatcaaatggtcaaccaccagcttatgcatcatcaggatcaggtcattatcagtatgaaagttcggggcattcacaatatgaacaaggtaaccatggaaggcaacaatctcacccatatgcaagagatggcttccatgatacacgaggaagggttccacctgcatatgggtaccagcagagcaacatgtatccatcgggtcctggattgtatgggcaacctccatcagcatatcctggggttcatggtggaggctaccaaccccctccatatggcggaggccagcagtggcagcaacaatcatatagttcgtatgccgtgcgaggcccctacggaggcaggccaccacccacaagggctgattcagggtcacagcaaccacagaaccgttatggtgctttagacagaagtaacaaccggaggccttcatctggatacagaagataatagtttgtgacccagtttatgttataactcaaagtttgttatcagtaaagcttcgagtaactcagctaaagcataggcggaatagtctgctaagtcttgtgaccttcaagcagttagggggtggccatcaaagatattgggaggcaaaatttgtatgctagtgcagactttcaggtactagcggttttgatcgccattgaagcagctaggtttgcggcatctcagaggttttgtgaagcaagatttgtatactactgttatcaacgggccatcaggtactggtggctggtcgccattctttatctgtagctgccatttgtttagaagatgtcataaacggccctggggtttaaataggtcccattgagaatatttttgaaggacgtttactctgagacttgacaagttttgggggcattttgatatcagataaatgtatgcaggagtgcagttttgatgatgtgtgtattccaagtcattaatt

SEQ ID NO: 4045 - DNA, 659 bp, Zea mays
  Clone ID: 700347487_FLI
gcaatctctagcagcagatcctcgtgcgaagcaaagcgctagccccttcgtactgtcccgatggcccgcacgaagcagacggcgaggaagtccactggcggcaaggcgccaaggaagcagctggccacgaaggcggcgcgcaagtctgccccggcgaccggcggagtgaagaagccccaccgtttccgccccggcaccgtcgcgctccgggagatccgcaagtatcagaagagcacggagctgctgatccgcaagctgccgttccagcgcctggttcgtgagatcgcccaggacttcaagaccgaccttcgcttccagagctccgccgtcgctgcgctgcaggaggcgtccgaggcctacctcgtcgggctcttcgaggacaccaacctctgcgccattcacgccaagcgcgtcaccattatgcccaaggacatccagctcgcccgccgcatccgtggggagagggcctaggcgtcgtcgcggtggaggtcgaagtagtggtcgcagtttctgtcatccccgtctggctagaaggtgtagagatgtgccgggttctgtagtttgggttatcggtcgaatcatgatgtagttggttcttcccagctgtaatttaactatgacgatgccatggcaatgaagttctcagctatcagttcccg

SEQ ID NO: 4046 - DNA, 1072 bp, Zea mays
  Clone ID: 700347587_FLI
gttttcttctcccgtccaccttgcgtgctcgcgcgcgagctctcgtggcgcagccacaactaggcgaccgccgccgcccctacgccacgtgctcgagtctagcctcgtcgattgcttccccagtttaattgatctacaagcttcagaacatgttcaagaatacatttcagtctgggttcctgtccattctttatagcctcgggaccaagccattgcagatatgggataaggaagttgtgaatgggcacattaaacgaccccaagatgaagatatccaatctaatgtacttgaaattgttggaacaaatgtacagtcaacttacatcacatgcccagctgatccttctgctactcttgggattaagcttccatttctggctattattgtgaaaaatcttaagaaatacttcacgtttgagatccaagttctggatgacaagaatgtccgacgtcgatttcgagcatcaaattttcaatctgtcacaagggtgaagccatatatctgcacgatgccgttgaaactcgacgatggctggaacaacatccagttgaaccttgctgatctgacaaaaagggcgtacggcacaaattacgtcgagacgctgcgggtgcaagttcatgcgaactgccggctccgcagaatctacttctctgaccgcctctactcggaggaggagctgccgcctgagttcaagctctaccttccaatccagaaatcataggatcccgagggcgtggagagactctggtgaccgggagacttatatcgtaccattgtgaggataacctagctgcacatctgcgccttcctgagatacagaaaaaaaatgtaccagaatgtttctgttagttttctgattgttgtgcgatgaatgattaggctgttctgttttcatagcaagggcgagtagccttagttggggctgttacccagtgacccctttgtgtgaacgagtagtcaatgttattagtccggaccctttggctactggtccttctggtccaaagcaaaacgtaccgttactgctcactgcctggtcatttaacgtgcttcttccatggttgtaccgtc

SEQ ID NO: 4047 - DNA, 1099 bp, Zea mays
  Clone ID: 700347604_FLI
caatacataccttgccagtaccaatcttgtgaatgacagaaacacaaagcatatttattttctgatggactgcctggtagagctgtattctcttgatgttcagaaatcatatgagagggcaataatctccgtggagcaactgaatgctattcttagacaggcttctaaaaccaaggaaaaggaagatctcaggaagatagataactggcaatatattagttgtgtcaacctatgggttcggtttctgtgttgtcactataaggattacaatctccatcccttattttctcaagttcttcaagtaataagaggagtggctcacttattcccaggcacaaggtacttaccgttgagactgaagcttgtgcagatgctgaacgagctttccacttgcagtcagatgttctatccaattccatcgttgctctttgactgcctagaattaagagaagtttctcagaaagaacaaacacaaagaacaaagatcaacttttcgtcgttgttgaaggtgccaaagaacctgctgaaatcaagggattttcaagaggagtgtattctttcagcgattcagattctatcagcacattttgcccagtggagttaccatgtttccttcccagaagtagccaccattcctcttgtcctcttgaagaggctacatgagcagacaactgttgaatcacttcgccgtcctattaagcgtttgatagaccaggtgacggagaacaaggattttatagaaaggaaaagagaggttgtatccttttcaccaaatgataaggcgtcagttgatagcttccttcaggaggagaaggtcagcagaaccgcttcattcactcggttctatgcatccgtagctgaaaaccgtcaaccaaaatggagaaaaacactttaaaataccaagggaatttctgagagacatctggaattggttggtttccaagtgagggccacgaagaaccacatcaatgtagaacattttagtgcagatatacgccgaggcagctattgtgtaacctctagtgagactgattcctacgagtcctcgagtgctcaacaattttgtacgattgtaaccttaattccgaagtgagttgtc

SEQ ID NO: 4048 - DNA, 814 bp, Zea mays
  Clone ID: 700347658_FLI
attgcagggagagaaggacgacaagatcatcgccgtctgcgccgacgaccccgagtaccgccactacaacgacatcagcgagctctcccctcaccgcctccaggagatccgccgcttctttgaagactgtacgcgcgcttgctctctctctctctctctctctctctctctctctctctctctctctctctctctacatctcgctgctcgctaagtttccgcgcggtccttgctgggatcggacgctcctcccttcaactgaccgtgtggttgttttgtttcctgctctggctaaattccagacaagaagaacgagaacaaggaggtggccgtcaacgacttcctgcccgccgccgctgcccgcgaagccatccagtactccatgtaaagtcgtcctgctcatttatctcgtgtatggacgacatgatgaaaacgaggtggaactctggcattcgtgttgacatggacgatcttgttgcttctgtacgtgcagggacctgtacggccagtacatcatgcagaccctgcggcggtagagcgttcctaccagatcccatgccagctgagctgacgcaagagcacagatcgacagaatccttgtggtctcgtctcatgcatggatagccagatcacatgagttgtcgacgaccatgcatctcttcttcccagcgatatatattttagcctgtatcttcccttatttatagtcttttgggtttggtggaatctgtccactgtgtggtttgatctatgtactcctttttctacatttttcacaaaacgaatcgatgagattaataatattgttactact

SEQ ID NO: 4049 - DNA, 1350 bp, Zea mays
  Clone ID: 700347688_FLI
ccggaccctccggcggggcagcccactctacgtccaccggtggtgggggtggctcgccttccgacaggggcggccccgcgccctcggcctcggcgtcggtctccacgccagccagcgagagcaccgtcgcccgccgcctaaacggacttgacccccacggcgacgacgctccatcgtcgcagccagccacgagcaagaagaaaaagagaggggcacgagcagttggtcctgacaaaaatggccgtggattgcgtcaatttagcatgagagtatgtgagaaagtcgaaagcaaagggagaacaacctacaatgaggtggcagacgaactggttgctgagttttcagatcccaatattaatattgactctccagatcctgataattcgtctgcgcaacaatatgatgagaaaaatatccgaagaagagtttatgatgcgctgaatgtcctaatggctatggaaattatatctaaagataaaaaggaaatacagtggagaggtctgcccaagacaagtatgaatgatattgaagaactgaagacagaggtcaatggactgaaaggtcggattgacaagaaaaatgcatatctgcaggatttacaagatcaatatgcatgtctgcaaaacttggttcggcgaaatgagcagctatatgggtcaggagatgcaccttccggtggagtggccttgccatttatactagttcagacacgtcctcatgcaactgtagaagtggagatatcagaagatatgcagcacgtgcattttgatttcaatagcactccatttgagttgcaggatgattcatttgtactgaaagcaatggcattatctggcgaagaaactgattgtacccaagctcctggtgcgaatggaggcgagtgctcaagtacacggaacaattattggcaccaccaccaacaaccgcagcctccagggccaagagtagttagggtaccaaactcgcctcctattccagggatactaaaagggcgtgtcaagcatgaacactaggcttcaatatgcttagtggtgtcaaatgagctatttactttattgtccccagctagttttacctgtagaaaatgcatgtaaattatgcctgtaggggcagccgcagtctaatttgacttcgctgatggatagttcgatttgtgtcatgatatgccatacgcctagctcacgttaactcctagtattcagttgtttggtcgaggaaaagagtctgtggttaagtgtaattgtgtagtttatcttcaaacagtcggcatatcgtatctatgggacgatttgaggaacagtgttgtcagtacactccaattgatatacaataaaatgcaaatgtttgttt

SEQ ID NO: 4050 - DNA, 500 bp, Zea mays
  Clone ID: 700347701_FLI
ttctgccgccatgggtggtctctgggctgtgcgccgccatgagcttggacgcgaccagctttgatctgacgatcgccacggagccgtcgtcgatgggcttgaacgtggctctcgactccatgggcaccaccaccacggatgtccagcctgaaggatccaccccctccagctgctctgcgcccacgacgcccttggtgggtgccgttcctgacgcggccctcgtccctgccctgcactccgcctcgctgcgccgcctcacctacacggacggcggcgggtacgttgcgcacacaaccgtgtgagcgcctctgagcttgagagcccggccctcctcggtatgcgcagcgcagcgcaggcttgttcttttgagaatttggagcctgccctggcctttgtcgtacaaggacgacgtgtcgttacacgcttggttgggttggatggtaactaaactatgaggccagacttcttctggtggtctggaaaaggaacacttatgcttg

SEQ ID NO: 4051 - DNA, 1193 bp, Zea mays
  Clone ID: 700347721_FLI
cgcagacggaggacggcgcctgcgtcaccttcgtcgggcccggcggcgccggcaacttcgtcaagatggtgcacaacgggatcgagtacggcgacatgcagctcatcgccgaggcgtacgacgtgctccgcaggctcgggggcctgtccaactccgagatcgccgatgtcttcgctgagtggaacaggggggagctcgagagcttcctggtccagatcaccgccgacattttcaccgtggctgacccgttggacgggagcgggagtggcggcggggcgctggttgacaggattctggacaagactgggatgaaggggaccgggaaatggaccgtgcagcaggcggcggagcttgcggtggcagcgcccacgattgccgcgtcgctggacgggaggtacctgtcagggttgaaggacgaacgggtcgcagccgctggggtgctggaggaagaggggatgccggcgggcctgttggagacggttaatgtcgacaagaaggtgctggtggatagggtcaggcaagcgctctacgcctccaagatttgcagctatgcgcagggcatgaatctgctgcgagccaagagcgtggagaagggatggaaccttaacctcgcagagcttgccaggatctggaagggcggctgcattatccgtgcgaggttccttgataggatcaagagcgcgtacgacaggaatcctgagctcgccaatttgattgttgacagagagtttgcaagggagatggtgcagcggcagaacgcgtggaggtgggttgtggcacgcgcggtggaggctggcattagcacgccaggaatgactgctagcctttcgtacttcgatacctacagatcaagtcgattgcctgcaaatctgatccaagcgcagagggatctgtttggtgcacacacctatgagcgcattgactgtccgggttcattccacaccgaatggaccaagctggcgaggaggagcaatggcgcagccatttgaggaattggttggtatgagaagggatgttttctgctttgtgtgatttctctctgtgggttatcttttgttttactattgttatctttatgcttctagatccaagtcgagtacttcaaataatgctgtactgtatggttggcaagtgaagaacattgtgtagcttcagttttactgtgatgtaggtacacacagtttgattctctt

SEQ ID NO: 4052 - DNA, 1608 bp, Zea mays
  Clone ID: 700347769_FLI
gtcaacttgcccaacacccctgcagtgttggacgcagggaatacttgaaaccccggctcccgatggatcatggatctcctctctgctgcgtacggtgctacctctgacgatgaggatgccgcggaccgacccttctccatgccggttgccaccaggtccgcctccttctctccacctcccatgaagccgccgcggtgggaatctcacccatacctccctccaacccactgcttcccgcaaccacctctgcccgacgcagcgctgccactggcatctccatccagcggcagatacatttccaagagggagcgcgctctcctggcctcatcaggggcacatattgaatccggatcatccctgcctctgacgagagtggattttgaatctgcagttggctctatcacctatccaaatctacgagctgacattttgcattctttgcgatgccaaccgaaacctggaccaagcacaagtttccctttgaggctctcagtttgtttgaagggtcacactaaagcaatcaattgtgtagattggtcaccgactcatgggcatcttcttgcttctgctggaatggatcacacggttcatgtatggaatgtatgggacaaagggaataccactgctcgtgttttgaaacatcacactgctgctgtaaaggatgtaaggtggtcacttcataggccctttttactttctggagggcttgattgttccttacagctagttgatgttgttgagggaaaagtaatggaagtattcaaggaggatcaagctgtggaggttatcaagttcaatccaagcaaccccgatctcttcctatctggtgggtccaagggttcccttaaactctgggatattcgatgtggtctggtaacaaaagaatttcagagaagccttggaaccatccttgacattgacttcagtgctgatggaagacaatttatctcttcaactgacacaaccagaagcaatattagtgagaacactataattgtttgggatgtcctgcgacaagttcctttatctaaccaggtttataccgaagcattcacatgcccgtgtgtaaggtaccacccacgtgaagcatcatttgttgcacagtccaatgggaactacattgctattttttcagcaaggccacccttcaagctgaacaagtacacgcggtttgaaggacatggagtgtggggtttccctgtgaagtgcagcttttcccttggcgggagagaactcgcatctggttcatccgatgggtccatttacttctatgattacaggtcggcaaggcttttgaggaaaatagaagccttcaaagaggcgtgcactgatgtcgcgtaccacccagtaatgcctaatgtgatcgctgcttgtagctgggctggtgaaatatctgtctttgagtgacatgattataatgctgtgtggagaagcatcagcagttcagaaccgctagcatatatatgtgtgtgtgtgtgtgttctgtgactcaaacaccagttaatggtcatagcagattccaaaataaaaataatttgctgtatggagttcatcgtctgaatttcagtctcagcctcgcctatgaagagattatttgtggtttcaaac

SEQ ID NO: 4053 - DNA, 1834 bp, Zea mays
  Clone ID: 700347818_FLI
ctcaaatccgctctattcctctctctccctctctcccccatcgcaccagcaggcgagcgcgaggcggaggagtagagatggagtcggaccagggcaagcttttcatcggcggcatctcctgggaaacgacggaggagaagctgagcgagcacttctcagcctacggcgaggtaacgcaggccgccgtcatgcgcgacaagatcaccggccgcccccgcggcttcgggttcgtcgtcttcgcggatcccgccgccgtcgacagagcgctgcaggacccccacaccctcgacggccgcacggtcgatgtgaagcgggcactctcgcgggaggagcagcaggcctccaaggccgcgaaccctagcggtggaaggaactcggggggcggaggaggcggcggtggcggcagcgatgcaagtggtgctcggacgaagaagatctttgtgggcgggctgccctctactctgactgaggatgggttccggcagtacttcgagacctttggcatagttactgacgtagttgtcatgtatgaccagaacacacagcgcccacgtggtttcgggttcatcacctttgattcggaggacgcggttgaccgcgtgctgcagaagaccttccatgatcttggtgggaagctggttgaggtgaagcgcgcattgccccgtgaggcgaatcctggcggctctggtggtggtcgttctgggggaggtgggggttatcagagcaacaatggccataacaccagctctggtagctatgatggtagaagtgatggtggcaggtacgggcagacacaacagggtagtggtggtggtggctatcctggttacggtgcaggaggctatggtgctggggcagctggatatggatatggtgctaaccctgcagttggatatggaaattatggggctggagggtatgggggtgttcctgctgcttatggtggacattatggaaacccaggtgcagctggttctggttaccaaggtggacatccaggctcaaatagaggaccttggggcagtcaagctccatctgcatatggaactggagggtatggtggcagtgctgggtatagtgcttggaacaactcttctggtggtggcaatgctctgaatagtcaagcccctggtggacctgcaggctatggaagccagggctatgggtatggtggatatggaggggatccatcatacgctagtcacggaggatatggggcttatggagcacgtattgatagtgctggcaatcctgctactggtggatcatctggatacaatgcaggctatggaagtggtggtgccaactctggctattcaagtgcttggagtgatccttcgcaaggtggtggatttggcggttcggtcaatggaggtgctgaaggacagtcaacttatggcactggctatggcagtgtgcagcccagggttgctcagtgaagaggcattttgagtgtgcgaaatgaaccagtgcatctgggcagtctatgtattgatttgtcattccagtctctctggttgctctcagcattttgaagattgcccatttgctgcttaaatcagtatttatccgggttggaatgcttgatcctttagtggcttactactagaacgtctagtcaataagtagctaaaatgtggagtagcagtatcttgcggaatgcttttattaatttttacatttagctttatgcatctgtgtggtttgccatgagtggagtttcaggttgcttcatctctagttataagctagagtagcttgactacttatgggcaaaattatgtagttgtacctctattctacagatcatatatttgtgtttgacattagtatt

SEQ ID NO: 4054 - DNA, 886 bp, Zea mays
  Clone ID: 700347858_FLI
gtcaatccgagcttttgctgaggcttctatgacaactgcttatgagaagaaatggccactctaccttagcaccaaaaacacaatcctgaaaaaatatgatggcaggtttaaggacattttccaggaggtctatgaagctgactggaagtccaaatttgaggctgctggaatatggtatgagcatcgtcttattgatgacatggttgcgtacgcgcttaagagcgaaggaggctatgtgtgggcttgcaagaactacgatggagatgtgcagagtgatttcttagctcaaggttttggatctttgggtttgatgacatcagtgttggtgtgccctgatggaaaaaccatcgaagctgaagctgcccatggcacggttacccgtcatttccgtgtccaccagaaaggaggcgaaaccagcacgaacagcattgcttcgatctttgcatggacaagaggacttgcccacagggcaaagctcgacgacaacgctagactactcgacttcgctctcaaactcgaggctgcttgcgttgagaccgtggagtccgggaagatgactaaagatctggcgattcttgtccatggatcttccagcgtcacgagaagccattacctgaacaccgaggagttcatcgacgcagtcgctactgagctccgatcaagactgggagccaactgagcctacaagaaactttgcatggcgactttgaatgcttcgtcaccgtcaccgatctgctagtcgtcttttctgttatgaagaagtgaatgtgcgtcaccgcagtttcgatgcaagctaattatagatgtggtgtcacgtgagcgctcaaaataaaggatacacatgattaaattgtttttatgtcagtactaagctcagtcatccccc

SEQ ID NO: 4055 - DNA, 1503 bp, Zea mays
  Clone ID: 700347878_FLI
aacaggcgccagagtgggatccagcagttgctggctgcggagcaggaggctcagcaaattgtgaatgccgctagagctggtagtgttttctcatcttttttgttccaagccattgcagatctagcgtagcgttagacagcaacaaccttgtgaatgagttcgttccattcacttagacatctttcactgatcctcaattaatgtttgtagagcgagattgaaggtaatgcactgctacgtttctgaactgtagcaaaaaaaaaaaacggcatctcattaatgctgttactattgcattcccaacaaatatacagcacctgttctgggcaaaacaatctttagtctagaggggggaaagaagtttacttttcgttttcaagtatgcagaagcatgtttaggccctgtttggaacctctaaaactaatagttagctactaaaaattagttgttgggttccaaactccatcagctaattgttagctaccttacagctaacgattagttaattagctagctcaatccagctaatgatttatcagctgccaaactattagctcgaggtgttccaaacagagccttaactgtgaactgttttctggtgaaatgtaacaacaaagctgaaagctaaaggactgtgttctctctgcagtataaacttgaatttgtgtgttgtacagctaagtcgcaataaaagaaggggttgaaatcttgcttttatgggtcccattagcaaaaacatatttcattgtgaaccatgtgttgtacaaatgtcttttaaacttgttggcaaattgtcagctaataggaagctaagaagctgaccctttatccccctcccttcctgttaaggtcttgttcggttaatcctgttacccatggattggatgagattagaaaaatttaagaagaaatttgacttgcttgggatttaaacccatccaatcccacttaatccacatggattgagagctaaccgaacaaaccctaatagttaatactgaacatgaatgtttcctgtgtccaatagccaagtcagcgaggctcaggcaagcaaaagaggaggctgagcgggaaatagccgaataccgtgcccagatggaggctgaatttcagaggaaggttgcagagagcagcggcgactctggtgcaaacgtcaagcgtctggaggaagaaacggcggcgaagatcgagcaactcacccagcaggccgcaagcatctccccagatgtcattcagatgcttctgcggcatgtcaccaccgtcaagaactgaggaatgctgttcccgaactatgctcgcagacttgtaccgtcgatctatttatttttgtgagagtgagagtggtgaggaataatatgcccgcttgtatccataattcctgttcttaactacggaataagccgcagcagctttagcggcaaacgtgactagtactgtcagaacctaccattgttatttggtacaattggtaaataatattgttttaaactggattttcgaac

SEQ ID NO: 4056 - DNA, 1254 bp, Zea mays
  Clone ID: 700347978_FLI
cggcctcacccgcaagcgccgcctcatcgcgctcctcaggcgcttcccgggcgtcttcgacgtcgtcgaggagggcgtctactccctccgcttccgcctcacgccggccgccgagcgcctctacctcgacgagctccgcctcaggaacgagtccgagggcctcgccgtcgccaagctccgcaagctgctcatgatgtcgcaggagaagcgcatcctcatcgagaaggtcgcgcacctcaagcacgacctcggcctcccgcccgagttccgcgacaccgtctgcctcaggtacccgcagtacttccgcgtcgtccggatggaccggggcccggcgctggagctcacgcactgggaccccgagctcgccgtctccgcggcggagctcgccgaggaggagagccgggcgagggaagctgaggagaggaacctcatcatcgaccgcccactcaagttcaaccgtgtcaggctccccaagggcctcaaattgacgcggggggaggccaggaggattgcgcggttcaaggagatgccctacatttccccatatgccgacttctcgcacctgcgctccggatcagacgagaaggaaaagcacgcttgtggagtggttcatgaaattcttagcttaacggtggagaagcgcacgttggtggaccacctcacgcacttcagggaggagttcaggttctcgcagtccctgcgcggcatgatcattcgtcacccggacatgttttacgtatcgttcaaaggggatagggactcggtcttcctccgtgaggcgtacaaggactcgcagctggtcgagaagaaccagctggtgctacttaaggagaaaatgagggctcttgtggccgtaccacgcttccccagaagggccgcagttgggactggcgaggaggctgagggaatgaatggatcattgcagtcgcgggaccaagtgagtgacgaggaatacgacgatgaagatgaggggctctctgatatggaagatctgattagtgagctttctggtggcaaatcggatgctgactacgagtggggtgatggctggtttggtgagaacgatgactcaccgccagactttggagacgacgaagtcaaggtcgccatgaaaattgctgatggttctgccaacggcagcgcacctgttcctgtatttcctgatggcagaccaagggaacggtggtaaattgaggtgtttttgaacttctgattgatagaatcgttaatctataatcttagttcttttatcat

SEQ ID NO: 4057 - DNA, 1524 bp, Zea mays
  Clone ID: 700348006_FLI
gccaaaaccctagctcgccctccccaattccccatttcggccacaccctccttgcctccacggctccacccctgcttcaggttacctgtgccagcgacgccggtagaagccatggacagctctctcgcgagcgcggcggcgatagccgatcagcgccagaagatcgagcagtaccgccacatcctcgcctccgtcctctcgtcttccccaccggacatctctcaggccaagcgcttcctcgaccacatggtttcggacgaagttccgctcgtggtgtcgcgtcaattgctccagacgttcgcgcaggacctagggaagctggagtcggacgcgcagaaggaggttgcccactacgcgctcacgcagatccagccgcgtgtggtctccttcgaggagcaggtggtagtgattagagagaagcttgcagagctatatgagtctgaacaacaatggtcaaaagcagcacaaatgcttagtgggattgacttggattcaggaatcaggatgcttgatgacaccaacaaattatccaagtgtgttcaaattgcacgactctatttagaggatgatgatgcagtgaatgctgaggcttttataaacaaggcttcatttttggtcaccaacagccatcaggaggttctaaacttacagtacaaggtctgttatgcaaggattttggatctgaaaagaagatttctggaagctgcacttcgatattatgacatttctcaaattgaacaacgcaagattggagacgaagagattgatgaaaatgcacttgagcaagctcttagtgctgctgtgacatgcacaatattggctggtgctggtccacaacgctcccgtgttcttgctactctgtacaaggatgaaagatgctcgaagttgaaaatatacccaatactgcagaaggtttaccttgaaagaattttgaggaaaccagaaattgatgcatttgcagaggagcttaggccgcatcaaaaagctttattaccagataagtcgactgtgcttgaccgagcaatgatcgagcataatctccttagtgccagtaaactttacacaaatatcagctttgatgagcttgggacattactggggattgatccaaggaaggctgagaagatagcatctcggatgatttatgaggatagaatgcggggctcaattgatcaggttgaggctgtgatacattttgatgatgacacggaagagctgcagcaatgggatcagcagattgctggactgtgccaagccctgaatgacatccttgacagcatgtcaagcaagggaataactattccggtgtgaataaatatctcatgctgtcggtcgatggtgcatggcagaactgctaacatgccccggaatctagaatcaacattttgtatagtttgcagctgcaaatgtgtatcttgtgattttggggggaggatgcttgtttaagtaacgctcactggataccctgtagcactactgtttcaagagcgctcgaatgattcagtaagggctttcggtttcatc

SEQ ID NO: 4058 - DNA, 687 bp, Zea mays
  Clone ID: 700348029_FLI
cttcgtcgatctcaccaccgcgccgaccccgatggcctccgccgcctcatcggccgccgccgctggcaaatcgctgttccaggggttccgcaggttcctcaaaaagccgtgggagatcacgggcccctgcgcctcgcccgagtaccgcagcgcgctgcctggcgcgctcgagtaccgcgtcaagtgcccggccaccgtgcgcgacgaccgcgacaaggccatcgtgcccacatccgatccggagacagtctacgacatcaagtacttcacccgcgatcgccgccggaaccgtccgcccgtgcgccgcaccctgctccgcaagcccgacctcgagcgctacatggtcaccaagcagtttgaccccaccaaggacttccccgtgccatacgtcaacaccactgtcgaggaggacgacaacacggtcggcggtggctaccagaaatgatccaggaaagcttactgatttgatgctggttaatttgccaggcatccttgttgtgcttggactccatgagcagctgcacaaatttcgtttcagctttcaaatatctcctttttctgcaagttttctggttgtaaaagatgatggtggcaataatatggtacttgagctcacaggatgcacatttcttgtaacctgtattccaaaactttatctacctgaaaccatagttactgtttaagaat

SEQ ID NO: 4059 - DNA, 852 bp, Zea mays
  Clone ID: 700348032_FLI
gtcatatgtatcgaatgtaaactggatgatgaaccgtgcattatttacaagccattgctatctgtcatgggggtttgtctggccatacattatggctttggtccatgttttagctgctcttcgggcaccgtacagcaaagttgtaaaggaagcatccgattcatcttggggtttgttcctggtgggcctcttgttcacatgcactctgatcgagctcgtttcaatgtggaatttgactaaggtggaaattcaactgtgcaatatgctgtctcctgaaggaccgaaagtatctcttgattcatacaactgggggctcgtgttcatcgctgtgttggtagacaacttcctctatccagtatccgcaatccggtcgcatttctcccaatcaatcaactggtctggcatccggtactacttgagggacgggaaaataagcaagatcgagagagagaacagttcgaagtacactgatcttggagggaagcatctatacggcaagaggacataccctcctaacaaatcgttgctcggttacctgtcaagaactctagtgcaatggcatcagccaaagaaatatgacgtataggaaggtcgaccgggggagattcagccctcgattgtgtggggggcttcttgttgtacacctcttttggtttcaactttctttcatgcctctctctctctctctctcctctctgattgtttagtggttattaggttcattcatattaaattttgtggtgttcaatcggcgccaccactttgaaagggttgcattgcacctcatagttctttgtaacactagagatatgtaacgatttggctgaagaagtgaaatgttccatgttggtg

SEQ ID NO: 4060 - DNA, 3487 bp, Zea mays
  Clone ID: 700348044_FLI
gtcatcagggtcaacaacattcaccaagatagtcaataagtggaatacagctctcattggccttatgacatatttccgcgaagcaactgtccatacccaggagcttttggatttactggtcaaatgtgaaaacaagatccagactcgtataaagattggcctgaattcaaagatgcctagtaggtttcctccagttattttctatactcccaaggagattggaggtcttggaatgttatcaatgggccatattcttataccgcagagtgatcttaggtatagcaaacagacagatgttggtgtaacacattttagaagtggtatgagccatgaagaggaccagcttattccaaacttgtatcgctacatccagccatgggagagcgagtttattgattcacagcgtgtttgggctgagtatgctttgaagaggcaggaagcacaatcacagaacagacgattaactcttgaggatcttgaagattcatgggatagaggtatacctcgtatcaacactcttttccaaaaagaccgtcatacactagcctatgacaaaggatggagagtgagaacagattttaagcaatatcaagtgttgaaacagaacccattctggtggacacatcagcggcatgatgggaagctttggaatctaaataactacagaacagatgtcatccaagcacttggtggtgtagaaggcatcttggagcatactttatttaaagggacttacttccccacttgggagggtctgttttgggagaaggcatcaggtttcgaagagtcaatgaaatacaagaaactgacaaatgcacagcggtctggtctcaatcaaatccccaatcgaagatttaccctgtggtggtcaccaaccatcaatcgtgcaaatgtctatgttggtttccaggtccagctagatcttacgggcatattcatgcatggtaaaatcccgacattgaagatttctctgatccagatcttccgtgcacatctgtggcagaagatccatgaaagtgttgttatggatctttgccaagttttagaccaggagttggatgcacttgagattgagactgtgcagaaggagacaatacatcccaggaagagttacaagatgaacagttcctgtgctgatatccttctctttgctgctcatagatggcagatgtccaaaccaagcttagtttctgagtcgaaggatgtatttgatcagaaagcaagtaacaagtattggattgatgtgcaactgcgttggggagactatgattcacatgacatagaacgttatacaagagccaagttcatggattacacaacagacaatatgtccatatacccatcgccaactggtgtgatgattggaatcgatctagcgtataatttgcactctgcttttggcaactggtttcctggatcaaagccactacttcagcaggcaatgaacaagatcatgaagtcaaatcctgctctgtatgtcctgagggagagaataaggaagggtctgcagttgtactcttctgaacccactgaaccatacctgtcttcacagaactatggagagatattcagcaatcaaatcatatggttcgtggatgatacaaatgtgtatcgagtcactattcacaaaacatttgagggtaacttgaccaccaaaccaattaatggtgctattttcattttcaatccaagaacgggtcaacttttccttaaggttatccacacaagtgtatgggcggggcaaaagcgtcttgggcagctcgccaagtggaaaaccgctgaggaggttgctgcattggttcgatctcttcctgtagaagagcagccaaagcaaattattgtgacaaggaagggcatgttggatcccttggaggtccatctacttgacttccctaacattgttattaagggcagcgagctgcagcttcctttccaggcttgcttgaagattgagaagtttggtgatcttatactgaaggcaactgaaccacaaatggttctttataatatatatgatgattggttgaaaagtatatcatcatacacagcattctcccgcattgtgcttattctacgtgcacttcatgtgaataatgagaaggcaaagatgttgctcaaacctgacaaaacaattgttactgaaccacatcatatatggccatctctgaatgatgaacagtggttgaaggttgagtgtgcactaagggacctcatcctttctgattatgcaaagaaaaacaatgttaatacttctgcactgacacaatctgaaatgcgagatatcattcttggcgctgaaattgctccaccatcacagcagaggcaacagattgctgaaattgagaaacagtcaagagagactactcagttaactgctgtaaccacaaggacgacgaatgtgcacggagatgaactcattatcacaaccacaagtccatatgagcaacaagcattcgcatcgaagactgattggcgtgtcagagccatctctgccacaaacttgtatctacgtgtaaatcacatttatgtcaattctgatgatataaaggaaactggctacacttacattatgccaaagaacatattgaagaaattcatatgcatagcagatctgcgtacacaaatcgctggattcttatatgggctgagtccacaggacaatcctcaagtcaaagagattaggtgtatagccatccctccgcagcatggaacacaccagatggtgactctgccatcaaatcttcctgaacatgagttccttaatgatcttgaacccttgggatggatgcatacacaaccaaatgaagctccacagctatcgccacaggacctgacatcacatgccaagattctggagaacaacaaacaatgggatggtgagaagtgcatcattctgacatgcagcttcaccccaggatcttgctcgttgactgcttacaagctgacaccaagtggttatgagtggggacgcagcaacaaggacaacggaagcaacccacatggatacctcccaactcattacgagaaggtccagatgcttctgagcgatcgcttccttggtttctacatgattccggataacaccccttggaacttcaacttcatgggagtgaagcacgacccacagatgaagtacaacatgaagctgggcatgccccgggacttctatcacgaggaccacaggccgacacacttccttgagttcagcaacatcgaggagggagaggtcgctgaaggtgatagggaggacacattcacgtagggcgctgggcgcctgttttagaaactcagtatctcaaacgcactttagctctgttttgaatggcaatgtgtgaaagctgtaacctgactcgacgggtgtcatctgtttttttggcttaatcctgtatcataccttgttgtaagacagccctggagaggggtaaaaaattgtacaagtgcacgccatggcaacagtaaagattttacttagtagctatgctattct

SEQ ID NO: 4061 - DNA, 1655 bp, Zea mays
  Clone ID: 700348076_FLI
cgcagagacaggcgtcttcgtactcgcctatctccgcgactcaaagctttccccaattcccccccttctcccatttctcaccaccgccgccgctccccccgttcaacaacaccatgagggagtgcatctcgatccacatcggccaggctggtatccaggtcggaaacgcgtgctgggagctgtactgcctcgagcatggcattcaggctgatggccagatgcccggtgacaagaccattgggggaggtgatgatgctttcaacaccttcttcagtgagactggcgctgggaagcacgtcccccgtgctgtttttgttgaccttgagcccactgtcatcgatgaggtgaggactggcacctaccgccagctcttccatcctgagcagctcatcagtggcaaggaggatgcagccaacaacttcgctcgtggtcactacaccattggcaaggagattgttgacctgtgccttgaccgcatcaggaagcttgcagataattgcactggtctccagggcttcctcgtcttcaacgctgttggtggaggaacgggctctgggcttggttctctcctcctggagcgcctgtctgttgactatggcaagaagtccaagctcggtttcaccgtgtacccatccccccaggtgtccacatccgtggttgagccatacaacagtgtcctgtccacccactctctcctcgagcacactgatgttgctgtcctgctcgacaatgaggccatctatgacatctgccgccgctcccttgacattgagcgcccaacctacaccaacctcaacaggcttgtctcccaggtcatctcatccctgacggcttccctgaggttcgatggtgctctgaacgttgatgtgaacgagttccagaccaacctggtgccctacccgaggatccacttcatgctttcgtcctacgctccagtcatttctgctgagaaggcctaccacgagcagctgtccgtggccgaaatcaccaacagcgccttcgagccatcctccatgatggccaagtgcgacccccgccatggcaagtacatggcatgctgcctcatgtaccgtggtgatgtggttcccaaggacgtgaacgctgctgtggccacaatcaagaccaagcgcaccatccagttcgtggactggtgcccgactggcttcaagtgcggaatcaactaccagcctcccagcgtcgtccccggcggtgacctggccaaggtgcagcgtgccgtgtgcatgatctccaactccaccagtgttgtggaggtcttctcccgcattgaccacaagttcgacctcatgtacgccaagcgcgccttcgtgcactggtacgtcggtgagggtatggaggagggcgagttctccgaggctcgtgaggatctggctgcgctcgagaaggactacgaggaggtcggtgctgagtttgacgagggtgaggacggcgacgagggtgacgagtactagacgctctactggcgcggcgtcgtcgggcttgtgtgccactgctatcctgtgatctgccctgagtggctcctatcgtgttatgtttctgtcggttcttatctatctgtcgttgtgtggtttacaacttacgttgtaagactttattcccccgctttgctactgggttattaagtttggcgttattgt

SEQ ID NO: 4062 - DNA, 563 bp, Zea mays
  Clone ID: 700348078_FLI
cctcaaccaaattcaaagtcacagcggcgaaactctcggcgatgtctggccgcggcaagggcgggaagggtctgggcaagggcggcgccaagcgccaccgcaaggtgctgcgtgacaacatccagggcatcaccaagccggcgatccgcaagttggcgaggaggggcggcgtcaagcgcatctccgggctcatctacgaggagacccgcggcgtgctcaagatcttcctcgagaacgtcatccgcgacgccgtcacctacaccgagcacgcccgccgcaagactgtgaccgccatggacgttgtctacgctctcaagcgccagggccgcaccctctacggtttcggcggttaggtcgcccctctcccggtggcgaattacgtggtggcggtggcggtcgtgttgtgttcttggtctagttagtctgtgttgtctttatcggtgctgttttctgtggtggttgtactgcatcgttctagtttctagtccatgtgctgtaatatctcgctgctgtaatcaatggaatgtcctcgtttcaagcctcatgacatatcgctcttttgt

SEQ ID NO: 4063 - DNA, 855 bp, Zea mays
  Clone ID: 700348104_FLI
gctcggccgaggagctggaccgctctcgcgggttccgctcctacggcggcggcggcggcttcggcgcaggcgctggaggggagcgccgcggcgggttcgacgacgagggccgccgcgggccgggcagaagctccgatcttgacatgacctcccgagcggacgaggctgacgactggggcgccactaagaagttcaccccggctcccgccgactccggccgccgcgataggttcggtgggccttcccctctcggccgcgctgatgatattgatgactggtcgcgcgacaagaagccgctcccgtcgcgctaccccagccttggttctgcaggtggcttccgtgactcgccgggcttccgcgattcatcagcttcttctgatgctgaccgttgggtccgtggagccacccctatgccacacaacggccagggggcgggggagaggccacgcatcgtccttaatccacctaaacgtgacccgtcagctgcctctaccccatctgctgaggtggctcgcaaccggccaagcccttttggggctgcaaggccccgggaggatgtgctagctgagaagggggtggattggaagaagtttgagaatgagattgagcagaagaccagccgccctaccagttcgcactccagcaggccgaatagtgctcattcctcccgccctgggagccctgggtcacaggtttcggccgttgggagtgaaggagcaccgagggcacggccaaaggttaacccatttggtgatgccaagccaagagaagtggtgttgcaggagaaagggaaagactggaggaagattgatgttgagctcgagcatcgtgctataaataggccggagtctgatg

SEQ ID NO: 4064 - DNA, 863 bp, Zea mays
  Clone ID: 700348129_FLI
gaacaaatcagatttgttcacaataaacttagcaagcttggcataaaggtaattgtcattcacaatctgatttggcggaaaaagatatcccagctttggctgatatagttggtgatgaggacaaggctaaagaaattgttgaagcagcaaaggcttcaatgggccaggatctgtcaccagttgatttgatcaatgtccagcaatttgcccaaagggttatgaatctctctgagtatcgcaaaaacctttatgaatatctcgtgactaagatgaatgatattgcgcccaacctgacatcattgattggtgaagtagttggagctcgcctaatctctcatgctggcagtctttcaaaccttgccaagtgtgcagcttccacccttcaaatacttggtgctgagaaggccctattcagagcactgaaaactcgagggaatactccaaagtatgggcttatattccactcctcctttattggccgtgcttcaaccaagaacaagggcagaatggctcgttacctggcaaacaaatgctcgattgcttcacgcattgactgctactcggaggctagtacctctgtctttgggcaaaagttgcgcgagcaagtcgaggagagactggaattctatgacaagggtgttgcgcctcgtaaaaatcttgatgtgatgaaagctgctattgacagtatggtcaatgacaccttaatggatgatgatggtaaggcagataatgagaaggcggacacatctgccaagaaaagcaagaaaaagaagaccaaaaccgagactgatggtgatgcaatggatgtggataagccctccaacgtggctgatggagaagctgagcttggaaccgagaagaag

SEQ ID NO: 4065 - DNA, 788 bp, Zea mays
  Clone ID: 700348162_FLI
ctttgaaagtgctaaggatatacccatgttcatttctgctaaaaattagcttcatatgcatcattgaaacttcataaatcaattcatcatctacaaccattcagcacacccttgccaacattcatgacacagaaagttagtgtagaaatatatggcagggctagagcatttcagttatactaccaggtacaaatacacaattattttctcttgtcactaacatgtgttacagaacattaaccatttattttactttacaatattttcttatgcacgatatctttgacgctgctggatggctcgcatgctcaatttacatgcattagaaattttttagtgcattccaattctatcaacctacaggtatccattctttccttttctatttgcatatatgtagcaacccacttttctatttgcatatatatatgtagtgtgtcttcagatatattgaattgtggtaatattattattattatccttttcgttgcagagcattccattaatccaaccttattccagagtagttctgtgcactttaaagccgaacgtttgtggatccagaaagaagaaaattttgtatgtatatatgtgtagatccaggtgatcgctattgttagcttttgtttacaatggtcgccacccaaaaaagttgtaactcgctcatttctagacttgtgaataatgttgttagcactatgtttgcttttgcagtgacactatctgacgcttgtaatgttgcttggtcatgaactgttgtcgcgctatgtaaagatctagacataatc

SEQ ID NO: 4066 - DNA, 1921 bp, Zea mays
  Clone ID: 700348167_FLI
gacacctcgtgccgccgcagcgcttgctttcgtcccccttacgccactcccacttggccacttcagccaccatctccctgaagctagtggctaacctcctcaccgccatgggcacccctctcctcatcccccttctcgtcaccctccagctgttcactacctcctcccccgcggtcgcgtcgtcacacatctccgccatcatctcgcagtcgggcctcgacttcgccaaggacctgctcgtatcccatgccgttgcgaccctcacgcccatgaacgtgccggacatcgagaggaccatgagcatacccctcgtgggcaccgtccgcatggccgcatccgggattgtgctccacggcctcgccgtcaccaactccaccgtcgctgtgggggacgcgggtgttgtcgtggccgcctcgttggccagcgcgaacctcaccatggagtggaactactcgtatgacgcctggattgtgaccatatccgacagcgggaatgcttcggtccaggttgaaggaatggaggttggtgtttccatggtcatgaagaatcagaatggatctatcaagctgtctgttacagaatgtagctgttatatggaggacttggacataacactaaatgggggagcatcttggttctatcaagtgtttatagatggtttcagtaatcatatcatatcatcggtggaaaatgcaattaagaacaaagtaatggaaggtgcactgaagcttgattctttcctgggaaacctcccaaagaaaattgatcttgatagtgttgctgcaatgaatgtgactgttgttaatgatccaatattcaagagctcctctgttgagtttgatatagatggcttgtttattccatctgatgaaactgctccgagagacatgcgtcttggagatacccaatttgcattacctcttgggagctcctcaaaaatgctttggatttcattggatgaagatgtcttcaactccgtttcagctctctacttcaaggctggtttgctgcaacggatggtggacaagattcctgatcagttttttctgaacactgctagctggagatttttggttcctcgattgtatcgagagtttcctgacgataatatgctactgaatatctctgcagtttcgcctccctctgtgagaattaatgtgggtagaattgatgccacagttgacttagatataacggttaatgttttggattttggtgagatagttccagttgcatgcttatcagtgtcggttgatgtttatggagctgcagcagtatcagagaataatcttgttgggagagtggaattggactatttctcatttaccttaaagtggagcaaagttggcaaactccacaccattctagtgcagactgtgctgaggattttgctgaaaaaattgtttgtaccatatgtgaactcgtatctcaagcatggcttccggttgcctatcatcaagggtttctccgtcacagatgcatatatcctcacttcttactcaagaatgattgttagctgcgatgttgccttcattgagccagaggttctgtctcctgtccaagagtccaacaccaacgaagatttgtcatatgaggttctgtctcctgtccaagagtccaagaccaacgaagagttgaccaacgaagatttgtcatttgaggttctgtccagtttactgcttggatctgccaaaacatcgcaaccaacagcgtaaaattcatgtaaatagtaaagctattcatcagtttattgctttgtaaaatgtgtaaataactgtgtattgtgtgtgtagtttttttaaaaaagtttaccatgtccctacatgagagcacctttctttttctttttcttcagcctcacgatcagacttcttattttgcttcgcttctctatgaatataagattggcagaattcctacc

SEQ ID NO: 4067 - DNA, 1037 bp, Zea mays
  Clone ID: 700348175_FLI
acccaaactgccatgcatgagaatagatagacagaaagaacaggaaccaaccaacacaagacacaacaagctgcagcagcggcaggcatggggcaccgcgccactgacaccgggccccaccaccattaccacccgacgcacactttatttagcccacgtcactcgcagcccgcaccggacacgtccacgcgacagtcactgctagctacgtaccgggctacgtacgagacacacacacacacagagagagacgccagtaataaccgtagcgtactgaacagcaaaatcccgtgtcatactgccatgtacgcgcgcgagcgactaccccgccacgcgcgcacgccgatcccctgggccctggccgccgccgctgcgtgcgcacggcctcactcgctggccttctcgggctcctcaggagcagcaacctcctccgcctcggcggccggctcctggggaccagcaggagcaggagcctccggctcgtccgcggcgagctcctcgggagcagcagcctctgcctcggcgaccggctcggccgcggcgggctcctcggcaccagcaggaggagcagcagcagcctcctcctcggcggctgcctcctgctcggccgcgggagtctcctcgggaccagcaggagcagcagcctcagcctcggcggccggatcggccgccgcgggctcctcggcaccagcaggagcagcggcctcgggctcggcggctgcctgctgctcggccgcgggaagctcctcgggatcagcaggagcagcagcctcagcctcggcctcggcctcggcctcggcgggggcagactcctcgggcacgacggccggcggcggggtctccaccacgggcgcttcctcggccgccacgacggtcggggtctggacctcggcagtggccattggtggcgatgagaaggctgatggctacacgaaggagtggcgcggctagctagagcctagagctaagagcctaagactgagtgaagggtggagctgcaagagtgagcgaccagctgagagtgagatcgatcgagc

SEQ ID NO: 4068 - DNA, 1052 bp, Zea mays
  Clone ID: 700348185_FLI
ggatgcgccatcgggacacgccgtcgtcatgctcatgcccgacgggcagaactccattatcatcgtgggcggggcgaacatggagggctgggcggcggggatcggttcggaggacctggaattgatccgaaaggcaggcgtgctgctgctgcagagggagatacccgattgggtcaacgcgcaggctgcccaggctgcaaaaagtgcaggagtgcctgttatcatggatgctggtggaatggatactcctttacctcgagaactactcagtctagtggatattttcagtccaaatgaaacagagctagcgcgtctgactgggatgcctactgagacgtttgaacagatcagcatggctgcaggaaaatgccataaaatgggtgtgcaagaagtactagttaaacttggatcacaaggatctgctttgttcgtcgagggagaggagccaatcaggcagccgatagttcccgccacagaagtcattgacaccacgggggctggtgacacattcacctcagcgttcgctgtagccctggtcgaggggaagcctaagagggagtgcatgagatttgctgctgctgccgcctctctgtgtgttcgagtaaagggggctatacccagcatgcctgacagaaaatcggtgatgaagcttctggaatctgtgggagtcgaatagccgcaaaaatggcgttggtcgtgcgaatttacagagcctcgttttggcggcgatagaggtgtctccggtacgcggaattcgtgggatccatcgactgccgcgacgccttcacgtgctccccgaataatgcgacggtctccatcctcgccgatcccggatgaaacaaacgcattttccggtgccgcccggatggaacccccggcccccacacaaaataagaaacggcatcttgtgcgtttattatggccacacgtcgcccgttgtagacgcactccctcccccggttccgtgaacgcaataaacagtttcacactgggccggagctatcgcacggtaactcaggccttgcccttgtgcaagccaatgtgtttatctg

SEQ ID NO: 4069 - DNA, 698 bp, Zea mays
  Clone ID: 700348186_FLI
attcactaccgccggcgccggatccaataggaggaggaggaagatgactgtgggcatgatcaacgcaaacccggtggtgcacgagcggccggagcgcgcctcgcacccccacgccgccgatgtgctcgaccctctcgatgtctttgatacggtgcgggacatcaaggacccggagcacccgtactccctggagcagctcagcgtgctgtcggaggagtccgtctccgttgacgagacgctcggacgcatccagataaccttcactccaactgtgcagcactgcagtatggccacagtcattggcctgtgcctccgacttaagttgatgcagaacttccctccacatttcaaggttgacatcaaagttgctccaggatctcttgctaatgaagaatcagtaaacaagcaactgaacgacaaggagagggttgcagcagccttggagaaccccaacctacgccagctggtcgatgaatgcttatgcttcaatgatccatactcacgttaacttgttccatgctgcttcacaagtcgcaaccctgcctgctgtacagtagtaaccatgcatgctgtagtctgccctatatgttgacgctgtcgttgtacctggcaacgtgtaattaactgccccggagacatctgtttttgccatctttaaaacgtatggatctcaataatatgacaagagttgcctgctt

SEQ ID NO: 4070 - DNA, 1698 bp, Zea mays
  Clone ID: 700348188_FLI
ggttacgttctgtttgtactttattgaagttcattatactattttcttttggtaaagttgttcgcatcaagtgcatgttgcattctttttagtttttaacggttctgctttcagcttgctcttgggtgcgtttattttttagctgtgtttccattcctccaactgtgttttcattcttcctttgttgaccatttcgattttgtggacaactaatttcctttgggtgaaatgatcttgacgaagttgagatttcgctttattttgtttatggacgcatcaagattctaacacgccgttatttttcttcgctggtttagtaatgaggaaatcccttttatggccctaattttagggtttagagttttaactgattttttttaaaaaagttgttcctctccggtcccaactccatactgtgtgtaaatttgtcgcatcgcttttttgttctggaaagctctaaaaacaaggaaattatttgcaccgttttttaaaaaaagatagcatcttgcacggttgctttttagagaaagaaaagtaaccaaattcggttttgtccaaattagtttcaatttgatactttctcaagttttacttcatgtttttattgtttgggtttactaaattgctggaattcctgaggcgcatacctactacaacaggttgcaaaacaatgacctccaactaatacaacccacaacagctgaagaagaaatccagctttctcaaccaccaaatttggaagacaagaccgttgaagagctgctcaacatagatccggatatgtttcccgaagaaggatgtactgttactatatcaagcatcgtgcaaaatagcagatggtggtacccatcttgctccaggtgccacaaatcttcatctcaaacctcaactggatatcactgcacatcatgtggctgcacaaatattaaatttagatacaagctcagcttcattgctactgatggaacatgcgaagcagagttcttttgttttgatagcatagccagaaaaatagtaggagaaccttggggcaaccttgttacagcagttacaacttctgagagtcccagcagccctagccgctattgtgtgtctgaaatttactcttgcagttgccatcaatatgtcagcctactatgtcacgaacagagtattctctattctatctattttaacaaatcatggaagacagaccttcataccatctaacatgcctagccatcctcaacaagagttgcatacacaagatgaagtacctagccttccgaccacacaagactctccagcaacatcaatggcaaaactatctacctgtagcaacgaaagaaacgagggtgatgatagcgcataagtgaactcaacaagcaagagatatcgtcaccaccaaaatggataaaacatagccacactagcaacggcataccagatcttacagaccccaaaaagaaaagctcctaaatcgtcatcaacttcgtgaaggtgtttgctttttgcgcacctatcaggagcaccatcacttttggaccatgaatgcttccctatagatatgaacctactgttagactatttgtggatatgtacatattgacttaacacctgcaagcacactgttgctaagtgttgatgtatgatagttgaatgctacttagtatgtattgtagtctaaatccactctacaactggtatcaactattacat

SEQ ID NO: 4071 - DNA, 1384 bp, Zea mays
  Clone ID: 700348213_FLI
ccctggaacggcaacgagacgtgggagctgggacgggcaagtagtagaaaccttctctccttccccagccaggacgccatacagaatccgacgcgatccagaagaagccaaggcctcttcagatcctcccgcctccctctgcgaggttcccagaccgagccatcgccggcgctaggctcggggatcttgtcgggtcccgtcccgtcctaccacttcgccggcgctgcgtcgccgtcactcgtcagtcaggactcaggatccccaagatggcttcttcaaacggtgaggctgagcaacaatggatagagaatatcaagtcaggaggaacagttccctgtctaccacctgaaaactgtcctaatggctgggctactcctcccggtgattcatttatggtcagaggcccagaatatcttacaaacaaggtaaaaataccaggtggagagtatcttctgaagcctctcggctttgattggatcaaaggaccagcaaaaatctgtgagatcctgaaagacagtaaccatcgagttagaaaagctatcgacgaggaggtttcacgtggtaaccggccttttgtctgggcattcaacttgcaactgcccaaggacaacttcagtgcaatattctacttcgtgtcgctggaggctatacctgaaggctcgcttatggaccagttcttgaaaggagatgatgccttccgaaactccaggcttaagttaatagcgaatattgtcaaggggccctggattgtccggacggctgtgggtgaacaggccatctgtatactggggagagccctctcatgcaagtatgttcaaggatcaaacttcatcgaagttgatgtggatatcgggtcttctatagttgcaaatgcgatcgttcatttggcatttggctatatcacaacgctaactgtagatttggcctttctcattgagagtcaaaccgagtcggagctccctgagagacttcttggagcagtaaggttttctgagttaaatccaggatcagctggtttgtttgaaaggcggtctgaagagcatcaggaaagcactcagtctcggcctgtaggattttggcagggtttctctcaactgttgaacaaccaaggcaatacaagggagccatcccctaatttacagaatactaatggaactttgcgcaaagaagaagcaaatgaggatgccaaatgattcagacccctaccattgtttcggggacaatttatcagtagatcacggcgttacaatttaccagatagtcccagggctttgtttctttgccctcacatctgctgtaaaaattataactttggccacagacaaactgcataactttgtacataaactgaatgcttcctaaatatttgttcccttatatagtt

SEQ ID NO: 4072 - DNA, 1957 bp, Zea mays
  Clone ID: 700348224_FLI
ctcaaacatgtgttcagttcccacttgagcttcttggttgcaatggcactgccattcatgcatataccgagacatctacaagctcacctcctgcgcaagaatcctcttacttaccaccgtagtttcaaaaaagacatttcaagccccaactccgtcctggagccacatagtgaagagctccacaagatacatcttggtctttcctctggtgtggaggatgcaacaaaatgggagcatataaacataaagagcatagaaccagatggtgcctatgtgattgctagccaactaaatctcgttgaggaacagcaagggggcagctatgttgctagccttgagttggagcttcagcaggcacgggatagagtgagcaagctagaagctgaacggctttcagccaagaagcaactgaatcacttgttcaagaaacttgcagaggagaaagcagcttggcggaacagagagcacaagaaagttcaagccattcttgaagatatgaaggctgatctggagcatgagaaaaagaaccggaggcagttggagactattaacttcaagcttgttgatgagttgaaagaggtcaaaatggccgcgaagcagctattgcaagagtatgacaacgagcagaagacgcgggaactcacggatgaggtgtgcaacaagctagtgagggagatagaggaacacaagtcagagatcgaagccttgaagcaggattctgtcaaactacgcggcgacctggatgaggataggaaattgctacagatggctgaggtgtggcgtgaggagcgagtgcagatgaaacttgtcgatgccaagctcattcttgaggccaaacatgaacagttgagcaaactgcaggaggaggtggaggctttcatttcgactttcagctcttccaaaggagacagcacaattgttgaagccgcacacaacattgtacaggccattgggtcggccagagaccaagaggttgaattcacatatgagccaccaagagcatcagaagatatactggccatctttgaagagctacgcccaagtgaagagatggagaaaaaggaaaccgaaccatgcctaaagcaagaaatccaagaagctagcccaacagctgatatatttctggaaaatcgagccagattgttcccagatggaagccattctgatgagagcgataaggaagatggaagcagctgggagaccatgagccatgaagagatgcaaggctcaagccattcgccgtatgaaagtgaacattcagtcaacaagatctttgacagaatttcgtggaccagtggaaacgattctgagggtgagcaggccaacaaactgtgtgatgacttgagcagtgtgtacctgacggacatggaacagtccaagaagaaagagtccgccatatcaaagctgtggaagtcatctccactgaaaaactgtgaattccgtacaaaagatgttgcggatatgataaatgggagattatcaagtgcaagtcttccaaatggtgtgtactctactgccaaaggcttgaatctagatatgggggacagcacccctagcaccacgcaatggagctcaccggattcgatgaacagccagctcaaccggggtttcagaggttgcatggagatggttcagaggcagagcctgaaggcgaagctccttgaagctcggatggagagccagaagattcagctccgccatgtgctcaaccagaaaacttaagttagaacctcactgtgtcgaaataaaattccaagcattggatttattacatttcccttgtccattgtagtatgtagcttagtctcatgtgtttctgcttcatagaactatatagctagctatagccttgtaggctgacctggccatggttgatgcagctgtctaattgtggcagtacatttgacaggttatgtgcccgtctttatgtgtaatgtggcagtaaactgtaaaccag

SEQ ID NO: 4073 - DNA, 902 bp, Zea mays
  Clone ID: 700348226_FLI
acccactctactactcgaagttactaccagcagcttgcttcaacagtagaagagagcgagaggatggcgtcaccgaagccctcgtcggcggccctgctcctcctggcggcggcggccgtgctggcgctggcgcgcgcggacctgacgcacgacaactgcgtgaagaacaagaaggtgacggtgcagaacctgtgcagccacgacgtgacgctgacgctggagccgctggccaacagcccgccgctgttcgcgggcacctacacgctgcacccgcgcagccacgccgagttccccgtgtgctggtggacggggcgcctgcgcgcgcccgacgccgcccaggtggagttccacgtcggcgtcgacggcggctccttctacctggcccccaacgcgcagccgggccagcgcgtcccggtctccgtcaccccgcacggctcgccgctgcagggccgctgccccgccgtcggctgcgccatccagggccgctgctccgtgcaccaggtgcccagcggcgactgccgcaacgtccaggagatgaagatcatctactgcaacccgcacgtgtgatgcgatgcggacatggggtcgtcgcgccatctcgcgacctgtgttgtgctttctttcatgtcgccgtcgccgtcgtgtgtccaaccgccattgtcgttaggttgttgttgattagccgtttgcttcgctcagtagcctcgctctccagtgtattatcactcgcatcgcatgcatgtgatgtgagccactgcacgcgtgagtgtcacatgagtcgtcgtcctgtctcgtctcatgtgtttgaaattgtaggcagcagaggatcgagatgcgtgtctgctttgttcgtgttcactgctgtcagtctgtcaccgagttcaataatttagctttgtttc

SEQ ID NO: 4074 - DNA, 553 bp, Zea mays
  Clone ID: 700348262_FLI
ggcgatgacagaggcagcgtccgcccacttttcccctcgcgcggccacgacggatggtagtcggatccgattgatcgacctggaagaatctccaccgtcctgctttaccgagcgagatgctcggatcctgcagcgaagggagagagtgcatcgccgccgccatccgtgtccgccagtgcttcatctccgaagcgtcgtctgaaggggatacatcgatgatcgatcgacacccagatctctcatacactgtctgcttctttggacctacaagttttgaggtgtttgtattttatggttcacacaacatgcaaagtggattggactaaggttctgaggatgcaactatggttgagcaaaaaactcgtaatccaaactcggaatacccaaatttcgtttggtaatttcgggtagcaacttataaagtacgaacttaatttaggtaattcaggtactcgaattttcatgtgtcatatactcatatcatttttaattaataatgtgcatgacttgtgattgtagattgactgttttatgtccatgtatatcattattc

SEQ ID NO: 4075 - DNA, 1459 bp, Zea mays
  Clone ID: 700348263_FLI
caacctcctctgcttccgagatctctccccacctcccggtccgctagcagatagcgggggccagagagatcgagatccggaggcgctagcgccacccatcagcgtctgcggcaatggcgggcacggtgacggtcccggggtcgtcgaaaccctccacgccgctgctcaaggacgagctcgacatcgtgatcccgacgatccgcaacctcgacttcctcgagatgtggaggcccttcttccagccctaccacctcatcatcgtgcaggacggcgacccgaccaagaccatcaaggtgcccgagggcttcgactacgagctctacaaccgcaacgacatcaaccgcatcctcgggcccaaggcctcctgcatatccttcaaggactccgcctgccgctgcttcggctacatggtctccaagaagaagtacatctacaccatcgacgacgactgcttcgttgccaaggacccatcaggcaaggatatcaatgctcttgagcagcacatcaagaacctcctcagcccgtccacaccgttcttcttcaacaccctgtacgacccctaccgtgagggtgctgactttgtgcgtggataccccttcagcctcagggagggtgcccacactgctgtctcccacggcctgtggctgaacatccctgactatgatgcacccacccagctggtcaagcctaaggagaggaacgaaaggtacgttgatgctgtcatgacaatccccaagggaaccttgttccccatgtgcggcatgaaccttgccttcgacagggatctcattggccctgccatgtacttcggtctcatgggtgatggccagcccattggtcgctacgacgacatgtgggccggatggtgtgtgaaggtcatctgcgaccacttgagcctgggagtcaagactggcttgccatacatctggcacagcaaggctagcaaccccttcgttaacttgaagaaggaatacaagggcatcttctggcaggaggacatcatccccttcttccagaacgtgaccattcccaaggattgcgacaccgtccagaagtgctacatctacctctctggacaggtgaaggagaagcttggcaagatcgacccctactttgctaagctcggtgacgccatggtcacctggatcgaggcctgggatgagctgaacccggctggccccgctgccgggaaagacaaggccaagtagatgggagtccctgggggtgcattcacttccctgctgaagtgaaaagaaagtatgattgggtccagcctaggctcccccatagatatagctctttttgagagggaagagggattaattcagcagcaggttctttttataaattctttggtggtatgaagcaggcggtacttttgtagttgatgaaggggatttgtcgccactgtcatttacataattcggacaataatttatattgtgtaatcttgagaatc

SEQ ID NO: 4076 - DNA, 540 bp, Zea mays
  Clone ID: 700348267_FLI
cgatccctctcctttgtcatctccgtctccatctcccaagcaccggagaggagagctagcatgcctggatgtccacggagagggagagactcgatgagatcgggaagatcaagcgagagccggatacagccgccctcgctgtcgctgccgcatccgcctccaccgtgccggccgacaaccacatcccacgccgcctcggccacggcggtgccctcaacaccttgacgccgtgcgccgcgtgcaagctcctccgccgccgctgcgcgcaggaatgccccttcgccccttacttctcgccgcatgagccccacaaattcgccgccgtccacaaggtcttcggcgctagcaacgtctccaagatgctcttggaggtggtggagggggagagggcggacacagcgagcagcctggtgtacgaagcgaacctccggttgcgggatccggtgtacggatgcatgggcgccatctccattctccagcaacaggtgaacgcgctggaggccgagctggaggcagtgagggccgagatcctcaagcaca

SEQ ID NO: 4077 - DNA, 2020 bp, Zea mays
  Clone ID: 700348302_FLI
ggcctaccgccttcttctcttgtctcgtcctcctcgcgactatggccgccgccgccgaggtagaccccagccccaacccgccgccaactacagcctccggcctctccaagaccaagacgcgggaggccgaccgccgccgacgccgccgcagcaaggccaagaagaacaagtccgtcactgaggctgatgcccaggacgctgacgggggagcttccagctccgacgccaaggagaacgccgatcccaaccccgagccacaggttgaggtggagatagagtacgtgccggagaaggccgagcttgacgaccctctcctggatgatttcaaggccatcttcgagaagttcaccttcaaggacgctgctgcagcggcggccgaggatgataagaaagacgagggtgccgctgatgccacaaagaaggggtcactggatgatgatgacgacgacgaagatgatgagcaggaggcaaacaagaagaaggacggaggcctatccaataagaagaagaagctggaacgcaggatgaagattgcagacctcaaacagatatgcaacagacctgacgtcgtggaggtctgggatgcaactgctgcagatccaaaattgcttgtatatctcaaggcgtaccgaaatacagtacctgtccctaggcactggtctcagaagcgcaagttcttgcaggggaagagaggtattgagaaacagcctttccagcttcctgacttcattgctgcaactggaatagaaaagataagacaggcttatattgagaaagaggatagcaagaagttgaaacagaaacagcgtgagcgtatgcagcccaagatgggcaaaatggatatagattatcaggttttgcatgacgcgttcttcaaatatcagacaaaacccaagctgtctagtcatggtgatctgtattatgaaggcaaagaatttgaggttaaactgagggaaatgaagccaggcatgctgtctcgtgagcttaaagatgctcttggtatgcctgatggcgcccctcccccatggcttataaacatgcagcgctatggtccacctccatcttatccccaactgaagatcccaggtctaaatgccccaatcccccctggtgccagttttggttatagaccaggggagtggggaaagccaccagttgatgagcatggacgtccactctatggagacgtttttggtgttctgcagcaggacgaacctaactacgatgatgaacctgttgatcgcagcaaacactggggagatttggaggaagaggaggaggaagaagaggaagaggaggaagaggaagaaccaatggaagacgaggaaatggaagacggaattcagtctgtcgataccatctcaagtactccaactggtgttgaaacacctgatgttatcgaccttcggaagctgcagaggaaggagactgacaagcaggcagaacggccgctgtaccaggttcttgaacaaaaggaagaaaggatcgcccctgggactctatatgggtcaagccatacgtatgtgttgggaacacaagataaatcatcagctccgaaaagggtggatctgcttaagaatcaaaagtcagacaaggtggacgtcaccatccaacccgaggaactggaagccatggatgatgttctggcagccaagtatgaagaagctcgagaggaagagaagcttcggaaccaaaaggaggacttcagtgacatggtggcagagaatgctcacaagaggaagaggaagcaagagaaggaaggcaagtcgaagaagaaggaattcaagttttaagggcaggcgggcgatgtaggtcatgaggcaccgttgtagctgttccaaatatgactggctgtatggtttagttgctgcgatcagacagttccgttccgtgttccaagttccaaccgagaggtcgggctcattcgcttggttaacacaaatgtcgctttggattttcactggaatatgcttaattactctgtaagaaatcgttgcgctgttgaaatatcacgtgctgg

SEQ ID NO: 4078 - DNA, 1569 bp, Zea mays
  Clone ID: 700348314_FLI
cagcgagcggcagctcctcctcgtctctcaaagtcgagccgccactcgattaagcgattccaaggcggagcggtgaggtggctatggagtacaggagggtgaaggatcaggagatttatgatgatttatctcagaaggatgtggaaagcctgagtgggaggacactatctagtgccaatactacagctattggtcccgcttctgcaggaggcgcaaaagccaactctagttggaagctaaagtctgttgttactcttgcattgacattgctaacaagttctcaggcaatattaattgtgtggtcaaaaagagctggaaaatatgaatatagtgtcacaacagctaatttttcggtggaggctttaaaatgccttctatcactagctgctctttttaggacgtggaactgccatggtgtcactgatgataatagattaaccacatcttttgatgaagttggtgtatatccgattcctgctgttctttacatggtaaagaacttattgcagtactatatctttgtctacgtggatgcaccagcttatcaaatcttgaagaacctaaatatcatcagcacaggtgttttgtaccgcatcattttgaagaaaaagctaagtgaaattcagtgggcagcatttgttcttctatgtgctggttgcacaacagctcaacttaatccttcgtctgaccatgtgcttcaaactcctattcaaggttggatgatggcaattgtgatggctcttttgagtggttttgctggggtgtatacagaagctatcattaaaaaacggccatcaagaaacatcaacgtgcagaacttttggctatacatatttggggtgatcttcaatctagttgcaatttgtgttcaggattatgatgcagtcatgaataaaggctttttccatgggtattcattcatcacagttttgatgattctgaaccacgcactgagtggaattgctgtttcaatggtgatgaaatatgctgataacatagtcaaggtctattcaacttcagttgcaatgcttctgacagcagttgtatctgtcttcttgttcaacttccatttatccctcgcattcttccttggatccacagttgttcccgtctcagtgtacctgcactcaattggaaaacttcaaccacagaaataaggtttgtttagtcactgattgctgactgctcctcgtctgttagtaatcactggataacacaggattggtgaagatggaatatgggattcattatcggtgtttggtgctttgaggctataagaaaagcttcagtggagatgagatttgattgcatagttgtgaaagttagtaggtggtcaaagtaagaaccagaaatgtatttttggaggggttctagctattatccggtctagtttttgttctattctatcaagtcgagttcgttgatcgctaaccgcatccgtgcctagtttttgatatatcaaacgcacatttattgtaatgctagtattttgaaatactaggtagtacccaattgttgtatggagctagttgtcttttcattctaatgtatagaattaccattcttttt

SEQ ID NO: 4079 - DNA, 844 bp, Zea mays
  Clone ID: 700348315_FLI
tgctgattgcagatctccaggtgggatatacttgcacgggcacagaaggatccagatctattcaagcctacaatgacctttaactcattgtgtttgttcagtgtcttctatcttgaagtagataatgatcggggcctttattgcaggtcttctcatatttttggatgagcttgtcacgtggaatatgtgttgagtaaacttatctaatttacaaaatgctagtatacgaaccatgataaaattcagataattcttatttaatctgcagtgatagaagacactgggcatgtttgggatgtgggagatttaagcagatatgggtagaactacagtactacagtctacaactttcatttaatcgaacttgtttctgcttcaactgaagctttaattcttgtgctgctggaatttctgttctgcagatcatttagctcaaataattggtagtccaacggtcacgatacttgttatggttagggatttctgtgcttttgtctactttatctatgttgttgtggttggctggttgcttttacatgtggttgtatggtaagtttggcaattggaaatccctgtagcgaaaaactgggccctggtcagaagtcattctggttgtgttggtttcatcacttgcttccagtgatttcagatctgaatggttggctaacattctgccctctatggatattgctggtatagcagtagtgaagcacaagatctggatctatttggtactgtatatcaaatgatcatagtatgtggttgtgtcctttatgtaccaagactatgtatcctcttaatgtatcgctcttggtaaccttttaatataaagcttcctttatcg

SEQ ID NO: 4080 - DNA, 1634 bp, Zea mays
  Clone ID: 700348341_FLI
acgctccctttcccttcctctacctcccctaccccgccgccccgcaatggccggcctcctccacctccagtccacgcttctaccctcggcatccgctctccgccgccgcgcgggcgcgccggtgccctgttcgtcccgccgccgatgccgggtcgaggccaagatccgggagatcttcatgccggcgctcagctccaccatgaccgagggcaagattgtctcctggaccgccgccgagggcgaccgcctctccaagggcgaccccgtcgtcgtcgtcgagtccgacaaggctgacatggacgtcgagaccttccacgacggcttcctcgccgccgtcctcgtgcccgcgggcgagtcagcgcccgtcggctccgccatcgcgctgctcgccgagtccgaggaggagatcccggtcgcgcagtcacaggcggcctccttctcctccagctccccctcgcctccgcctccgcaagaaactgctcaagaagcatcccctccgccgccgccgcctcctccctcagcgccggtggcagtctctgctcccgcgctaccttcgccagcaacacaaggcgggggacgtgttgttgcttcaccctacgccaagaagctcgccaaggacctcggcgttgatcttttctctgtcacggggtcaggccccggtgggcgaattgtagccaaggatgtcgaggctgcccttgctgcgcccaagaaggccgcaccagtgactgctgcacggccggatgtgccattggggtcgacagtaccattcacgtcaatgcagggtgctgtcagcaagaacatggtggagagtcttgctgtcccgaccttcagggttgggtacaccatcacgactgatgccctcgatcagctctacaaaaaaattaagtctaagggggttacaatgacaacactgttggctaaggcgacggcaatggctctggttcagcatcctgtggtgaactgcagctgcagggatggaaagagcttcacatacaacaaaagtatcaacattgctgtggcagtggccatagatggtgggttgattacaccggttcttcaagatgctgataagcttgacatttattcattgtcaaggaaatggaaggagttggttgataaggcgcgagcaaagcagctgcagccccatgagtacaactctggcacctttactctttcgaatcttggtatgtttggagttgataggtttgatgcaatactgccacctggaactggcgcaatcatggccgtcggtgcatcagaaccgacagttgttggtacaaaagacggtagaatcgggatcaagagccaaatgcaggtaaatgttaccgctgatcatcgggttatttatggagctgaccttgctgcttttctgcaaacacttgctaagataattgaggatcccaaggatcttacattttaaaagtccctgagtgattgtttttaaaagttcctgagtgattgtttttccttgagccaatcacaattgggtgcttctcacccatagtagatttgtagtatgtcttattgtgaattagttgatttaagctatcatcaatgtcagcatcaggtaactttacctgctggttggttatcttaccatcattggtttgtttttcaataaattcttttctttt

SEQ ID NO: 4081 - DNA, 1098 bp, Zea mays
  Clone ID: 700348350_FLI
ggcaaccaacagccacagcctagcagaaaggttgaggagggagaagattagcgagaggatgaagctgctgcaggacctcgttcctggctgcagcaaagtcactgggaaggcggtgatgcttgacgagatcatcaactatgtccagtccctgcaaagacaagtcgagttcttatcaatgaagctcgcaacggtaaacccaaggctcgacctcaacatagaagggcttctatcgaaagatcttctccgcttccctggcgttccttcgtcttcccttggattctccccggaaatgatgcacccacagctgcagctctcgcagccaggcctgatccagggcggcgctgccggcatggccaatccggacgtgttcaggagaatcatgcaggcacagttaagcgcaaaggacgggtctcagatgccgccccacgcattgaatggggcattcagtgacgtcgcgcagcagcagatggcgtacccgtcgtcccaggacctgagcatcgggccgtcgcaggacgggtttcaaatgtgactgaacatgcccagctgcacatactagtaaaagatgcaaaaaaagggcttcttccatctgaggagtatctgatcggcgaacgtgcgggcgcgcagggggccgcgtatagctgcctgctggtgccgggagcagcagcgcctgctcagcgcgacgccttgaaccgcgtcgacccacggctgtgcctgtgctgctgcatcggtcaggtttttttatcgtgttcagaaggaactgaggaaaagctcgtggcgctggcctgtggcgttgcctggatagatggctggaaattctgtctgtttcggcggtcgcgtgcattcatggcatggcgcgcagtgcagtaacagtgggctgcgtgttggcacttggcacagcgaccaaatgagctgctgcaggatgtgatgcaacgcgaggagccttgttttgttagtagtttccaatgctttttttttgtttttgtttgcataatagctaagggtgcaagaaaacactcataaatttgggggtggggggcggcggtccggcgatgtctatgttgaaacatcatacatttggcaaatttctccttgcgccac

SEQ ID NO: 4082 - DNA, 1604 bp, Zea mays
  Clone ID: 700348376_FLI
aggagaagtacctgcaagtttacaaaacctcactcagttaaccgttcttaatttgcaagataattctttctctggatccatccctgacctcaagcttcacagtctgaaactattaaatctgagcaacaatgaactgaaaggctcaattcctcgatctctccagaaatttccaaagggttcattttcagggaatcatggactgtgtgggctacctctagctgaatgctcacatccttcactagcacgctcacctgaatcatctccatcgcctcaatctccacctttgacacatcatgataagaaactaggcacgggtttcatagttgcagttgctgttggtgggtttgcattgctgatgctagtcgtggttgtgtgcttttcaaagaggaaaggcaaggacgagattgatgtggaatccaaaggtaagggtactgccaccaggagcgagaagccgaagcaagaattcagtagcggcggccaaattgctgagaagaataagttagtgttcttggagggttgcacctatagctttgacctggaggatctactgagggcttctgcagaagtccttggcaagggtagttatggaactgcttacaaagctatactcgaagatggtactgtcgtggtagtgaaaagattaaaagatgttgtggcagggaaaagagagtttgagcagcagatggagctcatcgagaggttgggcaaacatgcaaacctactcccactacgcgcctactactattccaaagacgagaagctcatcgtgtatgattatattgacactggaagtgtctcggccatgttgcatggtatccggggtgttaccgcgaagacaccgttagactggaactccagaatgaaggtcatccttggaacagcatatggaattgcacatatacattcagaagggggcgcaaagctcacccatggcaatgtcaagtcaaccaacgtactcgtagaccaagatcacaatccttccgtctcggactatggcctcagcgctctgacgagtgtgccggtcaacgcatctcgcgtcgtggtcggctaccgtgctccagagatagtcgagaaccgcaagatcacccagaagtccgacgtctacagcttcggcgtcctcctcatggagatgctcacagggaaggccccgctccagacccaggggaacgacgacgtcgtcgacctgccgagatgggtgcactcggtggtccgggaggagtggacggccgaggtgtttgacgtggagctgatgaagcaccagaacatcgaggaggagctggtacaaatgctgcagatagccatggtgtgcacggccaagtcgccagaccggcgcccgacgatggaggaggtgatcaggatgattgaggggctccgccagtccacctcggagagccgcgcgtcttctgatgagaaatccaaggagtcgaaccctccatcggtgtaaatcctgcgcagctcccttcgtccgcttgatcggttgttgttgccagttgcacctcatttgatttgttagctaatttatttatgattgagtttcttgtaaaccgtggttagcatctgctgcatttagcctcagatagaaagaactgagctttcttattgat

SEQ ID NO: 4083 - DNA, 1426 bp, Zea mays
  Clone ID: 700348384_FLI
gcgaaaccggaagactcttttcaacgttgatgatcatcagcacatagagaacggcaacctcggaaatatgaagcggtttcaattcagagagctccaggctgcaacagaaaacttcagcagcaagaacatattaggaaaaggcgggtttggtattgtttaccgggggcagcttccagatggaagtcttgtagccgtcaagaggctcaaagatggtaatgctgcaggcggggaagcacagtttcagactgaagtcgagatgatcagcttagcagtgcacaggaacctcctcagactctatgggttctgcatgactgccagtgagaggctactggtctatccgtacatgtcgaatgggagtgtcgcgttgcgcctgaaagggaagccaccactggactggatcaccagaaagaggatagcacttggggcagcacgaggtctactttatctgcacgagcagtgtgatcccaagatcatccacagagacgttaaggcagcaaacatactgctagatgactgttgtgaagcaattgtcggggactttgggcttgcaaagctcctagaccaccgtgaatcgcatgtcaccacagctgtgcgcggaactgttggccacatcgctcccgagtacctctcgactggccagtcatctgagaaaacagatgtctttggttttggaattctgctgctggagctgatcactggtcagactgcactggagtttgggaagtcatcaaatcagaagggagccatgttagactgggtgaagaagatgcaccaagagaagcagctggacatacttgtcgacaagggcctggggagcaaatatgaccgcattgagctggaggagatggtgcaagtagcactgctatgtactcagttcctccctggtcacaggcccaagatgtcagaggtggtccggatgctggaaggcgatggacttgcagagcggtgggaggcgttacaacacactgagtcacacaaattcaaggtgcctgagttctccttcagccgctgccactctgacctgacggacgactcgtcactgttggtgcaagcagtggagctttctgggccaagatgacaccaacggagacggtctgtggcaagaagtatccagcagttgtttcccagtagaaaatgtaaataatacaaagtgaagcaactggtgctgcatcctgtcagaagtcgaagcaaatctcaatcagctgaactgtacaaagattaaaaaaagagcacaacctagtctaagcatggtacattactacatctacagattatgtaactgttggtagaataaggatagagcaatgtttccattttgtttgttattttcccctttgtattctattactgtagttatagtttgtaaaatgcaaaaacggtggcaatagcgctcgatgttggtgctgaagaactcaaatagcttagt

SEQ ID NO: 4084 - DNA, 2098 bp, Zea mays
  Clone ID: 700348422_FLI
cggagccaaagccaacaaacagccgctccgccttcttccgcggctgcagccagcgcgaggtacctggctggcattttgcatttgaggtcatcattgaatggctgcaacgatgggttcaatatctgccaatggttcttaccaaacaaataggcccagtgcactaaagcaggcacctcacatgcaattccaacaatgttgcaacggtggacttaggttcttaagcaagcattcccaatccacgcgaagtaagatacaggtggctaaaagaagagctacagataatggaattcatccaaagactacgggacatcgggcacctattgtatgttctgctgggatgactattgtatttgttgcaactgaagtgcacccatggtgcaaaactggtggcctcggtgatgttgtaggaggactgcccccagctttggctgctatgggacaccgtgtcatgacaatagctcctcgttatgatcaatacaaggatgcatgggatacaagtgtccttgttgaggtaaatattggtgacacggtagaaactgttcgcttcttccactgctacaaaagaggagttgatcgtgtttttgttgatcatcctatgtttcttgaaaaggtatggggcaagactggagcaaaattgtatggtcctactactggaactgactatcgagataaccagttgaggttctgccttttgtgccttgctgctttggaggctccaagagttctcaatttcaacaattctgaatatttctctggaccatatggggaagatgttgtcttcgtagccaatgattggcacactgctattttgccatgttatttgaagagcatgtataagccaaatggaatttataaaaatgctaaggttgctttctgcatacataatattgcctatcaaggtagatttgcccgagcagacttcgatcttcttaatctacctgacagtttcttgccatcatttgattttattgatggacatgttaagcctgttctagggagaaagcttaactggatgaaggcagggatcattgagagtgatctggttctaacagtcagtccacattatgtcaaggaactcacatctggcccagataagggtgttgagttggatggtgtccttcgcacaaagcctctagaaattggaatcgttaatggcatggatgtttatgaatgggatccttcaacagataagtacatcagcgtgaaatatgatgcaacaacggtaactgaagcaagggctctcaataaagagagtttgcaagcagaagtcggattgcctgtggactcgagcatccctgttatagttttcgtcgggcgtctcgaagaacagaaagggtccgacatactcattgcagccattccagagttcgtgggcgagaatgtccagataatcgttcttggcacgggaaagaagaagatggaggaggaactaacgcagctggaagtgaaatatccaaacaacgctagaggcatagcgaaattcaatgttccattggcacacatgatgtttgccggggctgacttcattatcgtcccaagcaggtttgagccatgtggtctcattcagctgcaagggatgagatatggagtgattcctatctgttcatccactggaggacttgtcgacacggttgaggagggcgtcaccggattccacatgggttctttcaatgtcgagtgtgaaactgtagacccagccgacgtgacagcagtggcgtcaaccgtcacgcgagccctgaagcagtacgacaccccggcattccatgagatggttcagaactgcatggcgaaagacctgtcctggaaggggcctgcgaagaagtgggaggaggtgcttctgggccttggagtcgaggggagtcgagctggcatcgacgacgcagaggagatcgccccacttgccaaggaaaacgtagccactccgtgagggcttggtggtgcctcgactcggaaacacgcgttggtgataggaagcgtcttctaggatcctcctgggcggccttgtggctggtggagtgaggtgtccagtcagacacggtttcgcctctactactagtctactactactacctcattgtaatataatccttggcattct

SEQ ID NO: 4085 - DNA, 660 bp, Zea mays
  Clone ID: 700348457_FLI
taggtattgaagaagtcccagatatagggccactacatgctcatttaggttcaaggaatgatgaggctcaagagaagtgaaacttaaatctttgacagttttgaaatggttggggacttgaggtggcagtcatggtatcttctgcttgtcagcattcgttctgatccacatgcagtatatgcctttatgatatggcccccgcacagcattttctcttgaagcttcccgtctccgtagtcgcagctgaaagagagtggaacgccttgatttgtaggatttcttgtcatgctggttaaagctatggtccgagtctctgtcattgccagcttcttttttttttcttcctctgcgtaatgcgtagtgagtggatggcctgcgttttaggcacgtcatcaaaccaattatctgctggaacgttggtactctcttgccaccatattgcaactagaagtcttgattggcatgttgccacacaaattcctactatgtttgatgtcttgtatcatgtcggagcaccaattcctgctgtgtttgtgatgtaataatgccaattccaaccagcgacgtgagaccaatctgcatggatccagtcgataatactttttgaatataaaataagtgcaatctcttttcggcactgtttggaattcaagactggcc

SEQ ID NO: 4086 - DNA, 881 bp, Zea mays
  Clone ID: 700348478_FLI
tccactcctaccccacacagaagcggcggcggcggagcaaacgcaggcgaaggcgagggtgtgagggaaggagcaccagccatggtgcacgtcaacttctaccgcaactatggtaagacgttcaagaaaccaaggcgtccttatgagaaggagcgtcttgatgctgaactgaagctggttggtgagtatgggctgaggtgcaagcgtgagctttggagggtccagtatgcactgagcaggatccgtaatgctgcaaggcacttgctcacccttgacgagaagaacccccgtcgtatctttgagggtgaggcacttcttcgccgcatgaaccgctatgggctgcttgctgagggtcagaacaagcttgattatgttcttgccctcaccgctgagaacttcctcgcaaggcggcttcaaacacttgtcttcaaggctggcatggccaagtccattcaccatgctcgtgtcttgatcaagcagcgtcacatcagggttggcaggcaaattgtcaacgtcccatcattcatggtgagggtggagtctgagaagcacattgacttttcactgtcaagcccattcggtggaggccccgcaggaagggtgaagagaaagaatcagaagaaggcaagcggtggcggggatgctggtgatgaggatgaggagtgaggatggacaagtagtgttacaccaatataataatattatctagttttcttgaacttgttcgaatgatgagtgcttagctgtgtgatctgacgcagagtcccctgtgctgactctgtgtcatggatggtccattttatcttgtggtattatcagcctttacataactgctatgtttggatatgttcaattctgttgcaattttatgtggttgtttt

SEQ ID NO: 4087 - DNA, 1420 bp, Zea mays
  Clone ID: 700348501_FLI
ggcgtacgtacgtgaacacacatcgatctccatatatctgtctagttagctagctagctagtagacatatggtgggctcgcagtacgacgacgacgatgacaatgttgttggtcgccggaagacgaggtggtacgctgtgaccggcggccgggggttcatggcgaggcacctggtggcggccttgctccgctccggtgagtggcgtgtccgggtcactgacctcgcccctactctagccctcggccatggagagacagaggggattctgagcgacgctctccgtgatggccgtgccgtctatgcctcggttgatgtctgcaaccttgaccagcttgccaaagcctttgaaggggtagacgttgttttccacacagctgctgcggatcctagcaagaacaacctgcaacttcactacaaggttaacgtggagggaacgaagaatgtaattgacgcttgcaagatatgcaaggtgaagaggctgatccacaccagtactagtgctgttgtgtttgacggcgttcatggactttttgacgcggatgagtcattgccatacccagataagtttcctgatgcatatgcacaaacaaaggcagaagcagagaagttagtcatcaaggccaatggcattaatggccttctaacttgttgcatacgtcctggtagtatatttggcccaggtgacattatgatgccaactttggatcgttatggatggtcaaatgttactattggtgaagggaagaactatgatgattttgtgtatgttgaaaatgttgtccatggtcatctttgtgctgataagactctttctactattgagggtgcaagaaccagtggaggaaaagcatactttataactaatatggagccaatgaatatgtgggacttcttatatcttattcaagaagaacttggatacaaaagaatattcaagataagggtacctataattgttatcaagccagcaagctatttgatagagtgggcatatagggctgttttctctcattttggaacttgccagcctcaaatactaacaccggcgaggattagatatgtaacgctcaatagaacatttagttgcaataaagctgttgaagaacttggctacaaacctattgtgacactacaggatggtttgaagaaagcggtgaaattgtatattcaactgagggataaagatttacctaagatatagtgaagttgtgatgtaaaacaactctaccaaaatatcataagccaaagccagaggtgatcgatgatgtcccatcaataaaaatcgggtttgtgttttttattataataaaaaaagctatgtaaaggactacgaaatattgttgtaatgctctaatggtcaggcatgtatttatgttatctgggacgtagacgatattatatttgcttttatgttcctct

SEQ ID NO: 4088 - DNA, 1556 bp, Zea mays
  Clone ID: 700348517_FLI
cgacctcgttcccctccgctgtctcgcctctcccttggttcctcgcggcgacgactgggcgagcgcctcctcccctccctcactccctccgtgagctcctcgccggcggcgcgcgccgccgcccgtcgccacgtcttctccgctgacgtgggctcaccaggttcaaggcaatatctgtgttaatcttggggaccttcagtagattgctgagagttctccttgatacaggggaataaagatccaaataagtttttgacattgatctgtagccagtactgcaatggctacgaagcttgtggttctcggtatcccctgggatgttgacactgaagggttacgagagtacatggccaagtttggacccctagacgattgtgtcgtcatgaaggagcggtcttctgggcgatctcgcgggtttggctatgtaacattcgcctcagctgacgatgcaaagaatgttcttgattgcgagcatgttcttgggagccgtacattagaagtgaaggtagctactccaaaggaagaaatgaaatcacaaggatcaaagaaagctacaaggatattcgttgctcgaattccgcaatcggtggatgagtcgatgtttcgtagacattttgaagcttttggggaaattcttgatctttacatgccaaaggaacatggttcaaaagggcatcgtggaattgggtttatcacgtttcagagtgcagagtctgtggacaacatcatgcaagagtcacatgagcttgatggtacaacagtagttgttgatcgtgcgactcctaaggatgaagatgtcagataccccccgagtaggccatctcagggtggctatggtgcatataacgcatacatttcagctgctaccaggtatgcaactctgggtgcaccaacgctgtatgaccatcctggatcagcttatggaagagggtattatggaccctctcaagcagtgggcaagaagatatttgttggtagacttccacaagaagcaaacacagatgatctaaggcagtactttggcagatttggtcgaatcgtagatgcatatattccaaaggaccccaaaagaagcggccaccgaggttttgggtttgtcaccttcgctgatgatggtgtggcagaacgagtagctcgtagaagccatgaaattctaggccatgaggttgcaatagacacagcggcaccacttgagaatgattcagctgctggtgggtacattgatccaatggatctttacggagcttatggttcaatgagatctttcggcaggttctgtggcggtctagattacaattatggctatggccccagcagcggaagcagccgatcaagatcggattggcgataccgaccttactgaacgtgtccattgtcagtgatgttctagtttacctccagggaaggaaactgaaatggcgaaaagaaacattttaagaatgttaagtgttacgttaagtggcatgttaatcgtaagagggccgtgcggaatctgtcgatttgttcatgttgtaattttggacatggaaatgcttttatgcaatttctttgccgtg

SEQ ID NO: 4089 - DNA, 1123 bp, Zea mays
  Clone ID: 700348529_FLI
cccgcgggctggtcgggccgcgtgtgggcgcgcacgctctgcgccgcggacgccgccaccggcaggttctcctgcgccacgggcgactgcggctcgggagccgtccagtgcaacggcggcggcgccgccccgcccgccacgctggcggagttcacgctcggcggatccggcggcctggacttcttcgacgtcagccttgtggacggctacaacgtcccgatgctcatcgtccccgcgcagggcgcgggcggtggtggcagcagcagcagcagcaacgggtccgcgggcggctcgagcaagtgcatggccaccggctgcctcgtggatctcaacggcgcgtgcccagctgatctgagggtaatggctgcgtcggcgtcggcgtccgcgtccggcgccggaggggctgtggcgtgccgcagcgcgtgcgaggcgttcgggtcgccgcagtactgctgcagtggcgcctacggaaaccccaacacgtgccgcccgtcaacctactcgcagttcttcaagaacgcttgcccgcgcgcctacagctacgcctacgacgactctacctccaccttcacgtgcgccaccggcatcagctacgccatcacattctgcccgagcaccaccagcggcaagtactccggcgagaacccgcaggccgcgggcgtgcagcccacgaacggctcgatggtctacctcggcggcgagcaactcgccacctcggtcgccgccgcggcccgtgcgtcacagctcctcctagccgccgccgccctcgccgccgtcgcgctgctctgagcttcgttcccgacgtggccgtgtgaagtcggcggctcgagtctttgtcctctttccggcgtgacggggccagcgataaaagattcgacaaccagcagagaggctcagacgagacgagtgacgacggtgctgctacgactaaccgagagaaaaaaaacaatgaaatataggtagcttatggcgtagggtttaggataactggtagcatgagttttaacctttgcattcttctccacgcttcctcgatttgttgagccagccgaaagatgtattctatatttctatccatcgttgttcgccgtgatgctatagattacagcaatgatgattattt

SEQ ID NO: 4090 - DNA, 1100 bp, Zea mays
  Clone ID: 700348691_FLI
ctgaaggaaaagtgcctctatgggaggctttatgtgaaaagcacaatgcagtgatagagctgttagtagagagtggtgcagagctatcatctggagacacggccttgtatgcttgcatcgctgttgaggaaaatgatgctgagttgttgctggaacacggagctgacgtcgacaagcaggacagtaatggctggtcgccaagagatctagctgatcagcaaggccatgatgacattcaggctctcttcaaatcacgaaaagcacacaggaagcatgcctcaaatggcagagtggcacctatgctgatagggagattcaacagtgagccctcgatgccagatatgagccatgaaaacgccagagtacgcagcgaagttgttccgcagaagctcctccgaaagagggtgagtttccagaattctcttttcggcgtcatctcttcgtcccacgcccaccaggacaccggccgtctgctctcgaaaggcctcgctggaacagagggtccaaattgccgtcacgactccctcatcagggtgacaatcagctgccccgagaagggggggaacgccgcagggaagctcgtgcgcctaccgcggtcgatggccgagcttctcgaactaggtgcaaagaagttcggcatcaagcctggcaaggtcctgacagttgggggtgctgagattgatgaggtggagcttatcagagacggtgatcatattcttctcgtcagtgatgaatgggtgccagatgttgagcaaattaggccttaacaataagtgagccagctgtggtgctcttattgcaatttgacatgatatggggaaacatgcccctgtgaccctgtgtgcatcagtgcatgtcccccatttaaactgaagtgtagcttatgatggttttgaagctgtaggatgtatccagcttggaaatgaatttgtagtcagctggtctgtatgtagtttcgtcatctctttccatgggaagggattcacaaaatgtaattacatgatttcttttttttcctgtctttagatcaagctttctctggaagtgagaaatattcgtgagtcatgaattttgagatattgatcctatcagttcatttt

SEQ ID NO: 4091 - DNA, 1940 bp, Zea mays
  Clone ID: 700348731_FLI
gaaaaatcgccccatcccctgactatcactggctcactgcccttccacctacaggttccagcggccatggtgaagaagcccaacggtgtcgccaaggccacggcgacctctgctgacgcggcagcccagccatccaaggagaatccgtccacccctgggttggtcaaggcctcgaagtttaagaagagaaaggtcaaggccaaccgtgcgaagcaggcagtcgctgcagcagctattgacgaggtcgcccctgtaggtgcaggcactggtgatggcgatgcatctgcatcagcggctttaccgcaaccatccgatgttgccgaggcattacttgtggtgcaaacgccaaagtcaaccacttttgctgaggcatcacctgtggcacagacgcagaagccagccactgatgctgaaggattggtgcctgcaccaataccaaccactgctgtagcatcagcttcgttgccaaagccaaaaccagctcaagctaatgctgatgctgcagctgcaatttctgccagcaagggcaatggtgtgggtgctgataatagtaggggtgatggtgagatgaagaacaagaaagagagggccatgagtgacaaggggaaggaggttatggaggaaggaggaagtaagggaaagggtaagggtaaggggaagaaggctgtggtcaagaaggaagaaaggggtgaccgtaaggttgcagggtttatattcatgtgcaatgcaaagactaagaaggagtgctaccagagtcgcttgtttgggatgcctagtgggaagattgaaatggtcaagaagattaggccaggggtcaagctgttcctgtatgattttgacttgaagcttctgtatggcgtgtacaaggcagcatcacatggtgggctgaaccttgtccatgaagcatttaatgggaagttccctgcacaggttaagtttaagattgataaagattgccgtcctctccctgagagtagtctcaagcaagccatcaaggaaaattacaatgcaaagagcaaatttgatccagagctcaccacaaaacaagtccaaaggttacttttgctgtttaagcctgttagtgcacctcaatctgtttcaaataatcaccttggagaaaggcgccactatgaaaaacgaaggaagccacgccattttgaagaaaggcggcctattgaagcagcgcgtcggccacgatttgatgaggaaaggcgccctgcggttagacatgttccttttgaggatccatacagggcaccacgctatgctccagttcctgttgactctcagcatggccattctttggctagtgatcaccacagatattatcaaccagcacttacacctgagcctcggcagcttcctcttgttctagagcctcgatatgttccgccggccctagatcatcatcatgtgccagagcttcgacatgccccacctgcatattatcgcactttggctccatctggtgattcatactatcggtctgttgagaatctggtgcctgagcgatatgcagacagaaccatggctgacttgaccactagagatccaattattagggatcacacagcactaccaggggaggcacttgctcgagcagaccgcttggatgatctctaccgttctgatcgtgtggaggaactctaccgttctgatcgacttgttaaccgtgctgtggaccgccctcatccagcctattttacagctgcttatgagaccaaccctgcttatgctgaaacgagcattaggcctgtctctgcaagggtcaatggacccagtgcggcagtttcgtcactctattccttcagtggtggcccagtatatcggtaatgaatgatcatggctctgttgaaagccttagccagactaagaagacagggtattcgtctctttaactgcaactgttgtttgccttagcttctattcggtattttctt

SEQ ID NO: 4092 - DNA, 1043 bp, Zea mays
  Clone ID: 700348787_FLI
gtcatactgaattttggaaagtccgtagcaagaaagcacatcccagctgaaagtgcctggtctactccattaacacctcctatgccctggggtcagtcatcaaggccagttaacggctcccgccatccccaaagtcctaaacactatgggtatgctccaatcagcggtgtacttccagcaccaccagttggagctcatcacgtcccaccgtctgatgggatgcagccactatttgtagcccctgctcctatttctgctgcagccatacctttcacgccaactgttcccttgcaaaatacatcagctgcttggatacaagaagttactccaaggcctgctccgccacgattccctggtcctggtacgggggtcttccttcctccgggatcaggccaccctctgcctcatcagatgatgccggcttctcatggccatggcgaacccaactctccacaaggttcatccgcttacctgcatagtaaggtcaatggcaaggagacatctaatggcaatctttctcctaagaactcgccgagaaagacatcttgcacagccgaggagaaaccagaatgcaatgggagcttaaatggtggtggcggctctgcggatgagaagtcaactgtaggtatggagcagcagaatggtgttcagaagaatgttgggagtagcaaggtccagccacatggacatgcaactgaatagagtgggacttatagtacatagacaacagaaaactgaagagacgaggagttgaattttgggccgtgaatttgcggtagtgcgcagagctcagcagaggtctttgctggcactctcttgtccctgacaagaatcatcgtgtcaagttctcgagacggaaaacatttgtcctaaactttgtagctgcactgttgcaaatctagattatcgacattgcctcgggttatcatctgctatcagagtcgtgggcagtgaaaaccatttctgatggtttatgttgcccaaatattatcgacctagtacatctgaaatgggaaaaaatgtggacgaaatttcttgcatcg

SEQ ID NO: 4093 - DNA, 970 bp, Zea mays
  Clone ID: 700348864_FLI
gattttagccgccgccgctgctcatctcacatccctcgagaagacgcctgctcctcgccgatcgatacgatggccgtcttctccgacctccacaccgccgacggcctcaagtccctcgaggctcacctcgccggcaaaacctatgtgtctggtgactccattactaaggatgacattaaggtcttcgccgcggtgccgtcgaagcctggcgctgagtttcctaatgccgcccgctggtacgagaccgtctctgcggctgtagcctcaagattccctggtaaggctgttggtgtaaatctgcctgcgggatcagctcctgcggcagctgctcctgcggatgaggctgaggatgatgatgaccttgatctttttggtgatgaaactgaggaggacaagaaggcagctgatgagcgtgctgccgctgccaaggcctcttctaaaaagaaagaaagtggtaaatcctccgtccttatggatgtaaaaccatgggacgatgagactgatatgaagaagctggaggaggctgtccgcagtgtccagatggagggtctgacttggggagcatcaaagcttgtgcctgttggatacggcatcaagaagatgactatcatgttgacaattgtcgacgatcttgtgtccatcgacactctaattgaggaccaccttacgcaagagcccatcaatgagtacgtccagagttgcgacattgtggctttcaacaagatctagagttcagtttctgagtttgggcaacggcagcggctcagctcgtcaagtttgtgctgggatgccagtttatcccttctagtctattacagaaacgttgttcggagctgagtctattataaacatcttggtctgagtttattgttgagtggtgccagtttttttcaatatacatttatcttaaaaacagcggtactgatgtttttttgtctaaagttaatgagtttgcaatggttctgagtct

SEQ ID NO: 4094 - DNA, 2294 bp, Zea mays
  Clone ID: 700348928_FLI
ggcacgccccactccccgccaccattaccaaccaaccaaccaacccgcgcacccccgaaggagaagagcgggggtcggaggcccgaggtcggagctgagcgcgcccccatcttccgtcggcgataagagctttgtctgtttcagcttcatgagttctgggatagcactggcatccaacatctcttattcaacagtgaacagcagcatcatctttctctgccttttcgcgggatacttgggaattcctggtggaagcttcgctggaggaagctaatttagtcttcactgtagtagaagtttggcctaagagtttgtaggctttcaagcttcagaaatggtttcttctcagccatcctctctgactgcaattctcgcacagggccccaaccactgcccagtcaatatactcctcccgatggggcccccagatgtcgtctcctcagataatgttgagtacgatttctctgatgtttttggttccaccccggtccaaacaccaacaaacctttgtggttttggtccggagagtcctgcacctactgttgagtccaatgaagaattttacagtgatcctgttgtcatcatcaaccgatcccattctcttgtcggtccaacatcacttgtcagccgctccttgcgacttagcaagcttagtctaggaaaaaacgagggatcatcggaacttgtcaagtgcctctcagaagaaaaggaaggggaccaagggcagctcagtgatgaagatctgggtaatgctatgacagaggatgggggcattgggcttgatgacttagaaatcttgaagcttgttggccaaggggcattcggtaaagtatttcaggtcagaaagaaaaacacctcagagatatatgcaatgaaagttatgaggaaggacaggatattagaaaaaaatcattctgagtatatgaaggccgagagagagatattgacaaaagtcgaccaccctttcatagtgcagctgaggtactcatttcagacgaaatatcgactttaccttgttctggacttcataaacggggggcatcttttctttcagctctacaagcaaggattatttagggaggagcttgcaagaatctatacagctgaaattgtatctgctgtagcgcatcttcatgctaatggaattatgcatagggatctcaagcccgaaaacatccttctggatgctgatggccatgccatgctcacagactttggccttgcgaaggagttctgtgaaaataccagatcaaactcaatgtgtggcactctcgagtacatggccccggaaattgttcttggccgggggcatgataaggctgctgactggtggagcgtgggaatcctgctgtttgaaatgcttacaggcaagcccccatttgttgggaatagggagaaagttcagcagaagattataaaagacaaactgaagcttccttcatttctgtctagtgaagctcattccctcctgagaggcctgctacacaaggaacccaacaagcggctgggcagctgccccggaggcagcaacgagataaaaaaccacaagtggttcaagccaatcaactggaggaagctggaggcccggcagatccagccgagctttcggccgaacgtcgccgggcttacctgtatcgccaacttcgacgagtgctggacgaagacgcccgtgctggactctccggtaagcacccccgctggtggcgggcacagcaacttcgcggggttcacctacgtcaggcccgcgccgatccttgaggaggtgaacgcatccggctctaggctcaaggactaaggatgtttagcccattgaagatgtgcttaaaattttgatcgagtgacatgtatggaaacttagggggtgtttgggaacaaagtttttctgcagttttggaagaatactgcagtattctcaaatactgcagtattatatacataatggtgtttggcaagctgggtaaaatctctgttttcaaaactgaagtattgcaaatactatagttgttttaaggcattctaaacttagctctggaccttagttttcaaaactgcggtattataaactacggtattgttataactaaagtatagtatagtatttcaaaaactgtagttttcaaaaactttgttcccaaacagggccttatgtgcacaagagacgctgattaaacatgtaacgtaccattagccttggtacaggataggaacagtaagctctggttctatcttgtactcttaaaatatgttcataaggtggcatatggtcatggtaaatgttaaggcgatgttggccc

SEQ ID NO: 4095 - DNA, 1582 bp, Zea mays
  Clone ID: 700348959_FLI
gcctcggctgcatctccccgttcctcgtgtgccgacggggggtggcgggcgactaatggggacgggggcggggagcgcgcgggctctggccgtggcgttcgccgtctcgcttctcgcctgctctggcgccgtcgctgtcgccagggcgcaggataccgagcggatcgaaggtattggacctcgcctggcctggaagtgctggtgatgtgctcgaagacgatcccgttgggaggctcaaggtgtatgtctacgagttgccaaccaagtacaacaagaagatggtggctaaagactctaggtgtctcagccacatgtttgccgcggagatcttcatgcaccgcttcctactgtctagcgcgatccggactttaaatccagaagaagccgattggttctatactccggtatacaccacgtgtgatctcacaccatggggtcatcccttgcccttcaagtcaccacggataatgcggagcgcgattcagttcatttccaaccggtggccatactggaacaggacagagggagcagaccacttctttgtcgtgccacatgactttggcgcatgcttccactaccaggaagagaaggccatcgaacgaggcgtccttccgttgcttcgccgtgctacactggtccagacttttgggcagaaggatcatgtctgcctgaaggaaggctccatcaccatcccgccatatgctcctcctcagaagatgaaaactcaccttgttcccccagggacccctaggtcgatctttgtgtatttccgcggtttattctacgacactgcaaatgatcccgagggtggttactatgcaaggggcgcccgtgcatcagtctgggagaacttcaagaacaacccgctcttcgacatctcaacggaccacccacccacgtactacgaggacatgcagcgtgccgtcttctgcctgtgcccgctgggctgggccccgtggagcccccgtctggtggaggcggtggtgttcggctgcatcccggtgattatcgccgacgacatcgtccttcccttcgcggacgcgatcccgtgggaggagatcggtgtcttcgtggccgaggacgacgtcccgaggctggacaccatcctgacgtctataccgatggaggtgatcctccggaagcagaggctgctcgcgaatccgtccatgaagcaggccatgctgttcccgcagcccgcccaggctggggacgccttccaccagatcctgaacgggctggcgcggaagctgccgcacggcgaggacgtgttcctcaagcccgggcagaaggtgctcaactggaccgagggcccccgtggtgacctgaagccatggtaggtgcactggaaaaaaaaatgccatggcaccgtcagcgtgtccgctgttcttgtgtacgctgcacagcacaaccagatggtaggctgatcgacgaggaggacgatgagtactcccatgccaatgaatgatgtaaatgtaaagcgtcttccagcccaccagtcactgtgcttctggcgacgtgtctggtttgcttgtgtgacagtgtctgttctgaactttactttagcgttagcctattaacgatc

SEQ ID NO: 4096 - DNA, 1681 bp, Zea mays
  Clone ID: 700348987_FLI
gtaggtggccggacggtggtggcatcgccaattcaactccgcatctgaatcggcactcggcagcgcgccagctccatagtgtaggaggaggagatggcgctcacaagaatcggtcttgctggccttgcggtcatggggcagaaccttgccctcaacattgcagagaaagggttccccatctctgtgtacaacaggacaacctccaaggtggacgagaccgtgcagcgtgccaaggcagaaggaaaccttcccgtctacggcttccatgaccccgcgtcctttgtgaactccattcagaagccacgggtggtgatcatgctcgtcaaggccggcgcgccagttgaccagaccatcgcgacgctcgcagctcacttggagcagggcgactgcatcatcgatggggggaacgagtggtacgagaacacggagaggagggagaaggccatggaggagcgcggcctcttgtatcttggcatgggtgtctctggaggagaggagggtgcccgcaacggcccgtccttgatgcccggaggctcgttcgacgcttacaagtacgtcgaagacattgttctcaaggtggctgctcaggtccctgacagtggcccgtgtgtcacgtacattggcaaaggtggatcgggcaactttgtcaagatggttcacaacggaatcgagtatggcgatatgcagctgatttccgaggcttacgacgttctcaagtcggtcggtaagctcaccaacagtgagctgcaccaggtgttctccgagtggaacaagggcgagctcctgagcttcttgatcgagatcacggccgacatctttggcatcaaggacgagcatggcgatggctacctagtggacaaggtccttgacaagaccgggatgaaagggacagggaagtggacggtgcagcaggccgccgagctgtcggtggccgctcctacgatcgaggcgtccttggactcgaggttcctgagcgggctgaaggacgagcgggtggaggcctccaagatcttccagggtgactactactccaccggctcgccggtggacaaggcgcagctggtggaggacgtgaggcaggccctgtacgcgtccaagatctgcagctacgcgcagggcatgaacatcatcaaggccaagagcgcggagaaaggctgggggctcaacctcggcgagctggccaggatctggaagggcgggtgcatcatccgcgccatcttcctggaccgcatcaagaaggcctacgacaggaacccgggcctcgccagcctgctcgtagaccccgagttcgcgcaggagatcatggacaggcaggcggcgtggcgcagggtggtgtgcctcgccatcaacaacggcgtcagcaccccgggaatgtccgctagcctggcctacttcgactcctaccgcagggacaggctgcctgccaacctggtgcaggcccagagggactacttcggggctcacacctacgagagggtcgacatgcctggctctttccacaccgagtggttcaagattgcgcgcaacatctccaacaactgatgagctgctcaacggatggcatgcccggtgttgactactccagtcggtaatgagatttcctgcaggaacttgtctattgatctttgtaagttaattatttatatgaataaaataagagcaaacatgcttgtgtttgggc

SEQ ID NO: 4097 - DNA, 2049 bp, Zea mays
  Clone ID: 700349015_FLI
aacctttccactgctccatcttcctcgcagcgccggcgatccatcctccgctccctcccttactcgcgctcggcacgcaggcgacgccggcggtggtcaggctcgggctctaagcgacggcgtcagtgtcttcccctcccacctctcggcagtcgcctcgcgccctcgcctccggtcctccacgcaccagccggctactctgcgctgagctgattgtcccattcaataaagaaagcgaagggcatagataccagaagcaacactgagcccatcttgcttggaattctatctgctgttggaacaacttacaccaatatcatggcaaaccttgctgattcttttctagcggatcttgatgaactgtcagacaatgaaggctatcctgaagaagacaatgctgaggcagcgggtagggatgacgacgaagatgatgatatgcctgaccttgagtctcttaattatgatgaccttgatagtgtctcaaagttgcaaaagacacaacgctataatgatataatgcaaaaagttgaaaatgcacttcagaaaggtactgatttctctaatcaaggttccatcctggaggaggatccagagtaccagcttattgttgactgcaatgctttatcagtagatattgagaatgaaataatcataatccataatttcatacgggacaagtataggttgaagtttcctgaactggagtcccttgttcatcacccaatcgattatgcccgtgttgtcaagaagattggaaacgagatggatttaacactagtagatctggaaggacttttaccttctgcaattataatggttgtctcagtgacagcatcaacaacaagtgggaagcctctttctgaagacaatttggaaaaaaccactgaagcatgtgacagagcccttacccttgatgcgtcaaagaagaaagtgcttgattttgtagagagcagaatggggtacattgcaccaaacctttctgcaattgttggcagtgctgttgcttccaaactgatgggtactgcaggtggtctgggagcacttgcaaaaatgcctgcttgtaatgttcagttactcggtgcaaagaggaaaaatcttgctggattttctactgccacttctcagtttcgtgttggctatcttgaacaaactgaagtatttcagagcacccctccacctttaaggactcgcgcctgcagacttattgctgcaaaatcaactctggcagcaaggattgattcaattagaggtgatccaactggaaaagctggacggaacttgttagaagaaattcgtaagaagattgagaagtggcaagaaccgcctcctgcgaagcttccaaagccactcccagttccggactctgagcctaaaaagaagagagggggccgtcgtcttcgaaagatgaaagaaagatatgcgcagactgatatgatgaagcttgcaaatcgaatgcagtttgggattccggaggagagctcactaggtgatggcttgggggaaggttatggcatgcttggacaagcagggagtggcaagctacgtgtctcagctggacaaagcaaacttgctgctaaagtggcgaaaaagttcaaggagaagagctatggtagcagtggtgcaacatcaggattgacatccagtttggcatttacaccagttcagggaatagagttgtcaaatccacaggtccaaggaaaccttctcggaggcggaactcaaagtacttacttttccgagaccggcacattttcaaagatcaggaggacgcaatagaatcctctttgcaaccatcacatctcatttgcactgcatttgttgatatccttgggatgcactgtagaaaattcaaaagtcaatcttgcaatgttccagagactttagaatggcaattcacagttaacagtgatgcttcgagcacttaatcccaggatatttgcgaccgaacctgacttttgagaattctgatgtccatagtctatattgcctcgtgtacaagttcaagcgaacaatttttatctcatggttactactagatgagattggttc

SEQ ID NO: 4098 - DNA, 1432 bp, Zea mays
  Clone ID: 700349016_FLI
agcatcttcatgacgtcggccatggagggttgagcgtcgtcacccatggtgatgaacctggacgtagcggtggacggggaggtgggggctggtggtggtggtgcggctgcggtggctgaagggctgggggtggtggtaaaggatcgccgacttcctgataccaggttgtcaagggcgtcgggcccgagggtaggaggaccgcggctccgaagatcgtaaccgccgtccgtgttgccgaccgggttatgcccccaggaacggcgttcttcgtcaacgggttatgccccctgttgccgactagagagagagagatagatggagaatgagataaatctgtcttgtcccatcacgagtgcttacagggggtatataaggccataggtcagggctactaaaggaaagccactaatcactcttattcccttctaaatctagcccagactaataaaggaaagccatcaatcactaatcactcttattcccttctaaatctagcccggactaataaaggaaagccatcaatcactaatcactcttattccttctaaatctagcccggactaataggaaggccatcaatcacttttattctttctagatctagccgctaggcctggctgcctgctggatcaggcgccctgcgcgctcaaccgcgcgctgcacgtcgcgtgccctgtgacgccgtgtgtacgtatttccgtacatcacacttgtggacatgtttttgcagccgtgctgcacgttcctagcttcttgccttctgcccttcaccaaaaagcagtagcatcacctcagcgcgctgaccctagcgttatggataacttgacctgaaggggaagaggacaccggcggccctggacagctggggaagaggacaccggcggcggggaccttggacgggtggggaagaggacgaatctggtggtgggctggtggttctgttttcctcctctcacatgcgacaccagctgctcccgccttctttccaattattcacgttctttcacgcaacagctcctgcccttcttttcacgtgcatctcttttcccgctcttcttttccgcgcgctgagcaccgcctcagcgcgccttcttcccgcctcagcgcgcgcaacgcaaaaaaagcgccgcctacacgcgcgcaacacggaaacaaccgcctagggcctaagcgcagcgttaccatgccgctttgcgtctaatcgtgattaggcgggcgcttaatcgcgcttttttgaacattgccgcttcctcacaatgaatgtcgttgctcgggacaagctgcaactactggctgtcactgcattgctcgttgctgccaagtatgaagaaattgagtctgctgagatgaaggtggtgaagatggaggctgacttactgaaatctcttaactttcagattgggggtcccactgtaacaacatttttactatt

SEQ ID NO: 4099 - DNA, 2011 bp, Zea mays
  Clone ID: 700349043_FLI
cctcgaccctcccgacgcggcaaagcaaaaacacaaggaggagaggagggagagaaggaagaaggcgaggccaaaaatcccctccccctccccaaatcctagcccaataatctctcaatcaggggattcttaggtctgatcaagtcggaggattcggcagggcgcagccatgaacgagaaggcgtccgtctccaaggagctcaacgccaagcacaagaagatattggaaggtcttctacggcatcctgagaatagagaatgcgcagactgcaagtcaaagggtcctcgatgggcaagtgtgaatctagggatctttatatgcatgacatgttctggcattcatagaagcctgggggtgcacatatctaaggtaagatctgccaccctggatacatggctgccagagcaagttgcatttattcaatcaatgggaaacgaaaaagcaaatagctattgggaagcagagctgcctcctaactacgatagggttggaatagagaatttcatccgtgcaaaatatgaggacaagagatgggtaccaaggaatggaacatcaaaatcttcgtccagtgttcgagatgagaagagccaagagtctccggctagtgctaataggagtggacatggtcatagatcttcatttgagcaaaaccgtgcttcgccagctcttccgagcaaagttgcacatgcagcttcaaggatatcctctcaggcatcacctcagcccccgaaggtagaaacaccagttccaaaggtggttttacctcctcagtcacagaaatcccccgccaaagttgatgcaacaccgcctaaagttgagaagccatcggttacaccacctcctaaagttgattatgccactgatctctttaacatgttgtcaatggatggaacaacagagaaagagtcagcttcatcttcaaacgacgataatggctgggatggcttccagtctgcacaaccagtacctagttcagagaaaaaagattctgccaaaccagcagaaagcaagacccagtctacatctggaatggaagacttatttaaagactcaccagctgtgccattatcctcagctccagctgtttcccaagtaaacgctaagaatgatatcatgagtttgtttgagaagtccaatatggtatcacctttcgctgcccatcaacagcagctggcgctcatgtctcagcagcaagctcttctaatggctgctctcaaagctggaaatgcaccacaaatgatgattccagggactgccaatcagctaaatgctaacggaaccttgcctttccaaaactggacaaatctttatcaaaatcctgggtcgactccagcagcagcacagaatggtgccaccaaggttgctaacaacaatcaggacttctcttctggtaccttcggttttggcacacctggggtgtacaacattagcccagctgtcccagcaaatggggccacgacagcaggtgctatcaacaacggcactgcatcaactgcctcttctactctcccctcacaatctggcaaagactatgatttttcgtcgttaactcaaggatttttcaccaaacgatgagcgcctagtgagcttgaaaaccaagcagaccacaggatcatgttggacgaggcatattgatttagggagcacaaggggcttacacatgcttatttcgaggcagattttcttctggtggatatattgttgtctcatgaccttgtagctgtcggacaataagagtggaaatatgccgcaaaatagctttgttgtttctacaagcgaagaatacattgccggttatgtcaacggcttttactcgaggaccaccttgtcagttatacaagtctaatgcagtcttttcactatcttggtcttgatttatctacgacgtcgatactgattacagattgttttgtattgtattttacgacaattggattttatttgtttctacatttgtatattgtttgtgagatgagagaaacctcttcaaggcgttgaaccaaacgtact

SEQ ID NO: 4100 - DNA, 2956 bp, Zea mays
  Clone ID: 700349082_FLI
gtgcatcagcactgcaggggtctactgaggcactccaagtggggaaatggcggaggcgacgaattcgagcttgggcacgtaggcgtcgctcctgccatcgccgcagcggtcactggactctcacgccgccgccgccgccgccggagaccattagttctcctgcgcggcggctccgcggctcccgccctctcccttaccttcttcccgctagggttttctccgatccccaatcactgctggttcacaaatggcttcatctcagcatgttgagatggaggctgcgaaacttctacataaacttatccaggagtcgaaggatgagcctgctaaactagcaacaaaactttacgtgatatgtcagcatatgaaactaagtggaaaggagcaatcactgccatatcaagtcatatcaagggctatggagacagttgtgaaccaacatggaattgatatggatgcattgcgatcatcacgaattccatttgctggtggtcctcaggcaggggattctagtggtgtcatgtcaaaggacaaggaggtcattggtaaccagtctcccatggtcggaagtgatgcttcccaaagtagtggacaagctggattatggcagcttccatcaggttcaaccgatatgataagacatggggcatctatttcaggtagggtacccacagggccaaataggggagatttctcagcagctgatattcatcaaggctccatgtcacaaaaaagcggtagatcctctggcattgaaagccctgcaagtctgcagatggaggacaccagatctatgaattcacatgattctttgaaatccgatgagaaaacaagtaagaaaacctcttccaagagaaaaaggatggattcaaaaggagctggtgatttgcgttcagaagacaactcaaagtcagatgttatctccactggacagaataccaggaaggggaaacaggttggtaaggctggtagacaaggtcagccttccatgggaattgagcatgagcagcaacctcataaactgcaaggtggtactggtcaggtaccacctatacatggtggtgcaccttttctcaggactcgctcagaaggtccttctgggaggacaatggacaagactaaaccatcaaatccattctcaatgggtcaaattccaaattttcctgaagggctggcttctactggtgctccaatcgagttgcagaaaagtatacagggtggagcaagtttatttaatcctggttttggctggaaccaaaatccacaagttcaaaccttgaagaattctcaaggttctattcataatttagtgaggtctggagttactgttgaagggaaagttaatgtaggggcacaaggagcttttaactctgcctctgcaccacagatggaatttcccacagttcctccatacaacccctcttccttcggagctagctcacagtttctggacaaaggcaaggagttggtttccagcattataagcactgaacctcattcatctaaagttgcatctcagcctgggatttctcatggaagtcccatgcaagaaaggcaaggtatgatcagggtgccacagagaggcgaggcatcatttcaggaacgcaggccatcttcacttccgagtagaagtactgggccaagtccaatgtctcacatttcttccaacacaccatttaaagaacagcagctgaagcagctcagagcacagtgcttagtatttcttgcatttaggaataatttgcagcccaggaaggtacatcttgaaattgctttgggcagagggcctcctgcagaaagtgacagtgcaggtcaaaggggcagcgagggcagagtgtctgatgctctgggaaaggaaaatggtagcagtcgggagaactctggtgtcttttgtaggcaaactgatatctctagacttccagccacatctgcaggaagtattgcagaggatgattccttatcgaaggatccagaaaatgctacaaaaaaaatcaagttagctgaacaggagaagtcattgatggaagtagaaaatgtccagcaagcttctgttatgcaaggaactagttctgaaatgcgttcccaagaaactgcatctcaaaatccatatcgaccacaacagtcatattatcaaggagatacaagaagaatcgcctcggatatccataggactgatgctgaaattttgaaccagaatttaagttggggaggccagggatctactgctttgggtggtactagacagcttctgaatcaggaaactaaagaatcacttgcaccttcaaagtcacaccatatgcctgttgatggttacaactccaatatacaaggaatagatcggactccagagatagctggagctggtaatgatgttgaaaattgtagccacgtagcagatattgtgcctgagcaggctgctgatgaaggagatgaggacctctcagagcatgaggatttattgtcatctccaaagcacacaatgacggaaaaatggatcttagattaccagaagagaatttacaatgagaaacaaaagagaacattggagcagcataaggtacacagcagaatgtcagcaacatatgaggagctaaaggagagcgttaattcatccgaagatctttctgcaaagaccaagagcgtcattgaattgaaaaagcttcagcttctgccacttcaacgtcgtgtacgcagtgaatttttgctggattttttcaagcctaatacatccgacttagagcgcataaaatcactgaagaaacataggcatgggcggcgggtgaaacagcttgaaaaaattgaacagaaaatgaaggaagaaaggcaaaagagaattcgtgagagacagaaggaattctttgctgatattgaagcttacagagagaaactcgaggataacttcaaggttaagagagagcgcttgaaggggttcaatcgatacataaaagaatttcac

SEQ ID NO: 4101 - DNA, 781 bp, Zea mays
  Clone ID: 700349095_FLI
cgaatcacagacgcgtctatctcagcttgctgcactgcactaccctgccctgccatcatatcgtacgtgagcccggccgagcgagagcgagggagaggcatggctgctccgaagctcgcgacgctggcgctggccgtgctcctggcggcgaccgtggtggctcccccggccgcggtgcgcgcggcgatgtcgtgttccaccgtgtacagcacgctgatgccgtgcctgccgttcgtccagatgggcggggccatgccgccccagccgtgctgcggcggcatccgcagcctgctgcagcaggccaacaacacccccgaccgccgcaccatctgcggctgcctcaagaacgtcgccaacggcgccaacgggagcggcacctacatcagccgcgccgccgcgctgcccagcaagtgcggcgtcgccctgccgtacaagatcagcaccaacgttaactgcaacacgattaattaagtgaggcgtcctgtgcgcgtcccgggcgaggaatgcatgcatggcgctggcggagagtaataaaataatgctactggtattttaagctagatcgaggtgtgcctgtctctagtcatttattatggtgtttaggaatcgtcgtctacacagttcgtaacggtgtatcgtggatgcatgttgccgcgagcagagtacgtaggcatgaaccgatgtgtgcgcttctgtctgtgtactctctctatgtagtaatgtgtgggtgctttgatccaaatgtattcgctcgtgagtcgtggaagtagatcgtttcagt

SEQ ID NO: 4102 - DNA, 2119 bp, Zea mays
  Clone ID: 700349096_FLI
cgaggcttgagcgctcacgtcccggcgttcccgtgccggtggccaagccagcggccgacgagatggactacctcaggacggtggttccgtcacaactcttggcagagcgcggctccaatcttgtcgtcatcaacccaggatcgggaaatgtgcgaatggggtttgctagtcaggatgtgccattcaatataccacattgcattgcccgacacatcaatccacaagagggcgaagaaccaagattctctgtgcgcgatcagatgctcaactgccatgctacttcatcgcagaatgcagagcgggagagtgcatatgatattattgcagcactgatgaaaatcccatttttggacgatgaagaaatgccttcaccgaaccaaccccttcctccaaagatgggacgtgttgatggcttctcttcgcagcaaaacagagacgataataaattcacttggacagatgtgtcagagagaattattaagccatccacaccattcgataggtcagtatacaaggatgctgaggaagatactctgccaagcacatctgatgatgataatggacaggactttaaagagaataagtataaagaaatgatatttggagaagatgctctgaaaatccctccttcagagtcatactgtctgagtcgcccaattaggagaggccattttaatgtgtcccataattattcagtgcatcaggttttagaagatttacgcactatttggaactggatactgacagaaaagttgcatatcaacccaagagacagaggtctatattctgcaattcttgttcttggggagacatttgacaaccgagaaataaaagagatgctgtctattgtccttcatgatttggggttcagcactgcagttgtacatcaggaagctctatctgcagcgtttggaaatggtttatctacaacttgtgttgtcaacattggtgctcaagttacacaagtagtttgtgttgaggacatctccagatgcttgctttgggttcaacgtcgccatggcacgtggccaaacttccaaactgatccaatgagcaatcctatagatatgctaatgctcaacaaaatcaaagagtcatatagccaaataaagactgggagcattgatgcagctgtccttgttcattcatatgataatgaaaggtctggtggacatcagaagacaagactatcagcaattaatgttcctcctatgggtcttctttacccaagggttcttgttccagaagagtaccctccacctcctcgatcttggttccaagactatgatgacatgctggaggatacctggcaaacaagtgatggtctttaccctagtgggaatggtgggtttggcatgtgggacagttatccgatgtttcccactagattaaagaaatttgataacattggcctcgtagaggccattattagtagtgtactttcaacaggacgtgttgaccttcaaaagaagctgtttggtagcattcagttggttggtggtgcagcttctacagctggccttgcacaagtgctggagcaaagggttcgcactaaaatttcagcaaaccaatctattgagaaagttgaggtgttgcaatctaggacttatccattatttgttccatggaaaggtggagtgattttgggcgtccttgatattggtaaggatgcgtggattcatagagaagattggattaaaaatggtgtccacatcgggagtggcagaaaatataaggattcctattttcttcaggcgcaagtaatgtgctactacaacgtataacagtatcttatttccgagctacacacgaagacttgcacttatacaggttgttcgaccgtccaaaccatcctagaatatgattggtggactgcgattaaattgcgtacatgatgcatcagttctatgcatgctcgctgctgtctgttcggaggtcatcaactcgggacctggactaagggccttgtcgttcgctcaacccctatgaaaaagtttggctttctaaagatgtagtagaagtactcatttattccctgccaattgaacatttcaaatcttcgtatggtgttaatgaaaaatctgatgtttggattcgtatttatttccaatgataatgt

SEQ ID NO: 4103 - DNA, 2856 bp, Zea mays
  Clone ID: 700349116_FLI
atgccgtgaatgggagtggcggggcgctgcgggcggcggctgcgtacatggaggccggggcaccgccccgcggctggcgctggggggtgctctggctcgtcagcgtcgagattgtgttggttctagtctgcactcgcggagctggtgcggattctggtgaaagcaaaggatcgtttctgcaagactctgaagctggagaaaaggatgtctaccttagccactcctgcatccacgacgagatactacatcaacggcgacgagctgggaggaaggagtactctgtcatgccacaagtgtaccatgagtctcgggaggatgcggaacgcgtaagaggacggcacttgttgggcatgtcatcttggcgtgctccgcacgagaatgccaggaagccaatacgaatatacctcaattatgatgccgtcggccattcgcccgaccgtgattgtaaaaatgttggcgacatcgtgaagcttggcgaacctcctgtaccatcagcaccaggaacacctatatgcgatcctcatggtgatccaccactggtgggagactgctggtacaattgcacccttgaggacatagctgggaaagacaagaagcaacgtctccgtaaggcactggggcaaacagtagagtggtttagaaaagctctagctgttgaacctgtcaaggggaacctacggctcagtgggtactcagcttgtggtcaggatggaggtgtacaactacctcatgcgtatgttgaagatggtgttgctaatgctgatttagtcctcttagtaacaactagaccaacaacaggtaacacccttgcatgggctgtggcctgtgaacgtgaccagtggggtcgggccattgcaggacatgttaatgtggcccctcgtcatttgacagctgaagctgaaacattactttcagctactctaatacacgaggttatgcatgttctagggtttgatcctcatgccttcacacattttcgtgatgaaaggaaaaggagacgtggtcaggttactgctcaaagtttggataaaaagcttggaagaatggttactcgtgttgtcttaccacgagttgtcatgcacgcgagacatcattatggagcattttcccaaaacttcactgggttagaattggaagacgggggaggccggggcacctcaggttcacattgggagaagaggctcttaatgaatgagatcatgactgggtcagtggatacgagatcagtggtttcaagaatgactttagcattactggaggacagtggatggtatcaagctaattacagcatggctgaacatttagattggggtcagaatcagggaacagagtttgttatatctccttgcaactcatggaaaggggcataccattgcaatacaactcaactatcaggatgcacatataatagggaggcagaaggttactgccctatagtaaactatagtggggacttgcccaagtgggctcaatattttccccaagccaataaaggtggtcaatcttcattagcagactactgcacatactatgttgcttattctgatggttcatgcactgatgtaaatagtgcacgggcgcctgacagaatgttaggtgaagtgcgaggaagtaattcgaggtgcatggcctcaacactagtgcgaactgggtttgtacggggatctatgacccaaggaaatggctgttatcagcaccgctgcacgaacaactcactagaggttgctgttgatgggatctggaagtcatgtccgcaatctggtgggcctgttcagtttccaggattcaacggggaattaatttgtccgatgtatcatgagttgtgtactactgtaccagttccaatgactggccaatgtccaaagtcatgcagttttaacggtgactgcattgatggaacctgtcactgctttcctggttttcatggccatgactgcagcagaagatcttgcccagacaagtgcagtaaccatggtacatgcaaagctaatgggatctgtgaatgtcaaagtggatggacagggattgactgctctacagattatgcaggctacacatgtcagaagggttctgcaatactgcccagtctgtcaatgtgtcatgatgtacttgttagagattcagatgggcagcattgtgcgccaagtgagctcagtatactacagcagcttgaaactgtagttctcgtgccaaattacaatagattgatgccaagtgggcggaccttccttaacttcttcaacaatgccaactgtgcagcagctgcaaagcggctagcctgctggatctcaattcaacggtgtgacgaggatggggacaacaggctccgggtatgctactctgcatgcgaattgtacaatacagcttgtggagcgggtctggattgttcagaccagaccctttttagcaaaagggaagaagaagagaagggtgttccgtgcacaggatatggcgagaagaagtctttctggctataacatctgtgaagcttcttccgttatggctctggtagaagctcagcgtttgtgtaaagtattttccaccccaaattattttctcttttttccccatttcatccactacttcccaattgtaggatacgggaagtaagcgtccgtttcacctaggcacccgaagatgggctgccctggtgtacaagctatgttggagtgggctctttgttagaaggttagtctgacatgaaaaggggagtggacctggtggtgaaagttggatggtagatttttcgttttcaccgcttaagaattagtgattggaatgaatgtgtaaagattgatgtgtgttgtacacactctttacagaatcatttcaatgggagcccgtgttgtgttcttt

SEQ ID NO: 4104 - DNA, 1150 bp, Zea mays
  Clone ID: 700349132_FLI
ccggagccgccgccgccgccgccgccgccgacggggacggggacggggacagggaaaccaccaccaccaccggccatattaacagctgcgcgtgcacggtggagttctacttccgcccgcgattcgaccgctcgttccgtctcgaccttcaggcgggtagcaggttgaccgtccgggaattcaccgtatcccgggatacgtatgggttccaaagcgtccttctgtgtcacgctcctcttgctgctcgccgccgcctggggacctgccgacgatgctgctgaactcccagaccatagagctattaccttgaaggagcaggtttcttcgaccgagattcctgtccgtctcaagagtggcagcccgctgtgctcagcctgtgaagacttcacgggcaaagctgtcagttatatcagtgagaaacagacgcaagataaggtcatgggattccttcatgacgcttgctctcagtcattctcgtttgaacagaagtgtgatgaattgatggactcttacgcaaccctcctgtttgccaagatcacggagatcaaaccagaagcgttctgcaaacggtatggcctgtgcaggggcacggctcttttctctggtgtgacaagtgacagcacatgtgtgttctgccaccacctgcttgatgaagttatgtccaaactgaaagatccggacgcggagtttgagataattcagattcttatcaaggagtgcaataagattgaaggccacgtccagcagtgcaagcgactggtcctgcaatacattcccctcatcctggtgaacggcgagaagttcctcgagaagaatgatgtttgcgcgctcgttcaggcttgtccagccacccataagaggactttcagctcagccttgaaggaggccttgttgctgagtgacgcttgaaggttggagaagaacacgcaaagcgtttaacagtggttggaaatagtgtgtccaagtgccgtgtttgtacatataattgtcatatgaatgcatgaagacgtgtcttgtgccctgcattggttccatcttgtatcataattcataaacacgttgtcttgagtagatttttatggacatccacagggggtgaaggttaaaatatatttgtatcataattcatataagcacattgtcttgagct

SEQ ID NO: 4105 - DNA, 1838 bp, Zea mays
  Clone ID: 700349140_FLI
agcgcacacacacgcaaccagatctcccccaaatccagccgtcggcacctccgcttcaagatgcagatctttgtgaaaaccctgactggcaagactatcaccctcgaggtggagtcgtctgacaccattgacaacgttaaggccaagatccaggacaaggagggcatccccccagaccagcagcggctcatcttcgctggcaaacagcttgaggacgggcgcacgcttgctgactacaacatccagaaggagagcaccctccaccttgtgctccgcctcaggggaggcatgcagatcttcgtgaagaccctgaccggcaagactatcaccctcgaggtggagtcctccgacaccattgacaacgtcaaggccaagatccaggacaaggagggcatccctccagaccagcagcggctcatctttgctgggaagcagcttgaggacgggcgcacgcttgccgactacaacatccagaaggagagcaccctccacttggtgctgcgcctcagaggaggcatgcagatcttcgtgaagaccctgaccggcaagactatcaccctcgaggtagagtcttcagacaccatcgacaacgtcaaggccaagatccaggacaaggagggcattcccccagaccagcagcggctcatctttgctgggaagcagcttgaggacgggcgcacgcttgccgactacaacatccagaaggagagcaccctccacttggtgctgcgcctcaggggaggcatgcagatcttcgtgaagaccctgaccggcaagactatcacccttgaggtggagtcttcagacaccatcgacaacgtcaaggccaagatccaggacaaggagggcatcccaccggaccagcagcgtttgatcttcgctggcaagcagctggaggatggccgcacccttgcggattacaacatccagaaggagagcaccctccacctggtgctccgtctcaggggtggcatgcagatctttgtgaagacactcactggcaagacaatcacccttgaggtggagtcttcggataccattgacaatgtcaaggccaagatccaggacaaggagggcatcccaccggaccagcagcgcctcatcttcgccggcaagcagctggaggatggccgcaccctggcggattacaacatccagaaggagagcactctccacctggtgctccgcctcaggggtggcatgcagatttttgtgaagacattgactggcaagactatcaccttggaggtggagagctctgacaccattgacaatgtgaaggccaagatccaggacaaggagggcattcccccagaccagcagcgtctgatctttgcgggcaagcagctggaggatggccgcactctcgcggactacaacatccagaaggagagcacccttcaccttgttctccgcctcaggggtggtatgcagatctttgtgaagaccctgactggaaaaaccataaccctggaggttgagagctcggacaccatcgacaatgtgaaggcgaagatccaggacaaggagggcatccccccggaccagcagcgtctgatcttcgccggcaaacagctggaggatggccgcaccctagcagactacaacatccaaaaggagagcaccctccaccttgtgctccgtctccgtggtggtcagtaagtcatgggtcgtttaagctgccgatgtgcctgcgtcgtctggtgccctctccatatggaggttgtcgaagtatctgctgttcgtgtcagtgttggtttaataatggaccggttgtgttgtgtgtgcgtactacccagaactatgacaaatcatgaataagtttgttgtttgaaatt

SEQ ID NO: 4106 - DNA, 1200 bp, Zea mays
  Clone ID: 700349145_FLI
gaagggggagcgcaacacgcgcggtcgccgggagagagagagagagaaagggcgagctagcgagcgagatccccctctcccgctgccggatccgatctgacctgacctcgtcgccgcctgccgtgggagggagaagaggaagaggaggcggaggcggcggagatggcaccggtgtcagcgctcgccaagtacaagctcgtcttcctgggggaccagtccgtcggcaagacgagcatcatcacccgcttcatgtacgacaagttcgataacacctaccaggctacgattggtattgatttcctgtcaaagacaatgtaccttgaagatagaactgtgagactccaactctgggatactgctggtcaggaaagattcaggagtttaattccaagctatattagagactcttcagttgctgtcattgtattcgatgttgcaagcaggcagtccttcttaaatacatctaagtggatagaggaagttcgcactgagaggggcagtgatgttatcattgtgcttgttgggaacaaaactgaccttgttgacaagaggcaagtctcaatagaggaaggggagggcaaggcgaaggaccttggagtcatgtttattgaaaccagtgctaaggctgggtttaacattaaggcgctgttccgtaaaattgctgctgcacttcctggaatggagacgctctcatcagcgaagcaggaagacatggttgatgtgaacttgaggtccggcaatgcaaactcgtcccagtctcaggctcaggctgggggatgcagttgttagttgcagtctctgacacttgcttgctcatgatctttgggactctgagcatcagaaggcgttatcactgatgcttctctcgggaagaagagttgattgcctctcgccagtgaacacaccatagtctttacccggtgaatggaccgtttgcattggaacgatacgttttatgagttttctgttatttcctcagtggcctaagctagcaacagtgtatagttgggttgacactcaaacttctaccattcgagttgggtattagaactagttattattggttcatgttgaacttatatatatttccatccttttgcagttagtttgagtcatatttgctgtgtaccaaacatgtattgcaaatttggaatttttgtaagctataataaggccagcacggcaatatccccacatgat

SEQ ID NO: 4107 - DNA, 1502 bp, Zea mays
  Clone ID: 700349147_FLI
cacccatattccattttggttatcctcttgcgtcacacctcctccctcctggcctcctcctgcggcccacttatatataccaccacgtcgatgcgctgctccgccggcatctccatcgccgtcgcgccgccgtagatggcctgacatttttcacttcatttgtcatcccaattccacaaacctcgcgcgtggcggcggagggaaacaaaaaaaaaaggaaggatggcgttggagccggtggcgcgggcggtggcggaggaggtggcgcgctggggcgcgatgcgccagaccggggtcagcttgcgctacatgatggagttcggggtgcgccccacggagcggaccctcctgctcgccgcacagttcctgcacaaggagctccccatccgcatcgcgcgacgggcgctcgacctcgactcgctccccttcggcctctccaccaagcccgccatcctcaaggtgagagattggtatgtggagtcattccgtgacatccggtccttcccagaggtgaagaaccaggaagatgaactcgccttcacccagatgatcaaaatgatcaaggtgcggcacaccaatgtggtgcctgcggttgcattgggtgtgcagcagctgaagaaggacttgggtggtccaaaggcgttcccacctggaatccatgagatccatcagttccttgatcgcttctacatgtcaaggattgggatccggatgctgatagggcagcacgtcgctttgcatgaccctgatccagagcctggtgtgatagggcttataaacacaaaaatgtcacccatgacagtagctcgaattgctagtgaagatgcacgtgctatttgcatgcgggagtatggatcatctcctaatgtcgacatatatggtgatccggggtttacattcccatatgttacaccacatctacatctcatgatttttgagctggtgaagaactcccttcgcgcagtacaggaacggtatatggattctgataagcttgcacctccggttcgaatcatagttgctgatggagcagaggacgtgactattaagattactgatgaaggtggtggaataccaaggagtggtctctcaagaatttttacgtatctctatagtacagcagaaaaccctcctgatcttgatgtacataatgaaggagtaactatggctggatatggttatgggattcctattagtcgtctttatgctcgatatttcggcggggacttgcagatcatctctatggaaggatatggaactgatgcatacctccacttatcacggctgggagattcggaggaacccttgacttaatcgattcataagaagccattcctgtagttaggactctattgctttctcaattaccgtgctggtatgcaaatattgttctgaaggccagtcacctattagttcagctgtccatgccctatttgttatctttgttgttcattcatcatctcgatggaatgtgatcataattcagaatagttttgcttctg

SEQ ID NO: 4108 - DNA, 1519 bp, Zea mays
  Clone ID: 700349150_FLI
gttcttcacctctgggaaggaccggatgtcacggaatgactccacataccaatctggtgcctgcggttgcattgggtgtgcagcagctgaagaaggacttgggtggtccaaaggcgttcccacctggaatccatgagatccatcagttccttgatcgcttctacatgtcaaggattgggatccggatgctgatagggcagcacgtcgctttgcatgaccctgatccagagcctggtgtgatagggcttataaacacaaaaatgtcacccatgacagtagctcgaattgctagtgaagatgcacgtgctatttgcatgcgggagtatggatcatctcctaatgtcgacatatatggtgatccggggtttacattcccatatgttacaccacatctacatctcatgatttttgagctggtgaagaactcccttcgcgcagtacaggaacggtatatggattctgataagcttgcacctccggttcgaatcatagttgctgatggagcagaggacgtgactattaaggtgtaactctacctaagattcacattaccttttcttattggaagtttgtaatctcaaacatggtgctgatttttttttaaaaaaaaatacaagcttgcagttccattaatttttatgtgtatgttaatttattcttcgtggtacttgtggtaggcaaacaaaacaaaagtaattctagagaactgaagttgtgagctgtctttaaatctgagtgatgttgacccagtcttatatgtgcctggaagacaaatagacattgatgtcgtgcgaagtagtttcatttttacagctgaccttgatcctgatgctggacttttcttgtatttgcatggttcgatggtggtactgatagccaaaggagtaaaagagatttaagggaagttcactctatttatttcttgctggcctgaggagacaagacccgtattaatagtcatccagcaatgtcagctgactttttttttcttctggttacagccaaatgcaactagcagaaatgtaaataaacgccctttatgatgctaacagatagccaatccaactaactggctaacgccttttgttagaattttctcattaattgtgatattcaaccgacaaacttgtatcttctgcacctatgttagcaaaaatcaatagcttcgattattcatgatctggtatgaagtatgaactgtttgactaaaccatacttttgcagattactgatgaaggtggtggaataccaaggagtggtctctcaagaatttttacgtatctctatagtacagcagaaaaccctcctgatcttgatgtacataatgaaggagtaactatggctggatatggttatgggattcctattagtcgtctttatgctcgatatttcggcggggacttgcagatcatctctatggaaggatatggtgtgtacatacttaacgttttatattcagaaattaagcacactgaagaatgtggctgtattcatctctctatgattttcataagtcagt

SEQ ID NO: 4109 - DNA, 1673 bp, Zea mays
  Clone ID: 700349153_FLI
agcctccgtccctctccttcccttacctcgcctcgtctcctctccttgagatctccagggtacgagcgcattcgcgattttggccgcctccgccgccgtccgggaagatggcgggtctgggaaaggcgatgtacgcggtggggttctggatccgggagactggccaggccctcgaccgcctgggctgccgcctgcagggcaagtacttcttccacgagcagatttcaaggcatcgcaccatcatgaatatctttgacaaaacccctcatgtgcataaagacgcatttgttgctccaagtgcatcccttattggtgatgttcaagtcgggtcaggagcttccatttggtatgggtgcgtcttaagaggggatgcaaacatcatacaaattggatctgggaccaatatacaagacaattctcttatacatgtggctaaatctaatctaagtgggaaggtctttccaacaaccattggtaataacgtcacagtaggtcatagtgctgtgttacaaggatgcacggttgaggatgaggcttttgttggcattggggcaaccctattagatggtgttgttgttgaaaagcacggaatggtggctgctggagccctcgtacggcagaatactaggatcccttgtggagaggttgagcacacttcctcaactgtcctttgctttgggttcttaattaagccgtctcaagcacctttaccttttttatttcatcgactagtttcaccaagacagggttttcttgtgatgatggaaccccaatgacacagactgcatcgagcactaaattattgttcttcggtgtctaatacatttccatgtggcatacatatttacaggccttgtgcagtggtgactggtgagagagatgtctcactgggtcgcaggttcgaagcagtctctccccatttacggggagaagacttgcctccgtttatgccttcattggatcccactcatgtgggaacttcgggcactgggtctgccctttatacatatttatagtgtccatgagtggaagtggaacgataatatgctctagaggccttgttttgtatcttatttctgcatgatttcatgactatgctttgttggatttaggtatggggagggaaccctgccaaatttctgaggaagctcacagatgacgagatcagtttcattgcggaatcagctgccaactattccaatctgtccaaggtccatgctgctgagaatgccaaacctcttgaaaagattgagtttgagaaggtgttgggcaagaagtttgctcaccaggatgagtatgattcctcgattggcgtcactgaaggggcaccaccagagctcacgtccccaaatccagcccaatgaacctctgtttctgttttctctttggcgccttaatcattttctgttggacagtgctggatcgttgatcggggtactgttccatgacactggtggtttatgtttacttttcctccccaataatcttggatcgagcgatgttataaagctggccatgcacttcttccagattctgtattcggtatgtttaagatgtgctccctttcataacctctgaagagtagttttagcaccgtccatattcgtcatgagttctgtactatgctttctggcccggcgtgtatgaaccatctttataaaaatctcttaagc

SEQ ID NO: 4110 - DNA, 1527 bp, Zea mays
  Clone ID: 700349155_FLI
ctgagatacgtgagtggtgggctgacaagttctcctatgaaaattacaagggatcaactccaacactgtacatttggaatgatatgaatgagccatccgtcttcaatggccccgaggtcaccatgcccagggatgcaatgcattatggagatgttgaacaccgagaattgcataatgcatatgggtactactttcatatggctaccgcagatggacttctcaagcgaggcgaggggaaagatagaccctttgttttgtcaagggccttctttgctggaagtcaacggtatggtgcagtttggacaggcgacaactccgcagactgggatcacttgaaatcttctatcccaatggtcttaactcttggtcttactggcttgcctttctctggcgcggatattggtggattctttggaaacccagaaccagacctattggtgcgttggtaccaagtaggagcattttatcctttctttaggggtcatgctcaccatgacaccaagagacgtgagccatggttatttggagagcgaagaactgccatcataagggaggcgatacatatgcggtattcattgttgccctacttctacacgctgttcagagaggctagtgtaaatggcattcctgtcatgcgtcctttatggttagaatttcctgacgataaagaaacatataacaatggcgaggcatttatggtggggcccagccttttagctcaaggaatatacgaagagggccagaaatcagtgtcggtctaccttcctgggaaggagtcatggtatgacttgagaaatggatctccatacaagggaagcgcgacacacaagctacaggttttagaagatagcattcccagcttccaaagggctggtacaattgtgccaagaaaggacagattcagacgcagttctactcagatggtgaatgatccatacactctggtgatagcactcaatagctcaggtgctggagaaggcgaactttatgtggatgacgggaaaagttatgattaccagcaaggggcattcattcatcgccgatttgtctttgcagacaataagctaacttcattcaatattgggcctgacaatttaggcaagaaatttagaagtgattgcgtgattgaaagaattataatcctcggtttacgatccggagtgaagaaggctattattgagcctggaaatcaagaactagaaattgaatcagggccaattagtttaaggagtggttccagcccagtcgccccaacaatccggaggcccaatgttcgcattgcagacagttggacaataaggatagcataaaaggtaggccattcacatctggatcctgatgtgtgatgtcttcttttgtctgctgtcaggttgcaaaattaggccagcctttagaagtttagttgtggccttgaaatatttgcatgtaaccggtatttaagctgttccaactgccaattttgacataaatacttatatacattgctgatgtatattgtagctttgatacatgagcattttatcttgc

SEQ ID NO: 4111 - DNA, 1398 bp, Zea mays
  Clone ID: 700349181_FLI
ccgcgccgctcgcgccgccctcatcttcccagccccaacgcgacgcaccacaagggccctcgccatgtcgaagaaagtaggacgagcgaagaaagcagcgggcggcggcgagctgtcccgcttcctggagtcgcatctccagaccattagcgacaccttccagatgatggcggagtcggctccgggggccttggagcggacggagtggtctgaggtcgttaagctcggcgaccaggtctccaggcaggccaccgtcgctggaatgctctggagcggtgacttgcctgatgtagagaccctcaaagagaacatcgttgcttatttcaacatcctacagggatttcttttggtttgccacggaagcatggtcggtgctgggcctactctacacaagtccatctttgggtctgcaaaagacgtggttgactctagcttctcattgttcaagcatgctgtctctgcttatgaatctcgcagccctgaccgcaacacaactataccccaggtcacaggaactgtatgggaagcttgtgctgctctcaagaaggtgcctgcatcaaactgcattgccataggacgagccatgaccaggataggtgtgtgtctgaaagatgttctccgagaaatgaatgagctccctattggtgattctggtgttagtactgctgagaagtcttccaatggtgttgtcgacacaacgagttgttctgatagagatgagaggtctgatcttgatttagatgatgatgacgacgacgacgacgacgagttcactgaagaagaggttgctgttgccaagttggttattaacgtggtatctgattccttggttgtagtgaaagaggcaattcgtttcattactggtttgctcaggagctctggtaacaaagacaaagatgaggacaaagttgagccaatggagaaattgctgagccactgcaaggagatcgcggaccaggtcaatgatcttggggcttctgtatacccaccacaagactcgtctgagatggagctcgctataaaaagactgtacaatggcatcaacgggatgcgcaaggaaatagggaacctcggtggcgcacctgagagcacctttgccgcccttgaaggattcgaaaagtgccttggatctctgcgggccaggttagctgatgatgtggtgaacgagatggaaggtcttaatattagccattagcacgtactgttcagatttttccatagcagtgttatgccagtatatcttctggttttgcacgatggaaggagcttctgtggtttcagtaaatgaggcgtccggtctctgtactgatggcgttgttgcgggtcatcgattgtaaaggaagtgggcctggattgctgtaacttctctggttagtgatgccactgtttgtttgcatt

SEQ ID NO: 4112 - DNA, 956 bp, Zea mays
  Clone ID: 700349182_FLI
cattcccgagtctccagccaaccgcatccagtccacccccatccccctcgaccccgacaaacccgacccgatggcgcccaaggccgagaagaagccagcggagaagaagccggcggccgaggagaaggcggagaagacgaccgcaggtaagaagcccaagtccgagaagcgcctgccggcctcgaagtcctccggcaaggagggcggcgagaagaaggggaagaagaaggccaagaagagcgtggagacctacaaaatctacatcttcaaggtcctgaagcaggtgcaccccgacatcggcatctcctccaaggccatgtccatcatgaactccttcatcaacgacatattcgagaagctcgccggcgaggccgccaagctcgcgcggtacaacaagaagcccaccatcacctcccgcgagatccagacctccgtgcgcctcgtcctcccaggagagctcgccaaacatgccgtctccgagggaaccaaggccgtcaccaagttcaccagcaattgagcagcctgcagcgtccacggatttgttaggtctccccttcttacaagggttcttcgtcgtgtcctctacccctccccgcctatgtatgtgctgtgaaatcgttgatgttctcgtcgggtgaacaaaggccagtagctagcttgcctgcttcataaatcgtgccggattgtaatgggcctcttagatttgacgcccctattttggaatatagttgtatcggtgccttccctgcttgctaattttcttctgccctggtaatttgggatctaagattttgaccgggcagtggagaaccgatgaagatacagggtcatgaggtcgaaagctcatgggtttgtttcagtctcaggttcttcggcatggatatatttatgagcggtaactatgtattgcagccatatggttcaccatgtgatgaaatgatgattccatttgcgcc

SEQ ID NO: 4113 - DNA, 632 bp, Zea mays
  Clone ID: 700349187_FLI
gcaatctctagcagcagatcctcgtgcgaagcaaagcgctagccccttcgtactgtcccgatggcccgcacgaagcagacggcgaggaagtccactggcggcaaggcgccaaggaagcagctggccacgaaggcggcgcgcaagtctgccccggcgaccggcggagtgaagaagccccaccgtttccgccccggcaccgtcgcgctccgggagatccgcaagtatcagaagagcacggagctgctgatccgcaagctgccgttccagcgcctggttcgtgagatcgcccaggacttcaagaccgaccttcgcttccagagctccgccgtcgctgcgctgcaggaggcgtccgaggcctacctcgtcgggctcttcgaggacaccaacctctgcgccattcacgccaagcgcgtcaccattatgcccaaggacatccagctcgcccgccgcatccgtggggagagggcctaggcgtcgtcgcggtggaggtcgaagtagtggtcgcagtttctgtcatcaccgtctggctagaaggtgtagagatgtgccgggttctgtagtttgggttatcggtcgaatcatgatgtagttggttcttcacagctgtaatttaactatgacgatgccatggc

SEQ ID NO: 4114 - DNA, 909 bp, Zea mays
  Clone ID: 700349418_FLI
gaatcgcgttggttcgacgcaaacgctacccggcgcccccttgcccttggggccggctattttaccgcacccgttctcccctctctaccgcagatcagatcacactcgtagagagaaggaaaaatatccccaaaccctagctcccgatctcgatggcgaaccctcgcgtcttcttcgacatgaccgtcggcggcgccccggcgggccggatcgtgatggagctgtacgccaacgaggtgcccaagaccgcggagaacttccgcgcgctgtgcacgggcgagaagggcgtgggcaagtccgggaagccgctccactacaagggctccaccttccaccgcgtcatccccgagttcatgtgccagggcggcgacttcacccgcggcaacggcaccggcggcgagtccatctacggcgagaagttccccgacgagaagttcgtgcgcaagcacaccgcccccggtgtgctctccatggccaacgccgggcccaacaccaacggctcccagttcttcatctgcaccgtcgcgaccccttggctcgacggcaagcacgtcgtcttcggccaggtcgtcgagggcatggacgtcgtcaaggccatcgagaaggtgggcacccgcaacggctccacctccaaggtggtcaaggtcgctgactgcggacagctctcctagatctctctgatctggtctgttcggccgccctccctccgtcatcgtcgactccccctgcgtccgttcctttggatctgaataagatggtggtgatctgagtggtggtcttagtttatcatgtatcgctcgcagtttaatttagcggtttaggtgtggatctgtgaaccccatggcgcctctgcttgattcgtgtttcacctgttatgttctgagattcatgataatgctatgagaactg

SEQ ID NO: 4115 - DNA, 1116 bp, Zea mays
  Clone ID: 700349916_FLI
ccggcgtgctcgacgccgggaacggcctcaagtactacagcctcctcgacgcgcagctggacgccgtgttcgccgcggtcagcaggctcggggagggctacaacggcgtgcgcgtcgtggtctccgagacggggtggccgtccaagggcgacgccaacgaggcgggcgcttcggcggccaacgccgcggcgtacaacggcaacctggcccgccgcgtgctctccggcaacgccggcaccccgcgccgccccgacgccgacatcgacgtgtacctcttcgcgctcttcaacgagaaccagaagcccgggccgacctccgagcgcaactacggcgtcttctacccgaaccagcagaaggtgtacgacgtcgagttcgtcctcggcggcggcggcgccagccagggcaacggcggcctcgggtggcaggagaacggcggcggggcgagcagcaccagcaccaacccgccgagcggggtgaaggtgacgaccggggaggcgtggtgcgtggcgaacgcgatggccggggagcatcggctccaggcggcgctggactacgcgtgcggccccggcggcgcggactgcaaggccatccagcccggcgcggcgtgcttcgagcccaacaccatggtcgcgcacgcatcctacgccttcaacgactactaccagcgcaagggccggtccatcggaacctgcgacttcgccggcgccgcctacgtcgtcaaccaggcaccgaagatgggcaagtgcgacctcccatcgacggtctgaactgaagcagcagcggcgaggaccgtaacgccagcggccatctcgaggaacaaaagaatcgatggcaggcaggaggcagcacagcagctcagctcatcagtcgccctagagactggactggactctgggggacgccggaatctttgcccaccctttcagactttctttaccgctgcagctttgactccagccccgcagcgacgccgtagaacgaacatcgctgtactaggctgtagctgtacgccttcctttttgcagctttggctaatggtgggtgtgtgtgtggatatgtttgtttagtcatgaccagcactactacttctactactagcatgctactattaaaatc

SEQ ID NO: 4116 - DNA, 699 bp, Zea mays
  Clone ID: 700349960_FLI
ccaaaacctacctagccgccgccgcaggcggccccccatcgccgccaagatgcagatctttgtgaagactctgacggggaagaccatcactttggaggtggagtcctccgacaccattgacaatgtgaaggccaagatccaggacaaggagggcatccccccggaccagcagcggctcatcttcgccggcaagcagctcgaggacggtcgcaccctcgccgactacaacattcagaaggagtccaccctccacctggtgctccgcctccgcggtggcgccaagaagcgtaagaagaagacgtacaccaagcccaagaagatcaagcacaagcacaagaaggtgaagctctccgtgctgcagttctataaggtggacgacgccactggcaaggtgacccgcctccgcaaggagtgccccaacacagagtgcggcgcgggcgtcttcatggccaaccacttcgaccgccactactgcggcaagtgcggcctcacctatgtctacaaccagaaggcgtaattgcttgccccgatttgctttatccgccaacctatcaagcattcagatgttggttactcaaattgtatctcatttagatctgtctgaggttgaaacttaaatggagcagtagtatctatcatattggtacccctgttactgagtataattttgttttcatatccatccttacagacgattgc

SEQ ID NO: 4117 - DNA, 1951 bp, Zea mays
  Clone ID: 700350287_FLI
agccgcagagggactttttgtgtaaaatgcggtgggaaggtgcgctgcacctgcaagcagaggtgtgctctactgacagagtttgaactctcaagaggaggcgaggcagaaccgcaatcgcgaccgcgacccgcaggtgacatacatacggtgcgagcgccggaagccggaagcaccggtgacgaagccttccgtgtcatcactcatcaggatctcagggttttgtttcgtttcgcgggcgttgggaatccatccatggcgaggaagatgctcatcgacggggaggtggcggccgtcgcggatggtgggcactatgactacgatctcttcgtcatcggggcgggcagcggcggcgttcgcggctctcgcaccgccgcctccttcggagctaaggttgcgatttgtgagctcccattccaccccatcagctcagagtggctaggaggacatggtgggacttgcgtgatacgtggttgcgtacctaaaaagatactcgtgtatggtgcatcattccgtggagaatttgaggattcgaagaattttgggtgggagattaacggagatattaacttcaattggaaaacgctattggaaaataagactaaagaaattgttagattaaatggtgtgtatcagaggatccttaccagtgccggtgtgacaatgattgaaggggcaggcagtctagttgatgctcatactgttgaagttagccagcctgatggttcaaagcaaaggtatacagcgaagcacattttgatcgcgactggtagccgtgctcaacgtgtcaacatacctggaaaggatctggctattacttctgatgaggccttgagcttggaggagcttccaaagcgcgctgtaatcctgggtggcggatatattgctgttgaatttgcttctatctggagggggatgggtgctgaagtagatttgttttatcgaagagatcttcctctaagaggttttgatgatgagatgagagctattgttgcaagcaaccttgagggaaggggaatcaagttgcatccagggacaaatctctctgagttgagtaaaacggctgacggaataaaagttgtaactgataaaggagaagagctcattgcagatgttgtcctatttgcgacagggcgcacaccaaactcccagagactgaacttgcaagctgcaggcgttgagattgaccgggttggagccatcaaggttgacgaatattctcgtacttctgctcctagtgtatgggctgtgggtgatgtaacaaaccggattaatttaacacctgttgcattgatggaggcaacttgctttgctaaaactgtgtttggtggccagcaagttaagcctgatcacagagatgttccttgtgctgttttctccattccaccactatctgtagtgggcctcagcgaagaacaggccttggaggaagctaatggtgatattcttgttttcatctcatcattcaacccaatgaagaacagcatatccaagcgccaggagaagactatcatgaaactggtagttgatgctgaaactgacaaagtacttggtgcatccatgtgtggaccagacgcacctgaaattatccagggcatcgctattgcggttaaatgtggagccaccaaagcagacttcgacagcactgtcggaatccacccttccgctgctgaagagttcgtgaccatgcgcaccgtgacgaggcgcttgagcccgacatccaagccaaagacgaacttgtaagcaagaaattggtattctggggaaatgttacaccggacaaatactctggtttcatcacgttggtaatttttacgtcattggaactggaaccatgtatattgaaggaataagttgtttttttcatggcaacacaccgaaaataatgagaccgtggactttcttgatacaaataatgagctcaagcagagaacgtttatggttggttctc

SEQ ID NO: 4118 - DNA, 770 bp, Zea mays
  Clone ID: 700350290_FLI
ccaagccagtacccacagtcctacgagcagtcgcacgcaagtgtcaagagacaaaacggtcgacatggctcgcacgcaatctgccgtagcggtcgccgtggtggccgcggtgctgctgctggcagcggcggcgacgacctcggaggccgccatcacctgcgggcaggtgagctccgccatcgcgccctgcctctcctacgcccgcggcacggggtccggcccctccgcgtcctgctgtagcggcgtcaggaacctcaagagcgccgccagcaccgccgccgacaggcgcgccgcctgcaactgcctcaagaacgccgccaggggcgtcagcggcctcaacgccggcaacgccgccagcatcccctccaagtgcggcgtcagcatcccctacaccatcagcacctccaccgactgctccagggtgaactaaaacctagaccacgcgcgacgacggccgcctgatcgatcgaccaaccattccgccgtcgccgccggccggatcatcgatcgtcgtcatgatgatatctatcaatctacgcgtgatgatcgatggctacttgtctactgctatgtactactaaataaaatctctccgtgtgtgcacgtacgcttgcatgtgcatggtagcatgtatgtacgacgtcgtccatgtatgtgtgtgtgacgtgtgagacagagagagagagagagagagagagagacaggatcgatcgagagacggtcatgtccttttggctgtttggtttattcatatcacaacttttgagtgt

SEQ ID NO: 4119 - DNA, 1099 bp, Zea mays
  Clone ID: 700350740_FLI
gctgcacctcttttcatttcaccatctcctgcccccttaaaaaaaaaactcaccgtcgacacgccctcccgtcccgagagttctgaatcgaaaccgtcggccacgagagcagtgcgaagcgcccaccgcgatggctcgaaccaagcaccaggccgtgaggaagacggcggagaagcccaagaagaagctccagttcgagcgctcaggtggtgcgagtacctcggcgacgcaggaaagggctgctgggaccgggggaagagcggcgtctggaggtgactcagttaagaagacgaaaccacgccaccgctggcggccagggactgtagcgctgcgggagatcaggaagtaccagaagtccactgaaccgctcatcccctttgcgcctttcgtccgtgtggtgagggagttaaccaatttcgtaacaaacgggaaagtagagcgctataccgcagaagccctccttgcgctgcaagaggcagcagaattccacttgatagaactgtttgaaatggcgaatctgtgtgccatccatgccaagcgtgtcacaatcatgcaaaaggacatacaacttgcaaggcgtatcggaggaaggcgttgggcatgatatataatatccattctgattgcatcattcttgtgaatttgtttgtaggagctagacattagtgttgttgaatgctgcatggttcctaatccttttcgcagtctaacatctgtggagttagtatgttacatggcaacagctgaacatctgtggactataactatatggcaacagccgaagattgtgtctgtgggataactggttgttttggttgctcttcagtagtttgtttgcttcagtctgcagtatggactatggagtaaactgcatgctgaaacccgaaccactgctgaaacggcagttgccaggatagcaggagggcctttatgcacagtggaattgagtagagaactgagtaaaccatggttctttctccttttgaactggaacacacacagttggatcttgtttctcttcttatgccattgtcatcgtgtttataaggggtgtaaatggtacaaatattatctgcccgtattcaaatttgatctatct

SEQ ID NO: 4120 - DNA, 1199 bp, Zea mays
  Clone ID: 700350763_FLI
gtggtggatatggctataaccaaggcagatatgggaactatcaagaaaatggtggaatgctcagtcattcatccaccgtggagaagctctacgcatgggagaagaagctgtttcttgaggtcaagagttacgaggggtataagcaggagcatgataagaaggtcagtctgttgaggaagcaagaggtgaagggtgtggattacttgaagatggagaagaacaagatggagattgagagcctggagtccaagatgctggttgccaaccagtccatcgagaccaccacttctgagataatcaggctcagagaatccgagctatttccccagcttcttgagctgattgctggcttgatgagcatgtggaggggtatgtacgagtgccatcaagttcagacccacatcgtgcagcagctggagtacctgaacaatgctcggaataccaacccgacttccaatgtccaccggcaagcagctcttcagctcgagatagaggttgacaggtggtattcagccttctgtagtctggtgaaatcccagagagactacgtctactcattgaccggctggcttcgtctatccctgttctgccaccacgacccactgactaaagctcagaactccgatatctatggcttgtgtgaggaatggcagctagccatcgacagaatcccagataaggtggcctcggaagggatcaagactctcctgacagtgattcatgctgtcgtcattcaacaagctgaggagcataagcagaagaagagggcggagtctgcattcaaagagtttgagaagaaggcagaggagctgagagccctggagtcaaaatatgtcggcgctgaaggttacagagaaatgtcacgaaaatcatcggtagctgacaagcgggcgaaggttgaggctctgaggagccgtgccgacgaggagaagatcaaatacgagaagagcatcggggtcaccagagcaatgaccctgaataacctgcagactggcttccctaacgttttccaggcgatgacgggcttcgccagcgtgtgcatggaggcatttgagtcggtgtacaacttcaagcggagctcggacccgaagaggctgctgacctgaagcaatgttgtataaaatgtatacagtcctaggtttttagtaacaatgataccttgcaacctttgtctggctgttatcaggttctaatggcgc

SEQ ID NO: 4121 - DNA, 699 bp, Zea mays
  Clone ID: 700350779_FLI
aattcaagaaagtaatgtggcatgtaggtgacccaatgccccacgaggaatctgtggcatcagcagcggttggttctgcaatcaaagtaaaagctgctgccattgttgtgttcacattctcagggagagctgcgaggttagttgccaagtataggccaacaatgccaattttagcagttatcttcccacgtgaaggatccgatccatcaaagtggcgttcttatggcacaacacaggcaagacaatgtttcgcagtgagaggcgtgtaccctttgatggggagtactgatgaggccgaaactggtgggctaacaaaggaagagtatgggataaaacttgcgatgagctatggtcggtcggtcggcatagtgaagcctttcgacagggtgataatctttgaaaagattggtgattcttctgttgtcaagatcattgagtgtgaaggttaggcattagatgattgatacctacaaggctacaacccatgctgtagtttcatgtatcgcatgggagattacctccagttccatctcacttatttaaccaacaagtagagtacagcaagagcacaagatatcttgttagggaattttgccctcttttcagattgtcttttgatttgacgcaataaattatgatgtcacagatttatactggaattatgatttgattatgcaaatataggattgttggcccccc

SEQ ID NO: 4122 - DNA, 2057 bp, Zea mays
  Clone ID: 700351468_FLI
ctttcctctacgaaaaaaccatttttcagtataaaatttcgtttttctcctctcagtctccgacgccgccgcactcatccccccagacgaccaccctcctcctcctcccccacccacctcgccggaaccctagcgccgaccgcctgccgtgcccatcgacggcgatcgcattgctgcgccccgatggcgacccgcgcctccaagaattgcctctgcgcgggcagctcttcgttcgatgaccccgatgtggtcgaggtgtctccggcaaccgccgcggctgcagggtgggcctccggccaccacaagaggaagcggagccaggttgtaccgcaagaagtgattgaaatcgatgatgatgatcctgatggagtcatacttattggtgataaagcacaggtggaaaagaataagcaaactgctgtatgtcccatggattgctcaaagcatgccaagagtggttgggttcaggacatccctggtccaagcacatatgcttcaaaatataccagttcctgggttgacctgaaagtgtttcaagacgaggcagtttacaactattctgatggctacccctttgatggatttgaagaagactatgcttatgatgaagatgagtttgaggatgatggttatgacactccactcattgaaagtgagtatcaatttggtttgtctgccaagtttgataacttcaatgttctacatggtctggaggcttctttaccgtggaagcagaagactgctattgagattgcaaataagaccaaacctagtaaggctgtagatgataaaatcgaagaaaaatacaaggccttcaaacgatttgatactgttgatgatcatagtgatcattattattcaaagccagaatcaagaaaggttcaggcggtaaaaaagccatcaaaagactgggtcaaacgtattcagcatgagtggaaagtcttagagaaagatttgccagatactatatttgtgagggcatatgaggatagaatggacctgcttagagctgtaattatgggaccagctggtactccttaccatgacgggctcttcttctttgacatttacttccctcctcagtatccaaatgtaccaccgatggtgaattaccgtgctggtggtttgcggcttaatccaaacttgtatgcttgcgggaaggtgtgccttagcctcctaaacacctggactggcagtggatgtgagaagtggaacccggccaattcaactatgctgcaggtcctggtctctattcaagctttggttttgaatgcaaagccttatttcaatgagcctggctacgcaatgcatgctaacacagcccacggggagaagaaatccctgacatataatgaagacacgttcctgcattcctgcaggacgatgctgtattctcttcgaaatccaccaaagaatttcgaggattttgttgctggccatttccgcaagtatgggcgcaacatcctcgtggcttgcagagcctacctggagggtgcccaggttggatgcctctccggtgacggagtgcaagacgttgacgaaggcgacaagagctgctcggtgaggttcaagcagtcactgaagaggcttcacgaggaacttctggcggagttcaccgcgaagggcgcggactgtggcaagttcctcagcgagaaggcaaggtccggagcttccacatcggcagcggacaccacgttgaggctgtaaggcggagtcgggcttgctgttggaaataaatctgccattcaagctatcctcaacacagcaagtttgatgcctgagctgccgatcatctaactgctttctgtaggtagtctatgtatatacctgtctagctcttctggtaaagacataagcgagacatattgggcgtttagggacaccattataccgtaggtatttacgtgtttataactgctggccgcagccccggcagctgtgtcgggctgtgacctcgtcctcagcttcagcttgtgctgatatgattgggacccaccatttggatatcaaaatgatgttggtctaggttagtcaaagtcctgactgattcgtttgtg

SEQ ID NO: 4123 - DNA, 651 bp, Zea mays
  Clone ID: 700351763_FLI
gcaatctctagcagcagatcctcgtgcgaagcaaagcgctagccccttcgtactgtcccgatggcccgcacgaagcagacggcgaggaagtccactggcggcaaggcgccaaggaagcagctggccacgaaggcggcgcgcaagtctgccccggcgaccggcggagtgaagaagccccaccgtttccgccccggcaccgtcgcgctccgggagatccgcaagtatcagaagagcacggagctgctgatccgcaagctgccgttccagcgcctggttcgtgagatcgcccaggacttcaagaccgaccttcgcttccagagctccgccgtcgctgcgctgcaggaggcgtccgaggcctacctcgtcgggctcttcgaggacaccaacctctgcgccattcacgccaagcgcgtcaccattatgcccaaggacatccagctcgcccgccgcatccgtggggagagggcctaggcgtcgtcgcggtggaggtcgaagtagtggtcgcagtttctgtcatcaccgtctggctagaaggtgtagagatgtgccgggttctgtagtttgggttatcggtcgaatcatgatgtagttggttcttcacagctgtaatttaactatgacgatgccatggcaatgaagttctcagctatc

SEQ ID NO: 4124 - DNA, 1645 bp, Zea mays
  Clone ID: 700351818_FLI
cttctcacggtcacgctagcagcagtagccctcccccatcaccgaggagagagaagcctgtcgccgcgcgaccgccccacatggctaccgcgctcggtggggagcccaaccccaccgccgacgccatggaggtcgaccctccgcgcgcctccgccgacgagaagcatgtcgccactattattgcggggggtagtgatgcagtgacaggccacataatatcgactacgattgggggaaagaatggtgaaccaaagaggaccatcagctatatggctgagcgagttgttggaactggatcgtttggggttgtcttccaggcaaaatgcattgagactggtgaaactgttgcaattaagaaggttctacaggacaaaagatacaagaatagggagttacaaataatgcgatcaattgaccattgcaatgtcatttccctgaagcattgtttcttctctaccacaagtagggatgaacttttccttaacttagtcatggagtttgttccagagtcactttatcgcgttctgaaacactacaaagacatgaagcagaggatgccccttatatatgttaaattgtatatgtaccagatattccggggactagcttatattcatactgtaccaggaatttgtcaccgagatattaagcctcagaatatcttggtggatcctctttcccaccaagtcaaggtttgtgacttcgggagtgctaaaatcttgattaaaggtgaagctaatatatcatatatatgctcacgctattatcgtgctcctgagctcatatttggtgcaactgaatacacaacatctattgatatatggtcagctggatgtgttcttgctgagcttcttcttagtcaaccattatttcctggggaaagtgctgtggaccagctggttgagattatcaaggttttgggcaccccaacacgagaggaaattcgttgtatgaatcccaactatacagaattcaagtttcctcagataaaagcatgtccatggcacaagatcttccacaagagaatgcctccagaagcaatagatcttgtttcccgtcttcttcagtattcgccgaatctgcgatgtagtgcacttgaggcgtgtgctcattcattctttgacgaattacgagaatcacatgcaagactccctaacggacgcccatttcctccactattcaactttaagcaggaactagcaaacgcaccaccggagcttgtcagcaggctattaccagagcatgctcgacggcattcaggattcggttccttatttgggagtggaccgtagcccgtaggaaaatctcgttttaatgttgggctgctgtacgccgtcagagggcaatctgcatatcccaaatctaagttttagaacctgaccatcttgtcgaaaagttaccagccttagaaaaacccgaggtggcctcttgtgtccatgttctgccagtagcggcacataatgctggggggatggttaggtgtaattgttaagcacagagggtaactgactgagctaatgtattttcacgtttcagtctgtatcgaacttgtacctgtgtaccctgtaccaatcgcagctgatgtaatcatgtaaatgcttctaaactacttcaagttatcatgatggccaattcgcaattttac

SEQ ID NO: 4125 - DNA, 1389 bp, Zea mays
  Clone ID: 700351851_FLI
ccaacctttggatcctttccttcagtgctcccctcacttctcgccgccgcccactgccgctcccccaccaatccacagcgagacacgcccgagcgagtgatccccgacccagccgccgccatgaggccgtcgctgctgaagtccacggccgagctcctccgccgcagccgcggctacgcgtccacggccaatccggagcggaaggtggccatcctgggcgcggcgggcggcatcgggcagccgctctcgctcctcatgaagctcaacccgctcgtttcctccctctccctctacgatatcgccggcacccccggcgtcgcggccgacgtctcccacatcaactcccccgccctgatgaaggggttcatgggggacgaccagctcggggaggcgctggagggctccgacatcgtcatcatccccgcaggagtgcctaggaagcccggcatgaccagggacgacctcttcaacatcaacgccggcatcgttaaggcgctgtgcactgccatcgccaagcactgccccaacgctcttgtcaatatgatcagtaaccctgtcaactctactgtcccgattgctgcggaggttttcaagaaggctggtacttatgatgagaagaagctgtttggtgtgactactcttgatgttgttcgtgctaaaacgttttatgctggaaaggctggcgtgccagttactgaggtgaatgttcctgttgtcgggggccatgcgggtattactattctgccactcttctcacaggccactccagcaagcaattcgttgtcccaagaagacattgaggccctcaccaagaggacacaagatggtgggacagaggttgttgaagcaaaggctggaaagggctctgcaacattgtccatggcatatgctggtgctgtttttgcagatgcatgcttgaagggtctgaatggagttccggacattgtagagtgctcttttgtgcaatcaaccgtgacagagttgccgttctttgcctccaaggttcggctcggcaagaatggagtggaggaagtgcttggtctgggtgagctcaacgacttcgagaagaaggggctggaaagcctcaaggtcgagctcaagtcttccattgaaaagggtatcaagttcgcccacgggaactaggcaactcgcccggcttctaacagttgatatcccttgcattttttttgtttgactgcctttttccccccgccccgttatggttgacgcaatgaggctttgtggtccataataaaacacagcggagtgtagaaaatgtgcaccaggagcagtttacaaacagcggttcttttttgtgctgaaccaccagtagttgagccgtgaaggaatggaaaaactttccacttgctcatttccgagcgccttctc

SEQ ID NO: 4126 - DNA, 2984 bp, Zea mays
  Clone ID: 700349202_FLI
cgtctctgcgctgcgagcgaggctcctgctcctcgcggtctcgcttccctccaagttccaatccagcaccgggcgccaccgctaatcagtgctgatatatgaaccccgcatttggacatttggtggtggcaaggcaacgccaaccttccctgttgctgctttgaatgttctggtggttgtcggatggatcgccgcagttggctctggaagcgcaagtcattggataagagccctggggagagcgatagctctggctctgcttcatcacactctgagccttccttcgatgatcaggaacctaaacctgtgtctagtaattcttctccaaatcatagtcattcgcctgatgtttcttctagaataatttataatgagaatcaagaagctgaaagagcagaatcattgaatgagaagctggtgttagcaactagctcgaatgattcttctccacaacatgatcaatcgatgaagccagatatataccaatcacctctgctattcccaaatatcaggaatgatgatgttccagattctgtaaagaatttgaatgagaaggtgtccccaaagtttaaggtcgatgatgtccaggattctgtaaagagtttgaatgagaaactttctgctgcccttttgactatcaatgataaagatgacttggtaaagcagcacactagagttgcagaagaggctgttgcaggttgggaacaagctgaagctgaagttgcttctctgaagcaactacttgaaactgcatcaaagaagaatacctctctggaggatcaggtcagccacctagatgacgcccttaaagaatgtgtaaggcagcttcgccaagcacgtgaagaacaagagaataaaatccatgagacagttgctaagaagtctaaagaattggagtctgagaagtttgagctccagcaccatattgctgaactcagtaagcagttgcaagccacgaaactagaagctactacggtgcgtgtccagcgtgatctgcaggaaaagcttcagatagtggagaaagaaaacaaagacctcaaggtagaattactcgcactgtccaaggacctgaagatacttgcacgggaaagagacctgagcaaccaagcagcagaaacagcaagcaaacttcacctggaaagtgtgaaaaagataacaagagttgaggcagaatgccttaagttgcgtcatttaacgcggcgtacgtccttgaccaatgattcaaggctgataactaacagtgcttgcatggaatctcagactgacagtcagtctgacagtggggagcacatgctagttgatgagatgaaaaattctgattcatgggcaacagctctgatagctgaacttgatcagttcaagaatgccaacaacgacacaagaaatcttgtgaataattcggttgaaattgacctgatggatgatttcctcgagatggaaaagctggctgcactgcctgaagtagactgtgtaagctctagctttggagctgaaactgattctgaccaaggtgtgagtagagataaatcatcaaaagttaaaactgaaccattgcagtgtcaggtgacagatttgcacgcaaagatcgagaagattgaaggtgagaaaagggagcttgaaatggcccttgcagatgccagagttcagcttggcacatcatgtgatgctctaatggtggccaacaacaggttgattgatttgcagatgcagttggacttggcaaatgagtccaaacatgctgctttcggagaagctgagcgactgaatggtgagaggaaagatttggcattgcaactggagtccaggtcttcacaagttgatgagcttcagctgatggtggcatcgctggaaaagaatgtagacaggaaggtgttggaattgcagttagagttagtttctgtggaggctgcagatctgcgcaagacagtggcttccctggaagagaagattgatgcagagataactctctctatgcagcacaaaacaaatgcagacctggcagaggcgtccaaagaatcattagaggcgcagctgcagtctgcaaacacagagatagggaaactgaacgggattgtgcaaactttagagaatgaggtgaggaaagagacagattctcgtgaagaactactgaaacagatagaggctatgaaaattgagtcagagagatcactatctgtggtgtctaccaaagagtcattagaggtgcagctccaggtggcgaattcagaagttgcaaagttgcgtgggatggtgaatgctctggagtgtgatgcggcgaacgagaaggcatattcttcagatctccagatgcaacttgaggcagtggaaggtatcaggaaggtgttggaatctgagcttgagtcttcacaccaggaggtgatgaggctgaaggagaaagtttcgtccttggaagcaaggatcaaggaccagacctcgttgcttgtagaatatacagctaaatcagaggatgcagtgtcccggaaaaaggcaatggagggtcaactagaagcagcaaatctggaagttacaaaactgagaaacaaggtgagcctgatacaaggcaaggtggagcaggagaagcttctgtcagaagagtacgaagcaaaatgccgcaagctggaggcgcaggtgttgagggacagccgagaggcgaaactttggcgcctcacgaactcaaacggagacctgaaggtgaagcaggagaaagaactagtcagtgctgccgggaagcttgcggagtgccagaagactattgctaaccttggccgccagctgaaatcgctaacagatcttgatggcgtggtggccgatcctgaaaagctggaatcgagggacacgcacctggacttcagagatggcggagacgtggctgatggactgtatgaactgggtcttcctaagaggaacggtagctgcctctcaccccttcggtcggatccgtcgccgaggggtttgccgtcccttagtagctacctgagcaaaac

SEQ ID NO: 4127 - DNA, 1981 bp, Zea mays
  Clone ID: 700349204_FLI
caccactttaccgtgcttgcaagtgggcaatcaacaaagaccaaattatctgcctatggaggtttgcaagatagttgaaggacagcgttactcaaagcgactcaatgagaaacaaatcactgctctactgaaagtgacctgccagcgccctcaagagcgtgagctggacattttacagactgtgcatcacaatgcgtactatgaagacccgtatgcacaggaatttggtataagaattgatgaacgccttgctgcagttgaagctcgtgttctgccaccaccaaggcttaaataccatgatagtggccgagagaaggatgttttgcccagagttggccaatggaacatgatgaataagaaaatggttaatggtggcagagtcagcaactgggcatgtattaacttctctcggaatgtgcaagatagtgccgctaggggtttctgtcatgaactggcaatcatgtgccaaatatcaggaatggatttttctcttgagcctgtgctgcctccggtgactgcaaggccagaacatgttgaaagagcgttgaaggcacgttatcaagatgcaatgaacatactgaggccacaggggagggaacttgatctgctgattgtaatactgcctgacattaatggttccttatatggggatctcaaaaggatctgtgagactgatctcggattggtctcccagtgttgtctgactaaacatgtttttaagatgagcaagcagtatcttgcaaatgttgcactcaaaataaatgttaaggttggtggaaggaatactgtacttgtagatgctttgacaaggagaatcccccttgtcagtgacagaccgaccataatatttggtgctgatgttacccatccacatcctggagaagattccagtccttccattgcagctgtggttgcttcgcaagactggcctgaggtcaccaaatatgctggactagtgagtgcccaagcccatcgccaggagctgatacaggatcttttcaaagtatggcaagatccacagagaaggacagtaactggtggcatgataaaggaacttctcatttctttcaagagagcaactggacagaagccccagaggatcatattctacagggatggtgtcagtgagggacagttttatcaagtattgttgtatgaacttgatgccatcagaaaggcctgtgcatccttggagcccaactaccagcctccagttacttttgtcgtggtgcagaaacgacatcacactaggctgtttgctaataaccacaacgatcagcgtacagttgatagaagcggaaacatactgcctggcaccgtggttgattcgaagatttgccatcctactgaatttgatttctacctgtgtagccatgctggcattcagggaacaagccgccctgctcattaccatgtcctgtgggacgagaacaagttcacagctgatgagctgcagactctgacaaacaacctatgctacacgtacgctaggtgcacccgctccgtgtcaattgtgcccccggcatactatgctcatctggcggccttccgagctcgcttctacatggagccagatacctctgacagtggctcaatggccagtggtgcccgtggccctccaccaggtgcggcacgcagcatgagaggagcggggagtgttgcggtcaggcccctacctgctctcaaggaaaacgtgaagcgtgtcatgttttactgctgagatgctgagctaccttcaccaagaaaatatcctgacttgttccatgtacccgcactgtttcggtgatactatctgacaccgaatttatgcattaagacttccagtggtctggggattttaggtaacgcctgtttttattcgtgagttgtaacgctgcggttcgaggggctttagtgctgtatgatgtgtaaactatttgttgtaacttgtaagttgtaaccaattgttgtaagttgtaaccagccactatgttatggtccc

SEQ ID NO: 4128 - DNA, 3203 bp, Zea mays
  Clone ID: 700349226_FLI
gcggcgaaccggggggcccggacaggcggcggagagctcgaggcgtcaagcgtcatggcgaagtcgagcgcggacgacgccgagctgcggcgcgcgtgcgccgcggccgtggcggcgtcaggcgcgcgcggggaggaggtggccttctccatccgcgtcgccaagggccgcggcatcttcgagaagctcggcaggctcgccaagccccgtgtcctcgcgctcaccgttaaacaatcatcaagaggcgaggcgaacaaagcttttcttcgagtattaaaatattcatctggggcagtgctcgagccagccaaactttacaagctgaaacatctaacaaaggttgaggttatttccaatgatcccagtggttgtacatttgttctgggatttgataaccttaggagtcagagtgttgccccaccacaatggacgatgcgtaacattgatgacagaaatcgtctacttttttgtattctgaatatgtgcaaggagatactcagttatcttccaaaagttgttggaattgatattgtggagctagctctttgggcaaaggaaaacacactgaccatagataatcaagtgagtatccaagatggtcaagaaacatcagttgctactcaaaccgagaggaaagtaacagtaactgttgaaaatgatctcgtgtcccaagcaaaagaggaggaagaagacatggaggcacttcttgacacgtatgttatgggaataggtgaagcagatgcattctctgagagattgaagcaggagcttgtggctttggaggctgcaaatgtatatcaattactggaaagcgagcctttaatagaagaggtcttgcagggtctggatgctgctagtgcaactgtagatgatatggatgagtggctacggattttcaatctgaagctgaggcacatgagagaagatattgcatcgattgaatcacgtaacaatggcttggagatgcagtctgtaaataacaaagggcttatggaagagctagataaattgcttgagcgtctgcggattccacaggagtttgcagcatcattaactggaggctcatttgaagagtcacggatgctgaaaaatgttgaggcatgtgaatggttgacaggggccattcgcagtcttgaagttcctaatttggacccatgctatgtcaacatgcgcgctgttagagagaaaaaggcagagctggagaaactgaaaacaacttttgttcgacgagcatcagagtttttgcggaactacttctccagtttggtagacttcatgatcagtgacaaaagctacttttcacagcgtggacaattgaagcggcctgatcatgcagaccttaggtataaatgcaggacatatgcccgacttctgcagcacttaaagagtctggacaagagctgcttaggtcccttaaggaaggcatactgtcattcccttaatttactactacgacgagaggcacgcgaatttgccaatgaacttcgtgcaagtacaaaagcaccgaagaatcctgctgtttggcttgaaggttctggcggctctggtcataatggaagcagttctgatacttcacaggtctcagatgcatactcaaagatgcttacaatatttatcccgcttcttgtggacgagagttccttttttgcacattttatgtgctttgaagtacctgcacttgttccagctggttctcctaatgctaataagagcaaatccggaggaaatgacccggatgatgatctgggtcttatggatccagatggcaacgatctgaaacctgacagtacctctgctgaactgggtacattgaatgaagctcttcaagaattactcgatggaatccaggaagacttctatgcggtcgtagattgggcttataaaattgaccccttgcgttgcatctcaatgcatgggattacagagcgttacctttctggacagaaagctgatgctgcaggatttgttcgcaaactacttgatgacttggaatcaagaatatcagtacagttcagccggtttattgatgaagcatgccatcaaattgagcgtaacgaaagaaatgtgcggcaaactggaattctagcctacattccaagctcttacccaaaaatgtaaaaactggcaataagcagcaagactccggtgctcttatccttggcactggtgattatatgatttaagttctgcttcaagataaaaagagcactatggagaaattgtgcttattgcagggtgtactgtgacaagtttttttgttgtcttagagattcttttctgaagtggcaaacatagaccaagatctgactttgtttcatatagatttgctgtccttgcatcacgtatggaacaatatatccaaggacaatccagggatttaattgataaagcatacacaaagctagttagcacaatgttcgcaactttggagaaaattgcacagagtgatcctaaaactgctgatattgtgttgattgagaattatgctgctttccagaacagtctttatgacttggctaatgttgtgccaacgcttgcaaagttctaccatcaagccagtgaatcatatgaactagcttgcactcgccatatcagctcactcatttatctgcaatttgagaggttatttcaattcaaccggaaagttgacgaattgacttacactattgctgctgaggagataccgtttcagctgggattatcaaaaactgacctaaggagggtactgaaatccagcttatctgggattgataagtcaattagcgccatgtacaggaggttgcaaaagacactgacctccgacgagttgtttccttcgctgtgggacaagtgcaagaaggagtttttggacaaatacgagagctttgttcagatggtaacacggatatatgggaatgagccgatcatgtcagtcaacgaaatgaaagacgtccttgctggtttttagatacaagtacacagcaccatgtatgatttcagagaaatagctatgtattccattcattccattgaattctgcagccacttgcgttactgtgttaggcgccctttttgggttatatgtgtgtgtgtatgtggatgtcctctgtatagaagtgaacgcggcatgcttcccctaatgatgttcctgtgtcgcatcgagccgtcagtgacaatgcaaactgcaaacccggagtaccggaaggaacatgttcatgtttatg

SEQ ID NO: 4129 - DNA, 2429 bp, Zea mays
  Clone ID: 700349228_FLI
cgaacggcgcactcaactgctcatagaaccaaaacccctctccgtcaccgcggtggcaacctgccgtcatcgccatcgccgcgtgcgttctcgaacgttcttgtggcctagaaatacacgtttcccaggccggcgacgccgacgccgacgcggtcacgccttttttttcagccggctggttcacgtgctcgacgacggcgagcgtctgtctaggagcaagatggatgggaacaggatagctcggttttcggtcacctggaggggcagccaacttgatgtggatgcggatccaagttgtaccgtgaaagagtttgggcaactgttgcaggacttgactagtgttaggccagagacgttgaagctcattgttccacgatctacaaacaaaggctccaagctgatcatgccattttcggatgcacattcgagattgacactgaatggagtgggtattagcgagggaaaacctatccgaatgatgggagtttatgatgatgaaatcgaggaggtatccgacaatggcaaaagacctgaccaacgcattattggatttgatgaagaagaacagcggcttaggcaaagatcattaggcaggccacagatttcactcaaacttccccagggacaatacatcttctgcgattttcggacgcttcacttacctgggattgagctgaatcctccaccttcggaagctctgaaacgaatgcacatgcttgcatgcgaccctggtgtaattgcgatcatgaaaaagcataaatggagagtcggaatcatgactgagatggctcctgttggatatgtaggcatcagtccaaaatgtattttaggtttcaataagaacatgggagaggagatatctcttcgcctgcgaactgatgatttgaagggattcaggaagtatgaaagtatcaagaaaactctacttcatgagcttgcacatatggtgcactctgaacatgatgcaaacttttttgcccttaataagcaggtgtttcctagatattcccatcacattcggttgcctatcttgttacatttgcgtttatttgatcttaattttgctttttaatttttggcagttgaacgaggaagctgcttccatggactggaccaagtctacaggtcatatgttgagtggtcgtaaaatcttcgattcatatgaagaggaatttgttctagaaccagagataactgttgctggtcacaggctcgggggagagtcaagttcgcttgctagcgctcgtgcgttgtctggagctgctgcttaccagcgttttctgaatgcatctgcaaatgtggatcatgcttcaggcactaaaattgaatatagttctgatgatgttcctcgaggttttgttcatgaaactgtgaaggtagagccagatccagattatgctatgcatgtggattcagcagctgggctatcatttgcagggcagcatactattggttactctgatcctaatcctgacgatgttggcaagcaaagttttgatagatgcctagaacctgatcctgatgattcctcaaatgctaataatctgaaccaggagctgaggtttgatgtaagacaccttagtgaacctgaccctgatgatggtagtaatgaagttctggaacatggaaacacgatggaaatggatagtgaactgacaaaccacatcacagttgtgaagtatgaacttgaccctgctgattcctcaaatgctaaccaggagttgatcattgatgggaagcatggtgaagaacctgatcctgatgatacttgtcaagatgttttaaaatctggtaatgggacagaaatgataacagaacagagtggaaattccatggttctgaaagctgaacctgatcctgacgatcatgttggtgactcaaacatcaatgagctgcaaagggttgaagaaccagtgagagccctctgttcacgactccagaagtccattaagatgcttcggttgcaagcaacacctgtagaggcagagtctgctattcaaactctctttaagattatcaagaatgttatagagcatccaaatgacattaagtataagagattgcgtaagtccaatccacatttccaaaggagcttagcaaactataaagctgcaatggaggttcttgaattgattggtttctgcgaggatgtaatctcagatgaggttgggcgtgctgagacttacctggtattgaaaaggaatgatcctggattgctatggctggcaaagtcctcccttgaggtctctctggcttgataaaatttgatacatcattcatggttgctatttttcgtcgtgaatatatttgattgtttgtacaagagagctagctattggcatgcaccattctcctgtatggggactgttgtatacttgcatatgaatacacaagaatgtaatgccacattcaactttatgctctttgtt

SEQ ID NO: 4130 - DNA, 1377 bp, Zea mays
  Clone ID: 700349232_FLI
agtacatccattacaagcagttaaaagggtggaagcatttggttgtttacaaatctggcatacatggacttggtctctacacatcagtctttattccacgcggctctatggtaattcaactgataatggaatttagtaaaaagtcaagttactgccaccaagtttggcatatgtttagataaccctgaaaactagcctttcatttggtttagtcccttcaactattccggttattccaatttacccgttaacaacattttttacttttgtttgtccacattcaagttgattttttaatttcaaaatttgtgaggtgatagtcgacaccataatttatgatatatatatataaaatattttttataattattttgaccagttaggacatttaataataaattaactctagaatacaaaattgcataaaatataattatgaaacaattataatatattttaaaaaataaatcatgacatctattaccacttcacaaaatccgaaatttaaactcaacttttccttggagaaacaaaaagacaaatcttgttaaggggcaaattggccaattgaaatggttgaggtagtaaatcagaccaaatgttagtttaggaagttatccggactttggccaaaattcaagggaataatttcaacattttctagcaaataaaaccattctcaggttttgcataaaaatgtttcaggttgtagaatatgtgggtgaaattgttgggcaacgggttgctgacagaagagagatcgaataccagtccgggaaacggcaacaatataagagtgcatgttatttctttaagattgacagggagcatattattgatgccacccgcaaaggtgggattgcaagattcgtcaatcattcatgccaggtaataacttgtgcttgaagccttgaacattctttagataccccttggaacaagagggatgagacttcttttgagattctagtgtgcttattattctaatgtacggttttatattcattcaattcgttcattcttggttgaatcagccaaactgcgttgcgaaaataatctcagtcaggaatgagaagaaggtaatgttctttgcagaacggcacataaacccaggggaggaaattacgtacgattaccacttcaaccgggaagatgaaggccagaggatcctttgcttttgtagatcaagatactgcaggcggtacctcaattagtttccggtgggcgtaacatgtctatatataacttatatatctatatgtatatcttatatatttacaaattacaattgcgattcatgcctgctgtatatgtaggaacttgcatctagaactgcctgtttatcttttgtgaagtcaaatgagttatcagctgttc

SEQ ID NO: 4131 - DNA, 1264 bp, Zea mays
  Clone ID: 700349253_FLI
gcaaagggaggctcggtggcctctcctacttcgccggcgccgagaagaaggacgaccgcgtgctcgtgccggatttggggtcgctcaccagcatccatgacagggcgcgtgagctcttctactacctcaagggtgggcaggtggactacggcgaggagcacagcaaggtttgcggccacaacaggtttgggagaatatatcatacagggcactatcctgtgtgggacgagcacaacccagtgcattttgtggggcactctgctggcgcgcaggttgtgagggtgctgcatcagatgcttgccgacaaggctttccctggtcatgatacttctgaagattgggttgtaagcctgacttccttgtcgggtgcacttaatggaaccacaagaacttactacgatggcatgctggtcgtagatggtaggtccatgaaatctatctgtcttcttcagctctgccggctcggagttattgtctacgattggctagacattccttggctgaagaattactacaattttggttttgaccactatgagatgtcgtggaggaaagtaggcttttcaggtctaattaatctactgctggggcacacgggcccatttgccagcggggattggattctacctgacctcacaatccaaggatccatgaaactaaactctacacttaggacctttcccaatacattctacttcagctatgctacaaagaaaacaagaaaaatatttggaattacagttccttcaagtgttcttggagtgcaccccattctctttctgagagtcctccagatgtgtatgtggcggcaccctcaaaatgcacctctgccttacaaaggatacagggatgaagattgggaagacaacgatggggctttgaacacaatctctatgacacacccccgcattcccatcgagcatccacaccattttgtagtcgatgattctgactgccatcctttgcaacctgggatatggtattacaagattattgaagctgaccacattctattcattgtgaaccgggaaagagctggagtgcagtttgatttgctgtacgatggcatttttcagcgctgcaggaaacatgcctttaggaagagcccacctactgtaccaaacgaaacgagccgatagcaaaactaagctgaagtatgtgtaggtagtacataggaagaaacaaggtgccacgacattttcattaactgtaaattacattgttgattgaacggcaataacatatttgcttctccaattttcgg

SEQ ID NO: 4132 - DNA, 1281 bp, Zea mays
  Clone ID: 700349322_FLI
ctctcctcccaccacacccggtcgtcgttgtcgcggcgtgagcgagcgagaggggaaaacccaaaaccctagcacccccgccccgtcgccgacggccgccggagtagagagatggcggtggacgaggtgaactcggtctacgtcggcggccttccctacgaggccaacgaggagatgcttcgcgacgccttcgggtactacggcaccatcgtctccgtcaaggtgattaatgatcatgctgtcaaaggcaagtgttatggttttgttactttcactcaccccagagctgctgagcaagcaattgcgggcatggacggcaagaaattaggcaaccgtattgttcgagtaaatgaagtgcgtacaagaggcccccgcgattttggccgagatggtttcagacgagatccaagaaggtatggtagagatccatactgggacagaagggacagggaacggagctatgatcgtgaaagagatccctaccatgacagggatagtgatagatcccgtgagcatgatagagaaagagattatgaacatggtggatttaatagagaaattgactatcccatggaccgagatcgtgaaggagatgagagacgtcctagagaacatgatcgtacagcagaaatgcataatgtggattcagataatgacaaagataaggaacatgtatcaagaaaaagccgcccaaaaggtcgtgatagcagagatttatcaagttccagtgatggtcttcaaaatgatggaaaacatcagttggataaaactattcagatgcgcgaggaccttgaaaatgaggttaaccagattaaggataaaatatctgggaaagaacagcacattgcagatttgcagaagaaagctcagaaactagaggatgaactggttgccgcacggaaagtatcttcagaacgacagttggcggttacagacctgtacaaacatttcctccaacttcaggactacaatgatagggtcaaaacagctgaacagaggctgcagtctctcgttgatgctgccttggtcgagctcgacatggccgaagatgctactaccagagatggctcgatgtacgagaacggcgtgctttgaacacccaactgccatgggtttgtgtggttgctgatttgttagatttgtagtttgcgtctgccatgtaatagaactgcattgtaactagaaacaggaaaaatgttgtgtaagggtcggagaatctgctgtcgtggtccctgagcccggatttctctttcgaagttggattcattaaccggcctgatt

SEQ ID NO: 4133 - DNA, 1566 bp, Zea mays
  Clone ID: 700349329_FLI
atttcgattcgatttgccggcggtgcccgcggcggagaggatggcgagctccttctccttcccgctgatgaatccggcggacattgcggaggcgctgcacagctactgcatcgcgcccagccccggcctccgcgccgagcacatcgtcaccccgcagcccggcctcgtcgccgaggtcctcgccctcttcctcgccaacttcgtcggcgacgacgagcccgacgagcagctagagtttcaggcgctgcaggcgatcgacaacccggagcaccacatgcgcgccatagcgctctcgcgcctctaccggagggccaacgccttcctccactccatcctcttccgggacctcacgctccgcgaccttctccgcgccgacggccgccgtgtcgtctacatcctcagcgccataatcaacttcctccactacaggcaagataagctcagctttcttgagcccatcgtccaagagtacagcccccttcaggaacggcacacggagctcagggctaagatcgccgagcttcggaacgcaaaagaagaccatctacttaaggagcagatggaggcgcccgtggtccagcaactcgagaaggaggtcaatgccctcaaacagaggcttcgtgaatacaacaaagagcagctgtcgctgcgcgttgcaacaaaagccatagacgaaaagaaacaggagttactcggcaagatgaaccaagctgatttcgagttggtgaaagttatgcaagaaaaggaaaggctatcagccaaaattgttcattcccctgaaaagctcctgaggacccttgaggagaagaaagcagtccgtgatgagctaaggaactcagagaaggtggcaatgcaaaaagttcaagagaaaaccaatactcttgagacgtatactaaggtttctgagaaattagtgaagcatctctctaaaatttctgctgtacatgaaaaaggcactgttgctaaagcttctgagaaggatgttaaagcacacaaagagaagattggtgatcaaaatttggagataaaggcacttcgcaataaagctgctgagtggcaattgaaagtactcgagaacgagggcattctgaacgcaaaggagaaagaaagggatcaaagagttgcagagaacaatctgaagatgaacgcgttgaaatctgaagtcgaatcggagcacaagtgccttgaggagaaagaaataaaaataaaggaaaagcttgaaaaggttgctgaattatgctctcaagctgattcggttgctgaagctggaaataagaaaatacaggaaatctgtgggaagtataatcaagtttgcgaggctgcaaacatgtacatggatggcatcgatcgttcctttgaagagatcgatgaagctgcagtgagtttgaaagctataggccagagtggtgcttgatgcgtgaagtgaccatcgacgggcaatggatcgtggacagcatagtaaattgtgctagtgttaagctctgtatatatacctccaccgcgtctgtatatgccttcttcccactattttaatttaattagcactaattgccagtgaaaatggat

SEQ ID NO: 4134 - DNA, 1142 bp, Zea mays
  Clone ID: 700349334_FLI
cgattcttgaccatcctgctgttctgccttctccgtccgcgccttcgagaaggccacagagcgaaggaattgcagagttttcttggcgcgaaagaaggggagagagagagagaaagacgaagatgtttatccagaaggcatggaggacggcggcgtttgggctctacggcttcaaccatttcacaaaatctggtttcctggagcatgcgaagaaattcagagaggaggatatgcagatccggttggatggaaaaaattgcctagtaactggagcgaattctggcattggttttgctacggctgagggcttggcttcacatggtgctaccgtctatatggtctgtcgtaacaaggagagaggggaggcagctctcaaccaaataagatccaaaactggcaatgcaaacgttcatctggagatatgtgacctttcatctatcaatcaagtaaaatcgtttgcaacaaagttcacttcgatggataaaccactccatgtcttggtaaacaatgctggcttattagagcacaagcatgagactacagcagaagggttggagctcaattttgctgtcaatgtagctgcaacatacactttaacagagctagttatgccgtcattggagaaagcggcaccagatgctcgtgtcatcacagttgcatcaggaggcatgtacaccgagccactgaacaaagacttacagttcaccgaaggcaccttcgatgggacgcaacagtatgctcgaaacaaaagagttcaggtggcactgactgaatggtgggctgagaaaagcggtgacaggggagtcggtttctacgccatgcatcctggatgggccgatacgcctggggtcgccaagagcttgcccggactgtcagagaggttgtctggaaacctgagaacaaatgacgaaggagctgatacagtggtttggttggcgttgcaacctaaggagaagttagcctcgggagccttttacttcgaccgtgctgaagcaccaaaacatttgaagtttgctgggactgcagattcgcacgctcagataaaccctatcgttgatagcattagatccatctgtggtctctctgttaatggttgagctgccaaagcaaaagtgatatacagctccatcgtcaatagcatt

SEQ ID NO: 4135 - DNA, 1886 bp, Zea mays
  Clone ID: 700349349_FLI
cagctccagcattatgacacctaaactatagatgtcagacttaagggacattttgccatggtattggtattctggagcgcagtatcctagggataaaagccgttcattgctcatagtacgtgatacttcagccagccttgatagaccaaagtctgcaatctttggtaccatttgatcatgtactagtatgttggcaggtttaagatccatgtgaatgatgtcccttaagtctgacatctatagtttaggtgtcataatgctggagctggtgaccgggagcaaggaggagccggacattactaatgtacttcgacggtggagccataggtggaaaaaatcaggacagcgtacaccatcatttcaacgccatcaagtgagtaaatgcataggtttggctaagagatgcaaagaagtagaaccaacaagaaggccttctatatgtgatatacttgctgccctaggcaaaatggaagatatgaattgcagtgatcaacaagtggacgaggaagtcacttatctggaggacatgctaggaatcgagcctcttgatctgcatttcctagtcgaacctaccaagcagatatcctgctcagtccatctgaccaacgctacgaatgactgtttcgccttcattgttcagacgacgaacccgaagcagtactgcatacagccggacagaggcgtcgttccaccacgatctgagtgtagtgttgccatcgtattatcgcaagaaccgacgcataataagcgatgcagcatggaggacgagctaagcgtgcagagcaccagagtggatgagggtgtgacagctgcggatgtgagtgaagcgttgttcactggaaaggaagatagaacggtcgatcacgtgagcctgatggtcggtttcgacatgtcgccatcgccacctgaggaacaaacggaggacttcacgtttgcaccactggcgtcgttgtacgacgaggagccacagttaagcgcggcgaaggtatcagtatggacatccaatcagttggggcgttctggtcgcttctctaagaagaagctagtgtctattctgaaatcctggcgagcaagattaaaggtatcatcccataagaaactcgagactccaaagcatgactgtgagattcctgaagctgtagagcatgaagaagttgccgcgcccaggtgtcccaaaggaccactgccacagcgcgatctttctccactgggcgaagcatgttctaggatgaacatgacggcgatccatgagatcctagtgaacagacattacagagatgatgacctagacccaaacgtgccgtcgctcgaggaatggacacagcagagcagggatatgttggatgataggaaacgtggggacttcacttttcgtgataaagatttccgagcagccatagactggtataccaagtgtatggatgtggggccaaagaaggcgtcaccaacagttctcgttcgacgcagttgctgccacctcatgtgcggcaacctggacgccgccctccgcgatgcaatgcaagcgcagcgtcagtatcccgactgcccaacctcactgtacatgcaagcagtggcactttcaaagctagggatgcatagtcaagccatgggcatgctgattgaggcgtcggagatggaagcgaatcagaaaaagacccgaaaagcagcttaagaagactcaacatgggcgaaacctatataccttcgttttgtttctgtaagctattcttgattgttgtatctgcttgccaaattgtctaggttggagtggaattgggaagctttacctcttggggataatgcatttcttgttgtattcccctctgaggatgaaatgctccgtatggctgatattgagtataagctcaagagtggaatttctattc

SEQ ID NO: 4136 - DNA, 1435 bp, Zea mays
  Clone ID: 700349383_FLI
cgactacaacattcagaaggagagcaccctccacttggtgttgcgtctcaggggcggcatgcagatatttgtgaagactctgactggcaagactatcacccttgaggtcgagtcttctgataccatcgacaatgtcaaggccaagatccaggacaaggagggcatccctccggaccagcagcggctcatttttgccggcaagcagctcgaggacgggcgcacgctggccgactacaacattcagaaggagagcaccctccacttggtgctgcgtctcaggggtggcatgcagatcttcgtgaagacacttactggcaagacgatcacccttgaggtggagtcctcggacaccatcgacaatgtcaaggctaagatccaggacaaggaaggcattccaccagaccagcagcggctcatctttgctggcaagcagctggaggatggccgtacccttgcggattacaacatccagaaggagagcaccctccacttggtgctgcgtctcaggggcggcatgcagatcttcgtgaagacacttactggcaagacaatcacccttgaggtggagtcctcggacaccattgacaacgtcaaggccaagatccaggacaaggagggcatcccaccggaccaacagcgcctgatcttcgccggcaagcagctggaggatggtcgcactcttgcggattacaacatccagaaggagagcaccctccacctggtgctccgcctcaggggtggcatgcagatctttgtgaagacattgactggcaagaccatcaccttggaggtggagtcgtctgacacaatcgataatgtcaaagccaagatccaggacaaggagggcattccaccggaccagcagcgcctgatctttgctggcaagcagctggaggatggccgtaccctcgccgactacaacatccagaaggagagcaccctccacctggtgctccgcttgcgaggtggtatgcagatctttgtgaagaccttgactggcaagaccataaccctggaggttgagagctccgacaccatcgacaacgtgaaggcgaagatccaggacaaagagggcatccccccagaccagcagcgtctgatcttcgctggcaagcagctggaggatggccgcaccctagcagactacaacatccagaaggagagcactctccacctggtgctccgcctccgcggtggtcagtaagccatgggtcatttaagctgctgctgtacctgggtatctgcgtcgtctggtgccctctggtgtacctctatatggatgtcgtcgtctaataaacatctgtggtttgtgtgtcatgaatcgtggttgtggcttcgttggtttaatggacctgttgtgtcctctgtgtgttgtacccaaaactcttctgcagcagtatggctcgaatccttatgaagtttgatgtttgaactt

SEQ ID NO: 4137 - DNA, 1292 bp, Zea mays
  Clone ID: 700349407_FLI
ctcaatcgcgatgccaccaatgatgaggtcaccgtcgagagtgccgaggctacattgaagtataatgttgctgttaagtgtgcaacaattacgcctgacgagactcgagtaaaagagtttaaactcaagtctatgtggcggagtccaaatggcacaataaggaatattctaaatgggactgtttttcgtgagcccatcttgtgtaaaaacatcccaagaatcctttctggttggaagaaacctatttgcataggaaggcacgcctttggtgaccagtatcgagctactgatatgattattaatggtccaggaaagctcaagatggtatttgtgcctgatggagctgaccctatggagctggatgtttatgattttaagggacctggtgtggcattatcaatgtacaatgtcgacgagtctattagggctttcgctgagtcctccatggctatggctctttcaaaaaagtggcctctttatctcagcaccaagaatacaatcctcaagaagtatgacggcaggttcaaagacatcttccaggaggtatatgaagagcaatggaaggagaagtttgaagaaaactcaatatggtatgagcacaggttgattgatgacatggtggcctatgctgtgaaaagtgatggtgggtatgtttgggcttgcaaaaactatgacggagatgtacagagcgattttcttgcccaaggttttggttctctgggtttgatgacttctgtgctgttgtcttctgacgggaaaacattagaggctgaggctgctcatgggactgtcactagacatttcaggctacatcagaaaggacaggagacaagtaccaacagtattgcctccatattcgcttggacccgtggacttgaacacagggcaaagctggataaaaatgatagtctgctggatttcacacacaaacttgaatctgcatgtgttgaaacggtggaatctgggaaaatgactaaggaccttgcgcttcttatccatggccccaaggtaacaagggagttctacctgagcaccgaggagttcatcgatgcagtcgcgcagcaactgcgaggaaagattcaactaccaactactgtgtaatcctgaacctgaagcctgaaaccgaacgaactggttcattgtgcattcggcgcacattttgatagggatggcgagatggatcagatctcaaaacattcttttttttttgcttcagccaaacatttcatggttgggtatataatgacccgttgatcaatgtattcagagcgatattgagttaaattattact

SEQ ID NO: 4138 - DNA, 1590 bp, Zea mays
  Clone ID: 700349409_FLI
cgccgtcgtctgctccgggctgctgttctgcgcctccacaaggctttggcctctgttgtaagccatgggtaaggagaagtcccacatcaacattgtggttattggccatgtcgactctggcaagtcaaccaccaccggccacctgatctacaagcttggaggcattgacaagcgtgtgattgagaggttcgagaaggaagccgctgaaatgaacaaacggtccttcaagtacgcttgggtgcttgacaagctcaaggctgagcgtgagagaggtatcaccattgatatcgctctgtggaagtttgagaccaccaagtactactgcactgtcattgatgcccctggacatcgcgacttcatcaagaacatgatcacgggtacctcccaggctgactgtgctgtcctgatcattgactccaccactggtggttttgaggccggtatctctaaggatggccagacccgtgagcatgctctccttgctttcacccttggggtcaagcagatgatttgctgctgcaacaagatggatgcgaccactcccaagtattccaaggcccgttacgatgagattgtgaaggaagtttcatcctacctcaagaaggttggatacaaccctgacaagattgcctttgtccctatctctggttttgagggtgacaacatgattgagaggtccaccaaccttgactggtacaagggtccaaccctgcttgaggctcttgaccagatcaccgagcccaagaggccttcagacaagcccctgcgtctgcccctccaggatgtgtacaagattggtggtattggaactgttccggttggtcgtgtggagactggtgtcatcaagcctggaatggttgtcaccttcggtccaactggcctgaccactgaggtgaagtctgttgagatgcaccacgaggctctccaggaggcccttcctggtgacaacgttggcttcaatgtgaagaacgttgctgtgaaggatctcaaacgtgggtacgtggcctccaactctaaggatgaccctgccaaggaggctgctagcttcacctcccaagtcatcatcatgaaccaccctgggcagattggcaatggctatgccccagtgctggactgccacacctcccacattgctgtcaagtttgctgagctcataaccaagatcgataggcggtctggcaaggagcttgagaaggagcccaagttcctgaagaatggtgatgccggtatggtgaagatgattcccactaagcccatggtggttgagaccttctctcagtatcctcctctgggtcgttttgctgtccgtgacatgaggcagacggttgctgttggagtcatcaagagcgtggagaagaaggacccaactggtgccaaggtgaccaaggctgcaataaagaagaaatgatgcgtcctcccatgtgccctcgtttattttgtacttgtgcccgtatacttcgatctgttaaaatctattggttgtgtgccctgtgtctgttgtttgggtatctatactgttattttgagacatgttgacttgcatggtcatctggattgggttcgcatttctgagtcatttgtcttgacatg

SEQ ID NO: 4139 - DNA, 1634 bp, Zea mays
  Clone ID: 700349430_FLI
tcgacttggtgggatgtgattctccaccacctccgagcttgcaagaggcggactccacctctttcttcctcgcatgcctccttctctttccaaacacaaagccgcagcaaagaaagtgcaaattataaaggaagatcagaattcaaagcagtcgaaaagctgactagctagaagagtaaagagagagaagtatatttcagcaggacctccatggtgttcccttcagtgccagtctacctagatccacatccacctgattggaataaccagcagcagcaaggtcagcagccgagggcgagtgggggagccgatgcaccgctgttgcccgtgggtccgatggctgccacagcggcggcttcggagcccggcggcttgccgagaagctcatcaacgtccagtgccgccttggccatgcacgcaaggcccaactcgatggcggagcgcgcgcggctggcacgattaccgaatccagagccggcgctcaagtgccctcgttgtgagtccaccaacaccaagttctgctactacaacaactactccctctcccagccccgccacttctgcaagacgtgccgtcgctactggacgcgtggtggatctctccgcaacgtccccatcggcggaggttgccgccgcaacaagcgctcgtccaagtcctccgccgccgggtcttcctcctcctcaaagccgttctcctcgggtaggctgctcggtggtccatcagctatgtcgtccaccacccagggcgcaaccggtgcgatcatcgctccaggtcttagctctttctcccatcacttgccattcttgggctcgatgcacccgccaggacccaacctagggctaggcttctccgtcggattacctctgcttggcatgcaacacctggaaatggtggatcagtttccggtggcaagcggcggcggcaccaccatcggtgcatctctagagcagtggagagtgcagcagcagcagcaacaacaattcccattcatgactaggggaatactggaccttccacaaccatcgacgtaccaactgggcttggaagctagccgaggaggcagcggctcagatgcagtggcgttcactttagggcagtccacgaccagtgctgctaccataacgacaaggcaagaagggtcagcaatgaagatgggggacgatagcaaaggacaagacgcgagcttacagaagcagtacacggcagctctacaccacggatcaggatcacacggtgtttgggatgggaatgctggtggcagcggcagtggtggtggtggtggcactggcagtggcaattcaagttggccgatgaacatcgtttctgcattccattcttcgtccaccagcggtggcaatggcgatggcttatcgtagtactccagctgggggttaggccagtgtcctatcaagaatatgaagatattggagatgcatggttgagtttgagcaaatgctagctatagctaggacgatggaggaacaagagatggtcaatcagccggcctattcatcaactgctgttcctcatcagaactgtaaaaaacactgctctagctcatgatggtcacaggtaggagtttaaagtagaccctttaaagtaaggttgctctttggttaaccctttttctgcc

SEQ ID NO: 4140 - DNA, 993 bp, Zea mays
  Clone ID: 700349476_FLI
catagcacctgttccagctagctaggagagagctttatttaggtaatttagctttgtgtatatcttcttggttctagctctttgaattttttttatctgggtgcaggcggcggcaacaagatgaacaggaagccaggagactgggactgcagggcgtgccagcacctcaacttcagccgtcgggacgcatgccagcgctgcagtgaaccacgtggagttggtgatcgtagcggcggtggtggcgacttgggtgggcgtggtggttcctccttcggcggtggctttggtgctggctctgatgtccgccctggtgactggtactgctcctgcggcgcacacaacttcgccagccgctccaactgcttcaggtgctctgcctacaaggaggaggctgccggcgcctttgatagtgacatgtcacgctcacggggctacgccggcttcggcagcggcgctgccgcccgtaccaaccgccccggttggaagtctggagactggatctgcaccaggtccggttgcaacgagcacaacttcgctagcaggatggaatgtttcaggtgcaacgcgccacgggactccggtagcgctgccacgacgacctacgaaaactacttgcactgaggtgtaggtagagcaaagtttacagctatagcgcgcgtcgacgaagcaggagcagcagcagcagcatgaattgaagaggagtcctcatcatcacatcataagggagcagcagtagatttaattgcaaaattaaagacacccgcgatgcatgccctatcactagttttgttccaccggtacccctaccgcgcgtttcttttaagatttggttccccatttatctggggacagtagaccccagatgagacctatgtttgctgtttcattttcagttacgttcgtctccgcatgcatgtttgcgcttggatctgatgtaaccccaaaacgcttgcttcacaagtactattaactagttctgttgccttcctatat

SEQ ID NO: 4141 - DNA, 2189 bp, Zea mays
  Clone ID: 700349505_FLI
gatgagtttgggctgttcgcctgtggctgcctttgttccgtctgtgtctgtctatgatgggacgggacacctagggttcggataccggcaccggctcaactgacgacggactatcgccagtggcgatcaccctccctgtcccctgaccgcggcgtcccctgctcgcgccgcaccggtggcgacaaggcaccccttgcctgctcccctagacgcgagcgagcgagccaacacctgtcggcacaagaatggatgggaatgctgagacgatccaattctcatggggcaagcgtcgagggaaaggtggtgctaagatggatacacagttctttgggtccttcacattggacaatgtgaagtattcactgtttgactgtgtctatctatttaagcatggtgatcctgaaccgtacattggaaaaatagtgaagatctgggagaaagataatgataaaaaagtaaaaattctttggtttttccaccctgatgaggttcagaactatttaagtggccctgtgatgggaaaggagatttttcttgcctgtggtgaaggtgctgggcttgcagatatcaacccgctggaagctgtcgctggaaaatgcactgttatatgtacttcaaaggataagaggaatcgtcaaccatcccctcaggaactacaaattgctgattatatcttctatagggtctttgatgttaaaagtctaacactttctgatcagttaccagataaaattgctgcatttacagttgatcttcttctgaatccaaaagatgagctagtcatacctgcaaatgttctggtgaatccaaatgtggatgagggtatggttgccacagttcctacacccccttcagcagttaaattggaggatcgaagtcaggctgctgcacttccccttacgcagacaggccaggtggatgaaaatctgcctgccacagttccccttccccaatcagaggtcaaggaggaacagaaaccagtcattgccattcccatttcccagactgtggtcaagaaagaggataagaaatcactttctgacattcccctttcccattcagcagtcaaggaggatgagacaccagttgcttcaattggccctccacagtctgcagttatggagaacattcccaaacatacacagttacaggatgctcatgctggggagaggccaccaaaaaagttgaaattatcccaagaaactacagagcaggacatagatccaacgaatactgaacaaagacctttggagctacagccaaagaatattgacagaagcaaatggtttaacattgaatggaatgacagactaaagatggctgatgataaggggacacttgtctatattcaaaatctcgatattcggtttggacctgctgacatagaggagttagttcgtaaagcattacagctaaattgtactgcgaagcccattaaccaccccacatatgatgatccaaacaatggcaaagcatatgctatattcagaactaaagatgctgctgatgctgccatttcaaaaatcaattctggtttggttgttggtggaaggcccctgtactgcagcaaagggttacttgaggttccaaaaccttcagcgaatcttgttgggcacctctcctcatatgttaagattggtcaaaagcagcgcgacgagcagaagaaggctgtagcaacctcgcattgttcccagcccaacacgatcgagtacgacttggccttggactggatgcttcttcgggaaaagcaagaccagagcttcagagtacttcacaagaagcacagagaagccaggaaagggttcgcaagcctggtcggcaaaggatccaaggcagagtagcaggccggttgcccggttccaacctttcagagcttggcgcggtatgactgccgactggcaggaagagagggtcgtgcgcgcagaggttctctttttgcagtagccatcgagtagttcgttgggtcaattcgtgttaatttctgttaggaaaggaaaaatgtgttaataagtgttaggatagaaaatgcacgtcagctttgacaggtcagagcagcctaggtaggcatcaatatgttgctgcgactgcgatgttttaatttgacttggaacctcttatgttgggcgacaagtttgccctatgggggagagagacactgtttcgtctctgttaccatctcatctgatttc

SEQ ID NO: 4142 - DNA, 830 bp, Zea mays
  Clone ID: 700349508_FLI
gtagagctggccagctgggagactggtagtacagtggttgcccgtgtagcatgcatgcatgcctgtgtgggtggaccacgacagggattggactcgccgaacaccattttcctgggtacccgagtttcttgacagaacaaccgggatcaagattctctttttgtggcctagcctagaaccgtacccacaatatattttttttataaaaaacgggcagatttcgggtatagtcgtgtttctttttttccatgcttggtcttcggtctccgggtttaattttttcggctcgccagtcgcctctctctatatcatctccttgctgtgtatcatcactagttactccatccgtttatatactgctagctggttccgagtgattacccacagcaacagaagcagttctccaggcaatagactagctagatgcgcatcaccaaagagtagctttcggctagaacgaagaaacaccccccactagctacatggccgcgctcagttcttgtgttgcttctggaggcctggcacttcaggccacccttgtggtttctcttcctcaccgccgcgggactccagtcgtcatctccgtatcatctcatggtcgccgcccaagtcttatcggctcaaccatgaatccttcaggcatggctccgatcaaaagaactacacgaattcgtgcggttgatccaggccctgcaaattcgttaggaggaagcctcaccatcatcccaatacatgacctgctttcatcatggtgagtgaaaattaaaagctcaaacagatacacatgcatccatgctttgcttgttcattgctgttcagatgcgatttcc

SEQ ID NO: 4143 - DNA, 2581 bp, Zea mays
  Clone ID: 700349509_FLI
ctatatatcaacagaaggcacttgatatcaatgaaagggagctgggtcttgatcatccggaaactatgaagagttatggggatttatctgtcttctactaccgccttcaacacattgaaatggctctaaagtatgtcaaccgtgcgctatatctgcttcagttttcatgtgggctttcacacccaaattcagctgccacctacataaacgtagctatgatggaagaaggcatgggaaatgttcatgttgctcttcgatacttgcatgaagccctgaagtgcaataagaggttgctaggagctgatcacatccagactgctgcaagctaccatgctatagccatagccctttcaatgatggatgcgtactccctaagtgtgcaacatgaacaaacaaccatgcagatacttcaggagaaactaggggaagatgacctccgaactcaggatgctgctgcatggctagaatattttgagtcaaaagcattagaacaacaagaggctgcccgaagaggcatgccaaaacctgattcatctattgcaagtaaaggacatcttaggtatgaaactacaaataatctgagcagtttcatttataaaatatttaaatttagattgaaacatctacctttccagtgtatcagatcttcttgacttcataagcccagtccaggaaagaaaagaaagcaatgtgcaaaggaagtgtcggcgtgcaaagaataataccagagctcatcatggtgaatcagttgaagaaaaggagaatttccagcatgactcaggatctcttggagcaagtaaagacggttttgaagaagaaaaacctgatgtgcatcctcctgctgtattagaagaaaattatgctgcccatgaagagcagaagcaatgtgatgttttatcaccagaagaatattctgatgaagggtggcaagcagctaatatgagaggaaggtccgcaaatgtaaggaagaaaagtagtcgcaggaaacccgctcttatgaaattaatggttgatcgtttcgaagatgatcatacaggttctgtgtataggactggtttacagcctcgaacaaaaggggagaaagatgattctgcaactgctcctagccagatttcatttggtagctttttaaaaactgacaagttgaatggggatcccagcattgctgaagataagtctttgaatggtactgctaaaccagaacaacttacaaatccaacaggaattaacaggccaaccagcattgcttccaagtttatatcatacaaagatgtggctgtttcgccccctggcacagtattgaaaccaattttggagaagaaggaagcaaaggagaagggtagtggacatgatatttatctaacactgccatccgaggaagaagatccacagtttacagaaaatgagaaggaaaagccaagtgaggacagtagcaaagaggttctttcaagtcagcaagacttagagagtcatgtagaaacacctgacagcaacagtgatgaaaacccatctgcacctaagaaggcatctggaagcaaactgtcagcttcagcgcctccattcaatccaggatcactcttatcaatgtcccacccatacagcacggtggcaatatatgatgctagtgctgttattcaggcagtaccaaaccaagcaatggagattctccctcatgccattgacactagagtgcctcgtggccctcggtccaccttgtactatcgtactgggcattccttccaaaggaagcaaggttacacgcacagccagagcactattgtaaggggtagttactcccccacaaccatgaacccccatgctgctgaatttgtgcctggaaaaacttcgcaacaatctgatgtggctgacagagaacccagtcctgataatcatgtggccaatcctgatctggatgttgtatcgcagaccacagatgaagtgaaggctgaaacacctgccactgaaaaggcaggtcaagttgagaaagtcgtttcaggtaaaggaaaggaaaacagagggaaagacatcgtgagaaactcatacaaaacagaacttgcaaggcaaattttgctcagtttcattgtaaagtcagtgcatgacagtttaggttccgcccaagctgaaccagagaggaagccaagtggatcagatgaagctagtaataaacagagcagcaacttagtcaagaatgcttctggtcgcaaagattcagataaacaagagaaatccatggaggttcccaagggcctgaagggtacagagggatttacagtcgtttcaaaacgtcgaaggcggccccagccattcatgaaccccataaacggcctctgttctcagccgtctatttgcacctctgtcagttaaggtctcattgcattttcaaagacctgcaatagtttggaagatggaccattgcttttgcttaggggttggtagaagaattttgccgtatccaagcgagcagcgagcatgtagtcaaactgtacaaaattttccaggataccctttgtaataataataaaaaaaaactgctgtaatctgcagtagctgtagcgctgaataaagtattcctttgtatgtt

SEQ ID NO: 4144 - DNA, 1589 bp, Zea mays
  Clone ID: 700349518_FLI
cgcttctatccacaaaccccagccgcagcgtccgtgtaccagtgatgttgccactgcccaccgtgggcgtgggggcggtcgccgcgtcgccggccaccgccgcaggggtagcggcgcccataaggtttcgtccgctccgcctcgtcgcgagtcgagccagcactaccccttcttctccctctacgtccagctcggctatatccagcgcgtcaccagcggggcattcccgcgagcacctgtcgggcagggacggctccccatcgaagaccagcaagccccgggtgttcttcctcgacgtcaaccctctatgcttccgcggctcccaacgtagcctcggcgccttcgcgcgctggctggccctcttcttcgcacacgtcagcatccgtgaccccgtcgtcgctgttttggacggggatggagggaacgagtaccggaggcggctgctgccttcgtacaaggcgcatagggctcgcggcgtcggcactggcgctgacacgcgcgtcgtcgacgttctccgccaatgcaatgtcgcggttgtaagagtcgatggatatgaggctgatgatgtggtggctaccttaacagaacaggttttacagaaaggttacagagttgccattgcctcaccggataaagacttcaagcagctgatatctgatgatgttcagctagtcgtgcccattcctgagatcggccgatggtctttctatacattaaggcattatgttgctcaatacaagtgtgatccaactgcagacttaagccttaggtgcttcatgggcgatgaagcagatggtgttccaggaatccagcacttagttcctggattcggcagaaagaccgcggtgaaactactgcaaaaacatggttcgttagaaaacttgctaaacacggctgcaatcagaactgtcggcagaggttatgcccaggatgctctcactaagcatgcagattacttacggaaaaattaccaagttcttagcctgaagagggatgtaaatgttcagtttgacgacagttggttatccccgaggaacacatgcagtgacgccaatgttctagctgactttcttcttaaactgagtggccaaggcagaagctaaatagctggtacaacgacgcatttgcacaagctggacttgttcctcaccaaccacaggatttaacaagaaaagggagatgcataaaggttgaaggagccggttgctgtaaaaaaaattgcgtatatccttgctccaaagtagtagccatcacacattctcgcttgtgattcgtggaactggagcagccctacctgggttgaagctgggtggaaaaatggaagtttggaaggtctgtctgggtgggtacatggtgacgggacaagcttaagaatatacagggataagctatagtggtagtactactgtgctgtaggccgtaaagtccacaagtaccttgccaggagattacagatggcgtacttcgtactggtagcgactcgttgatgtacaactaaatgcacgcgggttttttttttgtaaagtttgtactgagacacagtgtcccgacgctgtcaggaatcatctttaaatcatttttagtgacac

SEQ ID NO: 4145 - DNA, 2989 bp, Zea mays
  Clone ID: 700349524_FLI
ctcgacatcctccaggacctgcacggcccccacctgcgcgaattcgtgcaggagtgctacgagctctcggcggagtacgagaacgaccgggatgaggctcggcttggcgagctcgggagcaagctcaccagcctgccgccgggggactccattgtcgtcgccagttccttctcgcacatgctcaacctcgctaacctcgccgaggaagtgcagatcgcgcaccgtcgccggatcaagctaaagcggggagacttcgccgacgaggcctccgcgccgacggagtcggacatcgaggagacgctcaagcgcctcgtctcgcagctcggcaagtcgcgggaggaggtcttcgacgcgctcaagaaccagaccgtcgacctcgttttcaccgcccaccctacacagtccgtgaggaggtctcttctccagaagcatggaaggatccgtaactgcctgaggcagctttatgccaaggacatcactgctgacgacaagcaggagcttgatgaggcacttcagagggagattcaagctgctttcagaactgatgaaatccgcagaacccctcccactcctcaagatgaaatgcgtgctggaatgagttacttccatgaaactatatggaagggtgtaccaaaattcttgcgccgtattgacaccgctctgaaaaatattgggatcaatgaacgtctcccttacaatgctcctctcattcagttctcttcctggatgggtggtgatcgtgatggaaatccaagagtaacaccagaggttacacgggatgtatgcttgttggcgagaatgatggctgctaacttgtacttctctcagattgaagatttaatgtttgagctgtctatgtggcgctgcagtgatgaacttcggatccgtgcagatgaactacatcgctcttcaagaaaagctgcaaagcactatatagaattctggaagcaagttccgccaaatgaaccatatcgtgtcatacttggtgatgtcagggataaattgtactacacacgtgaacgttctcgtcacctattgacatctggaatttctgagattctagaggaggcaacttttactaatgttgaacagtttctggaacctcttgagctctgttatagatcattatgtgcttgtggtgacaaacctatagctgatggaagtcttcttgatttcttgcgtcaagtatcaacttttgggcttgcccttgtgaagctcgacatcaggcaggaatctgatcgacacactgatgtccttgattcgataacgacacatcttggaattggctcctatgctgaatggtctgaggagaaacgccaggattggctgttgtctgaactgaggggcaaacgtccattgtttggttcagatcttcctcagactgaagagactgctgatgttttaggcacatttcatgtccttgcagagcttcctgcagattgctttggcgcgtatatcatctctatggcaactgccccatccgatgtgcttgcggtcgagcttttgcagcgtgagtgccatgtaaaacatccactgagagttgttccactttttgagaaacttgcagatcttgaagcagctccagcagctgtagcacggctcttttcaattgactggtacatggataggattaatggcaagcaggaggtcatgattggatattcagactctggcaaagatgccgggcgtctctctgcagcatggcaaatgtataaagcacaagaagagctcatcaaagtggcaaagcattatggagtcaagttgacaatgtttcatgggaggggtggaacagttggcagaggaggtggtccaactcatctggccatattatctcagccaccagacacgatacatggatcacttcgtgtaacagttcaaggcgaagttattgagcactcctttggagaggagctcttgtgcttcagaactttgcaacgctacactgcagctactcttgagcatggcatgcatcctccgatttcccctaagccagaatggcgtgctctgatggatgaaatggctgttgtagcaactaaagaatatcgatcaattgtcttccaagaaccacgcttcgttgaatacttcagatcggctacacctgagactgaatatggtaggatgaatattggcagccgtccatcaaagaggaagcctagtgggggaatagaatcactccgtgcaattccatggatctttgcttggacacaaacaaggttccatctgcctgtctggcttggatttggtgcagcgataaagcacatcatgcagaaggacatcaggaacatccatatactgagagaaatgtacaatgagtggccattcttcagggtcacccttgatttgcttgagatggttttcgcgaagggagacccgggaatcgcagctgtgtacgacaaattgctagtggctgatgatttgcaatccttcggcgagcaactgaggaagaactatgaggagacaaaagagctactccttcaggttgctggtcacaaggacgtccttgaaggtgatccttatctgaagcagcgtctgcggctgcgtgagtcctacatcaccactctgaacgtgtgccaggcctacaccctgaagcggatacgcgacccgagcttccaggtgagcccgcagccgcccctgtccaaggagttcaccgacgagagtcagccggcggagctggtgcagctgaaccagcagagcgagtacgctccaggcctggaggacaccctcatcctgaccatgaagggcatcgccgccggcatgcagaacaccggctaggccaagatcttcggtgtgcaaataacctgtctcccatgagacggtggacgatatgtgtaggcctgtgagcagttagtacaccggcgccagtgtgttctggaggatttttcatgtcagagcctttctcttgtgtgcttgctgtagatgccaaggggagcttattggctgttgaagcctgatgcaaaataaagtacgaaactatgttttttgtttaact

SEQ ID NO: 4146 - DNA, 1364 bp, Zea mays
  Clone ID: 700349535_FLI
aaaagttgatggaagctgctaaatccaatgaagatgcactaaggaagacttctaacgaactagaactgaagcttaaatccagtgattatgtgaaacaacaaatgctggaagaaatatctggcctgaaacttcaggctcagaaaataatgaatcttcaagatgaggtttccaaacttcagagttctcttgatgaggccaagttcgaaaaagggaaacttgaggagtttctgcgctcggtgactgaggaatgtcaagaactaaaagcacagaaggctatgctaacagataaagtttcttatatgcaggagaccttgagaaatggtgaagaagaaaaccgaaacagaatagctatgcatgcaaagctcatgaggttggagagtgatctaacagcattagaagcatcacatgtacatgaagcagaattaaagaacgaactcagtaggattaagagatcaaacagtgagtatcagaggaagatacaatctctcgggcaggaaaatgaggatctcactaggcgagttcaaattatggaaaagggttttgagcgaatgtcccacgctaaagagaaccttggaaagcaggagattggaggagataaccaggaagccatccagtcaacaattcagttactggaaactaagcttgcagaggcattggaggaaaataagatatacagagctcaacagaagagttcgatgtctgaggggcaacctgctggtggagatggcaaggagggcaataccgacaggattttgcagttggaaggagagctgagagatatgaaggaacgattactcaacatgagcttgcagtacgcagaggtagaggctcagagggaacggttagtgatggagcttaaagctatcaagaaaggcaggtggttttagcaggatgcggagttgttgcctgacataaaacatgaggctgacaccacaggtgggcatcatcaagccgtgctatgctccagcaccagtgagactaagagcaagcaagtgcaagtgcagagtcagacagtgatatagcctggacgtgctaactggtgctggagcatgtgtctctcactgaagctccgtatgatgcggtacccagcccttggggcgttgtcccctagagtcatgatcccgttcttattggtatttatttttaatggtatataattaatatatacaccagtatgtattgagtttgactggagagtgatggtcagttgttgataccatccgatccctctgttttacatgattgattacgttggaaagagtcaacccattaagggctagtttggaagccacaaaaccggagggagttggaggggctaaaatccccatcttattcaattttgaataaaaagaagattttagtcc

SEQ ID NO: 4147 - DNA, 2251 bp, Zea mays
  Clone ID: 700349551_FLI
attctctgcaaggtggtcaatgtagaacttagagctgaaactgattctgatgaagtttatgctcaaattatgctgcaaccagaagcagatcaaagtgagcccaccagcccagattctgagccaccggagcctgaaagatgcaacgtctattccttctgcaagaccttgactgcttcagatacaagtacccatggtggattctctgtcctcaggaggcatgctgaagaatgtttgccccaactggacatgactcagaatccaccatggcaagaactgctggctaaagatctccatggaaatgaatggcatttccgtcacatctttcgagggcaaccaaggaggcatctacttacgacaggttggagtgtttttgttagctcaaaaagattggttgctggtgacgcgtttatctttttgagaggtgagaacggagagctgagagttggggtaaggaggctcatgaggcaactaaataacatgccatcttcggttatctcaagccacaacatgcatcttggagtcctagcaactgcatctcatgccatctccacaggaactctcttttctgttttctacaaacctagaacaagtcgatcggaatttgtcgttagtgtaaataagtaccttgaagctaagaatcacaaggtgtctgttggcatgaggtttaaaatgagatttgagggtgatgaatctcctgaaagaagattaagtgggacaattattggtctgggaagcatgccagctaactcaacttctccatgggctaactctgattggagatctttgagggtccaatgggacgagccttctgctattctgcgtccagatagagtttcaccatgggaactagaaccccttgatgcaactaatccacaaccacctcaacctcatttacggaataagcgtgcacgaccccctgctttactttctattgctccagaacttcctcaagtttttggttttttgaaatccccagctgagcctgcccaagctttctcattttcaagaccgcagcaaactcaggaattataccattcaaatcccagttcaatcttctcatcatcgttgaatgtaggattcagttcaaagaatgaccgttctactccaatcaacagtcatttgtactggacaatgaggcagacaagaactgaatcctactctgctagcattaacaaagctcctactgaaaagaagcaagaatctgctacttctggctgcagattgtttggcattgagataggttctgcagtatcaccagtggctactgttgctagtgttggccaggatcagccacctgctctctcagtagacgttgaatctgatcagctgtcacagccatccaatgccaacaaaacggatgccccagtggcaagcagcgagcgctctcttaacgagtcagagagccggcaagtcaggagctgcaccaaggtaatcatgcaaggaatggcggttggcagggcagtggacttgacaaggttagatgggtatgctgatctccaccgcaagttggaggagatgtttgatatccagggagagctttctgccaacctcaagaaatggaaggtcatttacacagatgacgaggatgatacgatgctggtcggggacgatccatggaatgaattcctcaggatggtaaaaaggatatacatttactcttacgaggaggccaagtctttgactcgcaaggcgaagccgccggttgttggtgacaccatcaagccagacccaaacaaattgccaccggaatctgacgtgccacatgactcaaacaacaatgctcccgttgctgctgattatcaggactgatggatgctaacttggctcctaccttttctttcccctcttggatgtcggtcatgggaggcaatgcacgctccttgggacttgtaagagttatctgttttgttgcttcgcgggcccaaaggacgcttccctgcaccatctgcctttgtttggaacggcttggaccgccgtggtccttttacctgcagcaaggaaaggaatggctgggagggaatggatactggtatcgttccgtgtgtggcaccccgtgatctgtttgccgtgctttgtaggaggcatggcgtattgccgggtactttggttttggagactgctactgactgctgccgtcgtcgggccgctcctctcacctctggtaaataggactttgtacacaattattttgttagtagcagtatatgtacatcatcggtcgtgttgcttgctacatgtactcctatgtagc

SEQ ID NO: 4148 - DNA, 2136 bp, Zea mays
  Clone ID: 700349556_FLI
ccctttcgccggcggcgtaggaagagatggcagagcgtttgacccgtatcgccatcgtcagcgaggacaagtgcaagcccaagaagtgccgccaggagtgcaagaagagctgccccgtcgtcaagactgaaatgtccatttgatgccattgaaatcatcaaccttccaaaagacttggaaaaggataccactcaccgatatgggcctaataccttcaagttgcacagattgcctgtcccaaggcctggtcaggttttgggccttgttggaacaaacgggattggaaagtcgacagctcttaaagtgttggctggcaagctgaaacctaacttggggcgcttcaaaaacccacctgattggcaggaaattcttacatactttcgtgggtctgaacttcagaactacttcacacgcatattggaagataacctgaaggcaatcatcaaacctcagtatgttgaccacattccaaaagctgttcaagggaatgtaggacaagtacttgaacagaaggacgagagggatatgaaatctgaactgtgtgttgatcttgaattaaaccaagttattgaccgaaatgtaggagatctttctggtggtgagcttcagagatttgcaatagcagttgttgctgtgcaaaatgcggaaatctatatgttcgatgagccatcaagctaccttgatgtgaagcagaggctaaaagctgcacaagtcgttaggtccttgcttaggcctaacagctatgtcatcgttgtggaacatgatttgagtgtcttggattacttgtccgacttcatttgctgtttatatggcaagccaggtgcttatggtgtggttaccttgccattctcggtccgagagggtatcaatattttcttggctggatttgttccaacagaaaatcttcggttccgagatgaatctcttacatttaagattgcagagactcaagaaaatgctgaggagattgagacgtatcagcggtataagtaccctactatgagcaaaacacagggaaatttcaagcttactgttgttgagggtgaatttactgattcccagattgttgttatgcttggtgaaaacgggacagggaaaactacattcatcagaatgctggctgggttgttgaagccagacacggtggaaggaactgatattgaaattcctgaattcaatgtgtcgtacaagccccaaaagattagcccgaaattccagaataccgtgaggcatttgctgcatcagaaaattcgggattcctatatgcatccgcagtttgtgtctgatgtgatgaaaccactgcaaattgaacaactcatggaccaagaggttgttaatttatcaggtggagagctccaaagagttgctatatgcctctgccttggaaagcctgcagatatctatctgattgatgaaccaagtgcttatcttgattcggagcagcgtattgttgcctcaaaagttatcaagagattcattcttcacgcgaagaaaactgcatttattgttgagcatgatttcatcatggcaacatacttggctgacaaggtcattgtttatgaggggcgaccttctattgactgtactgccaacgcaccacagtctttagtatctgggatgaataaattcttatcgcatctcgacatcacttttagaagagacccaaccaactataggccacgtataaacaagttggaatcgacaaaggacagggaacagaagtcagccgggtcctactactacctcgatgactaatgaggaagtgcagattcttcttggagagccatatgtcgcataatctttccagagcatggaaaggagaagctactttgaagctaccactgcatcatggcatgtgacttgttgaataattggttgcaggagtagagtgcgccggttataacttataaagcagagcatgccgtgttgatactgagttttttgttggcttgacctatatgaagagaaggatcggtgttaaaatgagatttgcgagggggaactaatttctgtttttaagcaatactgtactgtcgttttgctatcaagtatatttgaccctcgattatatagattacattgaagtttttgggcaacaatgtgaaatcttgtgataaatctctgtgcttattggtt

SEQ ID NO: 4149 - DNA, 1463 bp, Zea mays
  Clone ID: 700349560_FLI
ccgggagccaccgcgatgtcgcccaagccggcgaagccgacacccgccaccgagttcgagtactgcgagctgtgccgccatcaccacgaccatggccggcgccatcgctacatcgtcaagcacaggagaaatctcgacgccgcgctcacctccttccgctccaagctctccgacctccgccgcgccttcctccccggctccccctcttcccagccgccgcggacccgtctctggtgccccttctgctccattgacctcgtcgacctcgacagccgctccgctggtaacaatgccatttaccatatggcaagcagtgagcacctgaagggtgtgaaggatttcctgtggaagcacgggggacggatggatcaggtggtctcgcttaggatttcagaggatgtgcttgccaagtgggagaaaggccctgaatgcttgagcacaggaacgaagaaggggactgaagagctgattggaccatctctgaagcagataaaagcaatggggcatatggctctattagtacagcgtgtcatggagcttccagttctggaagtgcttcacattctgctccatatggaactgtcggcctgcccatcacaccttggggatcggccgaaacacataagctgcagggtgcactgtctacaaactggtttcacagcagtggtactgaaacaaaaggccatcagtctactgtctttgtgaatggcgcaagccaatcactttcttgttctgatcatatgttacctttgcgggttcaacaaagtcacactggaggaaatttgagcaatggctcaaaagcaaatgtgcatacgggtgctcctcctccctggttaaaagctaacgaacacgatccaaagaatttgtcactcaaaagctgtggtctttcttcccggaaagggaaattgaggaaactcaatccaaacagggttggtgctgcatgggcagaaagaagaagagctgagatggaaatggagaagcaaggtgaaattgttccagcaacatctgattctagttggctgcctaattttggtagtgtctggcaatctggcacaaggaaggaatcaaggaaagaatttgagaaaagccacaagattcatgacacgaagagcgaccatgacttatccttggagataaaaccatatatcagcaaacggatgcgtgtaggtgctgagaaagcttctgacaaagctgaagagcttggcagccacctaccgcagtaaacagatgtacaacccggtggatgtcgtcgcgtgggcgtctctgcggaaaaagccgccagggcgcgcggcttgattagcgattggtttggtttccatgtcaggtcgcgcctgggaagcccgccgcgagtacggaatgccaagccagtagtagtttttgttctcggcacgaagccatttgatgttcgttttgtgcgacggtttgcggcttgatcgcgattggcctcgtagcctttttgaccg

SEQ ID NO: 4150 - DNA, 981 bp, Zea mays
  Clone ID: 700349578_FLI
tggaagctagtgggaccagtaacatgaagtttgcattccagcagtactgatatgctgtgacaattcactggcaggaattagcgcctcggcaacactaacattatatcagtactgctggaatggaagctagtgggaccagtaacatgaagtttgcaatgaacggttgcattcttattggaactttagatggtgcaaatgtggaaatcagagaggaggttggagaggaaaactttttcctttttggtgcagaggcacatgaaattgctggtttgcggaaagaaagagccgagggaaagtttgtgcctgacccaagatttgaggaggttaaggaatttgtccgcagtggtgtctttgggacttacagctatgatgaattgatgggttctttggaaggaaatgaaggttacggacgtgcagattatttccttgttggcaaggacttccccagctatattgaatgccaagaaaaagttgatgaggcgtaccgagatcagaagttatggacaaggatgtctatcctcaacacggctggctcatccaagttcagcagcgataggacgattcatgagtacgccaaggatatctgggatatcagccctgccatccttccctagaccaggtggatatcaggttctttcgcctatatttctgtgaaccctcaggatcaaggaacagttggtgacgacattaatttgcctcagccccttagcaggaagcgctggtcacctcagttttgtgtagacaaaatctaggcatcgataaatgatgggggactatgcatggtgttttggcagcactgttcagtaccttgccttctaaatctggtttttggtgtgtgtgtgtaagctaataaatgtcgaggcaggattgtaggaacaccattgatcatttggctcgctggtgacctggtgacgtatggtgtaattagtagttgtttgcctcctggagcttgctggcttctgtaatggtattttcgtaacg

SEQ ID NO: 4151 - DNA, 1444 bp, Zea mays
  Clone ID: 700349579_FLI
cttctccttccttcctccccccacagccacagtggcatatcgcatcacgccaaagcccatccgccggccgtagatcggctccggcgaccggcttcgaccgcggcctcccctctgaggattttcggcctagaggttccccatggcatcagttacttatattgatgatagccatgctgaggttattgatcctccaaagaatgaggaaatgctggatgccactgaacttgttggtgatcatattcagaattcaccaaaaccaaatgtggcaagctatggcaacgtgcgtgagctactggaatgccctgtgtgtttgagtgccatgtatcctccaattcatcagtgctccaacggacatactctgtgttctggatgcaagccaagggttcataatcgctgtccaacatgcaggcatgaactgggtaacataagatgccttgctctggaaaaggtggctgcatcactagagcttccatgcaagtaccagaactttgggtgcttgggcatatatccttactattgcaagctgaaacacgaatcgcaatgccaatacagaccatatacttgtccatatgctggatctgaatgcacggttgctggtgatattccgtatctagtaaatcacttgaaagatgaccataaggtcgacatgcacaatggaagcaccttcaatcatcgttatgtcaagtcaaatcctcatgaagtcgagaatgctacctggatgctcacggttttcagctgcttcggccagtacttctgcctgcacttcgaggctttccagctgggcatggcgcccgtgtacatcgccttcctccggttcatgggggacgacgctgaggccaagaactacagctacagcctggaggtcgggggcagcgggcgcaagatgacatggcagggcgtgcctcggagcatcagagacagccaccggaaggtccgggacagctacgacgggctcatcatccagcgcaacatggcgctcttcttctcgggtggcgacaggaaggagctcaagctgcgggtcaccgggaggatctggaaggagcagtgagtcgcgtgcatgcagtgcaggtgcaggcagcagctcgacgcatgcggcgttgcgtgtgttccttctccggtgttaccatgacctgaagcatggaatccaggaaccttgtagggtggtgtaggtggtagttggaatctttgagtcgtgggtggttcttgtgtcgttgtgtggtagtggtaccgactgatttagagaactggaggcaattctctcctttgctttgaacctgtcgagagctggtcatgatgggcacggctgtggactccatgaaatgtaaatgatgtatcccggctcactctgtctgtggatcagactcgctctctatcggcggaccacaattgttcctgagtttggccaatgagttaggtcccaaccattctctgctccagctggtac

SEQ ID NO: 4152 - DNA, 2621 bp, Zea mays
  Clone ID: 700349616_FLI
atcggcgagcctgcagtcagacttaccaccaagtggacgcagcagctttaaccccccaaagcctcgacgccgcgagcacagctccgccgccaccgcccccttctcatccgcggtctcctccgcctgctgcatctctatcgatctagcgggactggctccttcccgtgctgggtccttcgtcaatcgtcagcgcgcaagatcggcacttgtgtacatctgagcagtttccggtgccctaattcaggcgcgggcgttgttgggttttcgataattttgggggttcacctgaaccctcatgacccaggtgaagcccgcccctgggggaaggatgctgaccgtgctgcgggtgcacctcccgtcggagatcccgatcgtcggctgtgagatcacgccgtatgtgctcctgcggcgccccgacggaggcgtcttcaccgacgacgtgtctgagaccgcgcccgtggatgggtacttcatgcgctacaagtggtaccgcatacaaagtgatcgtagagctgctatctgcagtgtacacccaacagaacaagcaacacttcagtgcatagggtgtctgaagtcaaaaatacctgttgctaagagctaccattgttcttctaagtgcttctccgatgcttggcaacaccacaaggttttgcatgaccgtgctataagtgctttaaatgaaaacggaaccgaagatgatgagttgtttggcagatttggtagcggcagttcgagctcaggggttattagtgctgcgttgtctggttcaacatcaaacctttcactgagctcaggtgttaataatggacctacacctgtgtatccaacaggcactgagaagagttctggtgaaacttggtttgaagtgggatggtcacgaacatatacggcaactactgatgatattggacatgtgctaagatttgaatgtatagttgtggatgtggaaacacgggggactgtgagagctcctacttcagtcatgacatcccgtgtaatcccagcaccgaccccgacaccacgccgcttgatccctgttaatgcagctgatgcaatggtccacttcgatttagatagccggacttcttcttttgggacatttactgtgctgtcctacaatattcttgctgatacatatgcaacaagtgatacatacagctattgtccaacttgggcacttacatgggcttatagaaggcaaaatttgttgcgtgaaattattggttaccatgctgatattatctgccttcaggaggtacaaagtaatcactttgaagattttttttcaccggagcttgataaacatgggtaccaacctctatataagaaaaggacgacagaggtgtacagcggaactcctcaagcaattgatggttgcgctactttctttcgtcgggacagattttcgcatgtcaaaaaatatgaggtcgagttcaataaggctgcacagtctttaactgatgcaattattcctgccgctcaaaaaaagttagctctaaatcgtttggttaaggataatattgcgctaattgcagttttagaagctaaatttagtaaccatggaactgaaaaccctagtaaaaggcaacttctctgtgtggctaatacacatataaatatccacaatgaccttaaagatgtgaagctatggcagattcataccctcctaaaagggttggaaaaaatagctgttagtgcagacattccaatgttggtctgtggagattttaattcaactcctggaagtacgtcacatgggcttcttgcaaggggcaaagttgatcatttgcatccagatctagcaatagatcctcttggaattttgcgtccactaagcaagctgacacaccagcttcctctggtcagtgcatactcatcattcgtgagtatggctggtgttggctatgatttggatcaccagcggaggaggatggaccctgggacaaatgagccattgttcacaaattgcacaagggattttactggtaccctagattacatattttacacagcggattcattgactgtagagtcattattggagctgttggatgaagatagcttgagaaaagacacagctcttccttctcctgaatggtcatcggatcatatagcgctcctagcagaattccggtgcaagcttagagttagacgatgatactttaggaggagctgtaggggagggattctcgacaatcgcatgagaatgtaccctggcgaaggcaggaacgagaagcctaagggaaagaggcttgttatgttcctcacccttttcatttccgcctcgatgttctctagtggcactagttggaatgcgacttcctatagaagatatattatcaatgcaaagagaaatgatttaatagattcgtgtgccgtttttagttttccatcctcacattgtcgcccccccttccccttcatcctcttcaatgtgagttcactgtccacatttttgttccctaccatgaatgtgctctagttcttacaaactaaaaatggccccttccatagtgtatgtatgtctcttgagcggggatcagctttggcgtagtttactgtgttgaagatgcttagttgaaaagtgatgttgggttatctatgatggatattgaacgaat

SEQ ID NO: 4153 - DNA, 723 bp, Zea mays
  Clone ID: 700349624_FLI
aggactctcatacctgcaccatgactgtaagcccgtgatcgtccatcgagatgtgaagtcgaacaacatcttgctcgacgcggagtatggtgccaagattgcagattttggtgttgcaaggactattggggatggcccggctaccatgtccatgattgcagggtcttgtggatacattgctcctgagtatgcctacactctccatgtcactgaaaagagtgacatatatagctttggtgtggtgatccttgagctcgttaccggaaagaagccgctggcagcagagattggcgagatggacctggtggcgtgggtgactgccaaagttgagcagtacgggctagagtctgtgcttgaccagaacctcgacgagcagttcaaggacgagatgtgcatggttctgaaaatcgggctgctctgtgtctcaaaccttccaaccaaacgcccgtcaatgaggtccgtggtgatgctgctgctggaggtcaaggaagagaacaagccaaagctgaaggcggtggcaactctgcccatctgacctggaggaggcgaccccatctgatcaataataacaaataaaagtagtgtctgttcttcttgggatagtgtactaaaaaaactatttgcattatatctgatcttgagaagttcattcagggcagcagctagctagctaggtctgagaacattttcagcatagtgtttgctaaagcttatgactgtggt

SEQ ID NO: 4154 - DNA, 561 bp, Zea mays
  Clone ID: 700349642_FLI
aatcctcttcctcgagttctcctcaaccaaattcaaagtcacagcggcgaaactctcggcgatgtctggccgcggcaagggcgggaagggtctgggcaagggcggcgccaagcgccaccgcaaggtgctgcgtgacaacatccagggcatcaccaagccggcgatccgcaggttggcgaggaggggcggcgtcaagcgcatctccgggctcatctacgaggagacccgcggcgtgctcaagatcttcctcgagaacgtcatccgcgacgccgtcacctacaccgagcacgcccgccgcaagactgtgaccgccatggacgttgtctacgctctcaagcgccagggccgcaccctctacggtttcggcggttaggtcgcccctctcccggtggcgaattacgtggtggcggtggcggtcgtgttgtgttcttggtctagttagtctgtgttgtctttatcggtgctgttttctgtggtggttgtactgcatcgttctagtttctagtccatgtgctgtaatatctcgctgctgtaatcaatggaatgtcctcgtttcaagcc

SEQ ID NO: 4155 - DNA, 308 bp, Zea mays
  Clone ID: 700349664_FLI
ggagaggcaacaggaattagaggaagaagaaaggataaggcaactgaggaggaccgagctggttcctaaagctcaacccatgccatactttgaccgccccttcattcccaaaaggtcgactaaaccggctacagttcccatggaaccgaaattccacctcaggccagaaaagatatcctgttactgtcgacagcaatgtatggagcttggaaagctgaatccacaacagcagtgccaacatccactatggcaatcgagaagtacagagcatcaacacacatgatccaaaaaatgtttccctagatcgc

SEQ ID NO: 4156 - DNA, 1040 bp, Zea mays
  Clone ID: 700349716_FLI
gcatcttcgctccggctgcgctctgccttgctttcctgctacctgctctagcgcgagcgagagaggtacggcggccgatctggcggcgcaggcggagggctcggccggggccggcaagtcggcgccgaacatggggaggggccgggtcgagctcaagcggatcgagaacaagatcaaccgccaggtcaccttcgccaagcgccgcaacggcctgctcaagaaggcgtacgagctctcggtgctctgcgacgccgaggtcgcgctcatcatcttctccaaccgcggcaagctctacgagttctccagcacgcagagcatgccaaaaacacttgaaaagtaccaaaaatgcagttttgcagggcctgaaacagcactccagaatagagagaatgagcaactgaaaagtagccgcaatgagtacctcaaactgaaggcacgtgttgataatttacagcggactcaaaggaacttgcttggtgaagatcttgagtcattaggcataaaagagctggagcacctggagaagcagctcgattcgtccttgaagcacataagatctacaaggacacaacacatggttgatcaactgacagaacttcagaaaaaggaacaaatgttttgtgaagcaaataagtgtcttcgaagaagactggaggagagcaaccaggttatatggcagcatgcgtgggagcaaagcgagcggcattctgaagtgcagccgcagcagctcaatggcaataacttcttccatcccctcgatggtgctggtgaacccacccttcagatagggtatccttcagaggcactgactagctcatgcatgaccaccttcctgcccccgtggttgccatgagatcgaactactgcgcaattccgaattaataagcatggccgcatgcagctgcctgtgctatacgttgtgcttggagtgtacttcaaggttcttgcatgacaagtatgtgtgtaacatttgtgatgaacatggaaactatcccacttaattctcgaataatccaatgaactgggtaagattgtaacat

SEQ ID NO: 4157 - DNA, 1043 bp, Zea mays
  Clone ID: 700349742_FLI
ctttggccaccggatagctaggaagcggcgatcgccaggaaggaacgacgatgcaggggagctacggctacgacggggcggcgtcacgggaccccaagccgcggctgcgctggacgccggacctccaccagcgcttcgtcgacgccgtcaccaagctgggcggaccggacagagcaacacccaagtcggtgctcagattgatgggcatgaaagacctcactctttaccagttaaaaagccacctccagaagtatagactggggatacagggcaagaaaagcacaggcctggaacctgccagcggcggcgtacttcgctcacagggcttcggttcaaccacagcgcatcctcctccaggtgttcctgatcaagggaagaacacaagagaaatagcacttagcgatgcactaaggtatcaaattcaagtccaaaggaaactacaagaacaaactgaggtgcaaaagaagctgcagatgcgaattgaggcccaagggaagtacttaaagacaatactagagaaagctcagacaaatatttcctttcacacaaatgcatccaatggcatagaatcaaccagatcacagctcatggacttcaacctagatggtttcatgaacaatgcaactcaagtatgcaaagaacatagggagcaattggtgaaagctatgtccgatgaaaacgataaagatagtctaggccttcagctctaccatctaggaagtcaggaggctaaggaagtcaaatgcacaccaaaaactgaagactcgctcctactagacttaaatattaaaggaggatatgacctctcttctagaggaatgcaagcatgtgaactagaattgaaaataaatcagcagatagtataaatttgttcacaaagctgacagttttgggaagttcactctttgctattagattactatttttcccctgtggctcctgagcatgcttgtccaatgcccacaagctcacaagttttatttactatctgctcatgttatatttgctgaaagaagcttttgaataaatgtgggcattgtttt

SEQ ID NO: 4158 - DNA, 549 bp, Zea mays
  Clone ID: 700349765_FLI
tgtcgttgttgaaaagcatgggatggtagctgcaggatcccttgtaagacagaatactaggatcccttgtggagaggtatggggagggaaccctgccaaatttctgaggaagctcacagatgacgagatcgcatttatcacggaatcagcttccaactattccaatctgtccaaggtgcatgctgccgagaatgccaagcctcttgaaaagattgagtttgagaaggtgttacgcaagaagtttgctcaccaggatgaggagtatgattcctccatcggcatcactcgaggggccccaccggagctgacatccccaaatccagcccaataaacctctgtttttgtttctgttttctctttgacgccttaatcattttgtattggacagcgctggattttgaccgggccatagttccatgacttaggtggcttatgtttacttttcctccccaataatcttgggtcgagcgatgttataaagctggccatgcacttcttccagattctgtattcgttgtgtttaagatgtgctccctggagagttccacc

SEQ ID NO: 4159 - DNA, 1223 bp, Zea mays
  Clone ID: 700349862_FLI
ctcgctcccggattcagcgtcgggcaagattaagatcggaatcaacggcttcggaaggatcggcaggctcgtggccagggtcgccctccagagcgaggatgtcgagctcgtcgccgtcaacgaccccttcatcaccacggactacatgacctacatgttcaagtacgacaccgtccacggccactggaagcacagcgacatcacactcaaggactccaagacccttctcttcggtgacaagccggtcaccgtctttggcatcaggaaccctgaggaaatcccgtggggtgaggctggcgctgagtatgtcgtggagtccaccggcgtcttcactgacaaggacaaggctgctgcacatctcaagggtggtgccaagaaggttgttatctctgccccaagcaaagatgcacccatgtttgttgttggtgtcaatgaggacaagtacacctcggatgttaacattgtttccaatgctagctgcaccacaaactgccttgctccccttgctaaggtcattcatgacaacttcggcattgttgagggtttgatgacaactgttcatgccatcactgccacacagaaaactgttgacggaccctcagccaaggactggagaggtggcagggctgccagctttaacatcattcctagcagcaccggtgctgccaaggctgttggtaaagttcttcctgatctgaatggcaagctcactggtatgtccttccgtgttcctactgtggatgtctcggttgttgacctcaccgtcagaatcgagaagggggcctcctatgaggatatcaagaaagctattaaggctgcttccgagggtccactcaagggtatcatgggttatgtggaagaggatctggtttctaccgacttccttggtgacagcaggtcgagcatcttcgacgccaaggccgggatcgctctgaacgaccacttcgtcaagctcgtctcgtggtacgacaacgagtggggctacagcaaccgcgtcgtcgacctgatccgccacatgttcaagacccagtaggggtttttcccccctgcttctcatggatggttgctgcttgtgtatgccgagaataaatgtggatggcgcgtgcctctgggtcgccaggttcatgctgagtctggacatgttttgcacttttgtttcccttcctgctaccatctgtgacagatccgctcgctaatatgggacctgagattagctttttgct

SEQ ID NO: 4160 - DNA, 1541 bp, Zea mays
  Clone ID: 700349988_FLI
cgacttagccctcgatcacgggcgcacaacaacacagcgacgctatctgaccgagtgttcaaataaatacccacacgggcacgccacgagacgatgagacccctctgctccaatccgccgctccactccaagtcacacggaggcagccatcgtagcctcgcccgactccgcttcccctgttctttgggcatggagctgatcacaaatgtcaccgagtacgagaagctcgcgaaggagaggctgccgaagatggtgtacgactactacgcctccggcgcagaagatcagtggacgctcaaggagaaccgggaggccttctccagaattctgtttaggccacgggtactgatcgacgtctcccgtatcgacatggccacaaacattctgggcttcagcatttccatgcctatcatgatcgctccttcagccatgcagaaaatggctcatcctgatggagagcttgccacggcaagagctgcagcttccgcaggaacaataatgacattgtcctcatggtctacttccagcgttgaagaggtcaactcagttgggccgggcatacgtttcttccagctctatgtctacaaggacaggaatatcgtacggcaactcgtgaaaagggctgagatggctggcttcaaggccattgcactcacggtagacactccaatacttggccgcagggaagctgacattaagaacaggttcgccttacctccacatctggtgttgaaaaacttccaagcgctggatcttggcacgatggacaagacaaatgattccggccttgcttcctacgttgctggtcaagttgaccgcaccctttcctggaaggacgtcaagtggctgcagacaattacctcgttgccgatcctagtcaaagggatcgtgactgcagaagacactaggcttgcgatcgaatatggcgctgctgggatcatcgtgtccaaccacggcgcgcgccagctagattatgttcctgcgactatcagctgcctggaagaggtcgtcagggaagcgaaaggccggctaccggtgttcctcgacggcggcgtccgccgtggcacggacgtcttcaaggccctggcgttgggagcttcaggagtgttcatcggccggcccgtgctgttctcgctggcggtggacggcgaggccggcgtgcggaaggtgctgcagatgctgagggacgagctggagctcaccatggcgctcagcggctgcacgtcgctgagggagataacccgcgcacacgtcatcaccgacagcgaccggatcggccgctcgcggctgtagaatcattgtgcagttcacctcaggaatgatgttggtctcgactgaactgtcctgattcgggatctatttgtagctcttgtgctctcattttacgttaggcaaataaggaagctgcgtgcgtatgtgtgactgctgctgacgtttgtttgcgccgctgtcgtggttgcctggttggcacttggcagtgttgattggcgttagtggttggtttgggtgaaaggagtttatgagatctggtgccggtttct

SEQ ID NO: 4161 - DNA, 981 bp, Zea mays
  Clone ID: 700349991_FLI
atccctattaactgcattcactcactattatatcgataagggctatgacggtattgtgctcgagtcctggtcaagatgggctatttatggtgtgctggatgaccaagagctacgttacatggcacttgaatttgttaagcagctgggagaggttttgcattcagtcaattccaaaatcaagtagccaccatttggaattaatttatgttattccagctccaagaatgcaaaagctcaataataaggactttggacccaaagatctcatgcatctggctgacactgtagatgggttttctcttatgacatacgacttctcaggacctcagaatcctggtcccagtgcacctctgaagtggatacatcattctttagcagcacttccttcagcaaaaggttcctctcatagcaattcacattcacggatgatattccttggcatcaacttttatgggaatgattttctactgtctggagtttcttacaaacattttggtacatcaagatgcatgactaaaaagtggtttccaaaagagcctgaggcatttgctgagcagccccaatgcctcctgtgaatgaacttgtgccaccggtggaatgtgcaacagaggttgtttcaacactgtccccacctaggaaattaaggagagctgtgaaaaagataactccaaagaagaagatccaagccatgtacaactgcaatttggttcctaaaatctgaaatgtgtgatcctgtgccatgcaacaacagttggttcactcaaaatgtgtggttatgtacttggataccattgggttcactccaaatgtgtgttctcgtttttagtctaaatgtttgtagcaacccagttttattctaaatgtttgtagaagttagtcttggttctggacttggatatcagttggttctggtcttggacagctgcaactgtcacctactattatgactcatgtttaaccgtggcctgcattttggaaagc

SEQ ID NO: 4162 - DNA, 1629 bp, Zea mays
  Clone ID: 700350005_FLI
agtgccactcgctggagcggctcgaaatcactggctgccctatgatcacggacaagggcctcgtcgctgtggctcagggttgcccggaactgaagtcgctcaccatcgaggcctgctccggcgtggctaacgagggtctcaaggcaattggccggtgctgcgccaagctacaggcggttagcgtcaagaactgcgcacatgtcgacgaccagggtgtgtctggcctcgtctgctctgcgacagcctcgttggcaaaggtccggcttcagggtttgaacatcactgatgcttctctcgccgtgattgggtactatgggaagtcaatcaaagacctgaccctcgctcgcctccctgctgtcggcgagaggggattttgggtgatggccaatgccctcggcctgcagaagctgaggtgtatgactgtcgtctcctgcccgggattaacggatctcgcccttgcatctgtcgccaagttcagcccaagcttgaagactgtgaacctcaagaagtgcagcaaggtctcagacggatgcctcaaggaattcgcagaatcatccagggtcctggagagtttgcagatcgaggagtgcagcaaggttactcttgtgggcattcttgctttcctcctgaattgcaaccccaagttcaaggcgctctccttgtccaagtgcatcgggatcaaggacatctgctcggcacctgcgcagctcccagtatgcaagtcgctgcgttccctgaccatcaaggactgcccaggcttcacggacgctagccttgccgtggtgggcatgatctgccctcagttggagagcatcgacctgagcggtctcggtgcagtcaccgacaacggcttccttccgttgatgaagggttcggagagtgggctggtcagtgtgggcttgaacggctgcgagagtctcacggacgcggcggtttccgccttggccaaggcccacggcgcttctctcgcgcaccttagcctggagggatgcagcaagatcactgacgcgagcctgttcgccatctccgagagctgcagccagcttgccgagcttgacctttccaactgcatggtgagcgactacggtgtcgcggtcctggcagcggcgaggcagctcaagctgcgtgtcctctcgctgtctggctgtatgaaggtgacgcagaagagcgttcctttcttgggcagcatgccttcatccttggaggcgctgaatctccagttcaacttcatcggtaaccacaacatcgcttccttggagaagcagctctggcggtgcgacatccttgcttagagggaacaagggcgacatctccgtagcggtagcatatacttaagtctaagcctcgttagttgagttagagtctggtttctggctcgtgtttgtgtcttggtggggggtctctcccgtttgtcttagggccggttgttttccgaggggcgtatttttttgccgaggctcggtttttttttgcaggtatcctcctgtgctgtgaggatctctgttcgctgagcctttggcagccattaccatgtggtggcaccttgcccccctcctccataccaacctaagcccttgtgatcagtcattccaccatgcagtttctctcaagtcagtgtttgaagctctc

SEQ ID NO: 4163 - DNA, 718 bp, Zea mays
  Clone ID: 700350012_FLI
cagcaaaatgctacaaacaaattgcgtagtggcaacggattgggtctggccctttccagaagatttgttgcccttatgcaagggaacatctggctggaaagcgaaggcgtagggaagggctgtaccgcaacgttctttgtgaagctaggactatctgatgcaaatctccggaggatggtgcctcctgtccagccaaaacatggaaatgcagatccagatgtatcatcaataatcaacggcgacatggcgattcttccgcgttgttaccagtcgatgatatgacaaggaactgcaggaggagcctgatcttgtgatatcatgatttgaaggtggattcacggggttaaggatgctgtgtgtagagattgctctccccgttttttttttttttgcagagccgtcgcgctctaggcaagcaggtgcgagtgcgatcgggcgaatccaaaatagcgggacgtctctactagggaattaacagcgcagggagagcggtgcggtgttttaagaaattataagttgtgagatgagtggcgtgtttgttagacgtcatttagggttttctagtgttgtactagtatagtcttggtagagagaagcagaaagaagctgatctgtacacgaggcaaatgaaatgctgatgactacttataaggcttctactgtttgtacagtatttttttgtctacataaattgcaacagtataagggggtgtttggg

SEQ ID NO: 4164 - DNA, 1237 bp, Zea mays
  Clone ID: 700350022_FLI
cttcgcttcaactcccactcccactctccctttccactctcaggctcccactccccccctaccggctaccctacccatcacacacaaacagccactcctcacctcccccgtcctccggttcatgtcctgctgctccccatgtcgcccccactcgacctcgactacataggcctctcgccggcggcggctgccgccgctgcccacgacgacctgaagggtaccgagctccgccttggtctgccggggtccggttcgccggaccgccgtgttgtggctgccaccgcaaccaccctggacctgctcccggctaagggcgccaagcgcgggttttctgacgaggcgccgacgccatcgcccggtgcagcttccgggaagggaaagaaggtagcggaagaggaggacgacaagaaggttgcagcgacgccgcagccggtcgcaaaagctcaggtggtgggatggccaccaatccgaagctaccgcaagaacacgatgtctaccacccagctgaagggcagcaaggaggatgctgaggccaagcaggaccaggggttcctgtacgtcaaggtcagcatggatggcgcgccgtacctcaggaagattgacctcaagacttacaagaactacaaggacctgtcgactgcgcttgagaagatgttcagtggcttcagtactggcaaggatggcttatctgagtaccgcaaggatggtgaatatgttctgacttacgaggacaaggatggagattggatgcttgttggcgatgtaccatgggagatgttcgctgactcttgccgcaggctcaggatcatgaaaggatcagatgcaattggacttgctccaagggcagctgataagtccaagaatcgcaactagaatggttgcttcttacagtccagagcaagagggagatatccagtgactgtagggatctttgtggaagccggaaaacgtctaacagtttcaagaagaattctgccttatggtctgtaccacatgtttttgctgctacgcaagtaaagaactccacgtctgtcaatgttagttttacaacatcgtctacggacaaaaaaaaaacccccgctatttgattgttgctaagccttcgtacgacgtgtaaatggtttggtacaatgagtgctgcgactacgattgagcacccctctacctagtttgcaaaaaaacagtgtcccatggactgtctgttgtccctctatataaatgtccaatgaagcttgct

SEQ ID NO: 4165 - DNA, 2076 bp, Zea mays
  Clone ID: 700350038_FLI
tgaacatgaagcagcctctcgtgctgcccgcgcaccggtcgccccaggaccaggaaggaccccgaggcggaggtgcgccatgggcacaactacgtgccccgcgacgagcagttctcggaggtcaagcagctcacgttcggggccacgacgctgcgctcgggcctgcacgcgctgctcccggccatcaggccgatgctcatcaagagggagctgcgcttcccgcacttcccggccatcgacgacctctacagcgacggcatcccgctgccggcgcagaccgggttgggcgccatccgcagcatcgtcccgcgcgtggtcaagctggtggaggacaccaccgagcacgtcctccgcttcgagctgccggacatgatagagagagaccgcttctcgtggttcaaagacgaggagttcgcgaggcagacgatcgcggggctcaacccgctgtgcatccagctcctgacggagttccccatcaggagcaagctggacccggaggtgtacggcccggcggagtccgccatcaccaaggagatcctggagaagcacatgagcggcggcgccgccatgaccgtggagcaggcgctcgcggcgaagcgtctgttcatcctggactaccacgacgtgttcctgccctacgtgcacagggtgcgcgagctgccggacacgacgctctacggctcccgcaccgtcttcttcctcacggacctgggcacgctgatgccgctggccatcgagctggtgcggcccaaatcgccgacgcagccgcagtggaagcgggtgttcacgcacgggcccgacgccaccgacgcctggctgtggaagcttgccaaggcgcacgtggtgacccacgacacggggtaccaccagctggtgagccactggctgcgcacgcactgctgcgtggagccctacatcattgccgcgaaccggcagctcagccggctgcacccggtgtaccgcctcctgcacccgcacttccgctacaccatggagatcaacgcgctggccagggaggcgctcatcaacgccgacggcatcatcgaggagtccttctggccgggcaggtacgccgtcgagctcagctcagcggcgtacggcgccacgtggcagttcgacacggaggcgctgcccaacgacctcgtcaagcgtgggctcgccgtgcgccgggacgacggcgagctggagctcaccatcaaggactacccctacgcgcacgacgggctcatggtctggaacaccataaggcagtgggcggccgactacgtcaacgtctactacaagtccgacgaggccgtcgccgccgaccccgagctgaaggcgttctgggacgaggtgcgcaacgtgggccacggcgacaagaaggacgagccgtggtggcccgtgctcgacacccgcgacagcctcgcggagacgctcaccaccatcatgtgggtcacctccggccaccactcggcggtcaacttcgggcagtaccacttcggcggatacttcccgaaccgcccgaccaccatccggaagagcatgcccgtggaggaggaggcgggccgggacgaagagatgaagaagttcctgaagcagccggagacgaccctgctggacatgctgccgacgcagatgcaggccatcagggtgatgacgacgctggacatcctctcgtcgcactcgcccgacgaggagtacatgggagagttggcggagccgtcgtggctggaggagcccatggtgaaggcggcgttcgagaagttcggcggcaggatgaaggagatcgagggattcatcgacgagtgcaacaacaacccggagctcaggaaccggtgcggagcagggatcgtgccgtacgaactgctcaagcccttctccaagccgggagtcaccgggaggggcatccccaacagcatctccatttgacccgtccgtcctctccatccaatgggggtttgccttattgcgtgcacgctagctagctgcttggaaataaaaataattaaaataaaaggtctcgtctgtactattgtattgtaccatggatcatatcgtacatgttgtgtcaatgcaaagaggcacgtttgagtt

SEQ ID NO: 4166 - DNA, 1292 bp, Zea mays
  Clone ID: 700350042_FLI
gcgagaccgcgagagcgagacgatgggaatgctacaaattccccttctgagtccgaccctcctcatccaatagtaccacctgctcgctgctccgccaccgctctcgctcgatcgcccccctcgttcgtcggccttcgcttccagacctccgagtcctcaatctgcagctttggtaattggtcgtatagtccctcatcatcggaatggtggggtcacttatctttcccacacctaatgtggatccgaaggcagagaatcctaatgagatggttacagccggtgtgctttcaagccttcagaatttcctacgcaagtgcctcatagccatcctctcatatggcccaatgccgaagcacattgcatttattatggatggcaatcgtcgatatgctaaattcagaagcatgcaagaaggagcgggtcacaggatgggtttctctacccttattgcaagtctgatgtactgctatgaaatgggtgtgaagtacatcactgtctacgcattcagcatcgacaattttaaaagggacccaagtgaggtggaatccttgatgcagttaatggaggaaaaaatcaacgaactcttagagaaccgaagtgtaatcaacaagattaactgtaagatcaacttttggggtaacttggacttgttatatgagccggtgcggttggcggctgagaagctgatggcgagcacagctgggaacacagggctggtcttttctatctgcatgccatacaactcgacttctgagattgtcaatgctgtcagtcaagtctgtgcggaaaggatggaaatgtttcagagcgaacatattggcgaatgcaatggtcatgctgcaaataacggtgtgcgatcagagatttcagtggcggatttggatcgccacatgtatagtgccgaatgcccagatcctgatattgtcatccggacttcgggcgagactcgattgagcaatttcctcctttggcagacaacgtttagtcacttgcagaatccagatcctctgtggcccgagttctctttcaggcaccttgtttgggctgtcttgcagtatcagagagtttaccctgctctggagcataacagaaagttggctaagaagcagttgtgattccatgttacttgcaaggaggtatcatgaagggctattaacatcaaacttttccttctcaatttcctggtaatggtaaatgcaaagaagaacatactagcatataacattatgaatagatcaccatgtaacttaagtgtgattgctaccgtaaccatgtaacttatttgagctcgt

SEQ ID NO: 4167 - DNA, 1057 bp, Zea mays
  Clone ID: 700350050_FLI
caggacaaggagggcatccctccggaccagcagcggctcatttttgccggcaagcagctcgaggacgggcgcacgctggccgactacaacattcagaaggagagcaccctccacttggtgctgcgtctcagaggtggcatgcagatcttcgtgaagacacttactggcaagacgatcacccttgaggtggagtcctcagacaccattgacaacgtcaaggccaagatccaggacaaggagggcattccaccggaccagcagcggctgatcttcgccggcaagcagctggaggatggtcgcaccttggctgactacaacatccagaaggagagcaccctccacctggtgctccgcctcaggggtggtatgcagatttttgtgaagacattgactggcaagaccatcaccttggaggtggagtcgtctgacacaatcgataatgtcaaagccaagatccaggacaaggagggcattccaccggaccagcagcgcctgatctttgctggcaagcagctggaggatggccgtaccctcgccgactacaacatccagaaggagagcaccctccacctggtgctccgcttgcgaggtggtatgcagatctttgtgaagaccttgactggcaagaccataaccctggaggttgagagctccgacaccatcgacaacgtgaaggcaaagatccaggacaaagagggcatccccccagaccagcagcgtctgatcttcgctggcaagcagctggaggatggccgcaccctagcagactacaacatccagaaggagagcactctccacctggtgctccgcctccgtggtggtcagtaagccatggttcatttaagctgctgctgtacctgggtatctgcgtcgtctggtgccctctggtgtacctctatatggatgtcgtcgtctaataaacatctgtggtttgtgtgtcatgaatcgtggttgtggcttcgttggtttaatggacctgttgtgtcctctgtgttgtacccaaaactcttctgcagcagtatggcttgaatccttatgaagtttgatgtttgaactt

SEQ ID NO: 4168 - DNA, 1477 bp, Zea mays
  Clone ID: 700350060_FLI
ccctaccgttcggggtggtggcatccgggattcgtccacacccaggcacataaaagccgcctctcgccgccgactgcaaaccctcgtttttctctctcctgcgctgcgccgtccttcacctccgccgccgaatccgagactctgatctcgggttcaccgcagcgcacagagcacccccgactcccgtcccgatccgcgctctcctctacgacgcttcagtcatggcaggaatggcacccgagggttctcagtttgatgctaagcactatgattctaaaatgcaggagctgctgagcactggtgagactgaggagttcttcacttcatatgatgaagtttttgaaagttttgatgacatgggccttcaagagaatcttttgagaggcatttatgcatatggttttgagaaaccatctgcaattcagcagagaggaattgttcccttctgcaaggggcttgatgtcattcagcaagcacaatctggtacaggaaagacagcaaccttctgttctgggatcttgcagcagcttgactatggtctggttgaatgccaggccctggttcttgctcccacccgtgagcttgcacagcaaattgagaaagttatgcgcgcacttggtgactaccttggtgttaaagtccatgcatgcgttggaggaacatctgttcgtgaggaccaaaggattctcgccagtggtgtgcatgttgttgttggtacacctggtcgtgtgtttgacatgctgcgtagacagtccctccgccctgataacatcaagatgtttgttcttgatgaagctgatgaaatgctttctcgtggtttcaaggatcagatttatgacatcttccagcttctgccatccaagattcaggttggagtcttctctgctaccatgccacctgaagcccttgagattacccgcaagttcatgaacaaaccagtgagaattcttgtgaagagagacgagctgacccttgagggtatcaagcagttctatgtgaatgtggacaaggaagactggaagctggacacactgtgtgacctgtatgagaccctggccattacccagagtgtcatctttgtcaacacccgccgcaaggtggactggctcactgacaagatgaggagcagggaccacaccgtttctgccactcatggtgacatggaccagaacactagagacatcatcatgagggagttccggtctggctcctcccgtgtgctcatcaccactgacctgcttgctcgtggtattgatgttcagcaggtgtccctggtcatcaactatgatcttcccacccagccagagaactacctgcatcgtattggtcgtagtggtcgttttggtaggaagggtgttgccatcaactttgtgacccgcgacgacgaacgtatgctgtttgacattcagaagttctacaacgtgttgattgaggagctgcctgccaatgttgctgaccttctgtgatcaatttgaag

SEQ ID NO: 4169 - DNA, 1998 bp, Zea mays
  Clone ID: 700350083_FLI
cggaatcgagtctgaagcacagagccatcagagactgaccagagccgagaccaaggatcctgtctcctgtgcactccggcggccggaccacggcgagtccgggacgtagaagtcgccccgcccctccggatcgtgttgctcgggaaattgcttccgagtagttcccgacgccgcgggcctctaagccgctgcctccgacagtctcgtgagtccttgactcttgagaatcgagggaacgcatttacggacgcaagactggatctgaagaggcgctgacgaattggagggccgcgcaagcctggggatgggaaggctggtcgtcgcggcggcggtggccgtgtgggcgttcccgattgcggctttggtgaactccgtagtgccagagccctacatggatgagatcttccatatttcacaagcacagcagtattgccgtggagatttctggacatgggatcccatgatcaccacccctcctggcctgtgagtttttgacaattcctcattgcttcaagctccaatttatcccatcatggatcgttgttgcaattttgcaggtattatgtttcactagcatatattgcttctttctttcctgttgcctggatgtttcgggtagcaaaaacatttgatgttctttgctccacagcagctctcagatcaactaatgttatcttggcaatggtctgcgctgttcttattcatgacctgcttttgtgcatccgaccaggaattggagaaaggaaggcaactgcctacgctattcttgtagcattgtatcctgttcactggttcttcacttttctttattacactgatgttgcatcattagccgcagttcttgcagtgtacctattctgcttgaagaaacagttctggatcagcacaatgtttggtgttttttcaatactttttcgtcagacaaatgtaatatggattatattttttgctgccaatggagctatcacatacgtaaaagacttgtatcccaaggataatgcttctcatgagaacagtgaaccaatacatcagtcaaaaaaagcttctgccagggataacaaaactagtgttcaaagcttgagaagacggcgaatcaatagtcccataaataaggtcattgtttgtgaatctgctaacccttacaacagtcttacagaggaagtgtgtgacatcagcttgaagttatggaactcaaagtgtgaaattttgattgcatttgcaccatttgtagttgtcatggcggcattcgtagcattcataatctggaatggtggtatagtactaggtgctaaggaagctcatgttgtttcgccacactttgcacagtttctgtactttggccttgtgtcagctgctgccctccttccatggcatttcactcccaaccgagtattggatctattccacttgtctggaaagaacaaaacctgtggttctctggcagtattaatgggtcttggtttaagctttgtcgctgtacattttttcagcattgcccatccgtatcttcttgctgacaatagacactataccttctatatttggaggaaggttatccaagtaaactggatgatgaagtacatgttgattccactttatgtgtactcatggctctcaatcatcaacatcttagggaaatcacagacaaggatttgggtgttatcatttgtgctgtcagttgcactggtccttgtacctgccccgctggttgaattcagatactacacaattccattcgtgatactggttcttcactctccatcaattggcaatggcaaattgcttgccatgggatcgctttatgcagccgttgacttgtctaccctggtgatgtttctgttccgaccattccgttgggaacatgagcctggaacacaaaggtttatgtggtagtttaggataaagcacgggaagttgggaatagagcaaaaccttcattgtaccgtcgttttggttcgaacttctaacaggacgattaagcatacatgtgtcaggctt

SEQ ID NO: 4170 - DNA, 1812 bp, Zea mays
  Clone ID: 700350123_FLI
cgccgcgggttgcccacaatcaacactgcggcgatcacagctttggtcgacaggtggcggccggagactcacactttccatcttccttgcggcgagatgaccgtgacactgcgagacagccagaagcagcttggtctcagtattcgtgggcgtccagtgaccggtcaggcagcacccggtggctggagacagagagtcgaggcctttcttggaagggaggttcccacagacacaccaggtagccacacatctggggtttctctcgcctggcttaggcagtcgttcggggagtgtccagctgcagcagatgaccagacagttagctactactgccgagcttgggtcctgcatttgtttggctccgtcctttttccagacgcgacgggtgatagcgcgtcctggatgttccttccttgcctcactgactgggacatggcaggaggctacagctgggcttctgcagtgctatccttcctgtacagacaactttgtgaggcttgtcgtcggacggcaaagaacgcgagtttaggcggttgcgtgtacctactccagttgtggatgtggtcgcacctaccggttggtcgccctattgagtttgctcctcgaccttggttcgacgtcgtcggcttgcgactacgaccgacggcggcttaccgttgggaccaggtccaggctccgttcgcacgtcaccaacgcgcctacgtcgagtactcaaacgagctggacgcacttacaccgtcgatggttagctggcaaccatacgatcagccaccgtcgccacacattcagttgagctccgcgtgcacggcagatgaagacatttatttattaaggtgtccactgatttgcttctatgccgttgagtaccacttgcctcatagagtagcacgccagttcggtctacgtcaggagttccctgtggagcccttctcaacatcgatagaactccacaagttcgaccgccaaaagcagaagaagatcactgactttgaggcacaccaccaagtgtacattgacgaatgggaccaaatgcatgacctcctctaccagaacgatcagccccacaccaactacaacttccgcgagtacatctcttggtatgtcagtgcaactcggtgcaagttgaagggccagtggacatcagcggactacgccgaactagagtcttcagatgacgaagacacgtcctatgacctagttactcggcatgggacacacgtggaggctgcaccgatcctagatagagtgggcaactccatgatgcagtctgtggttgacatcgagcatttctctaagaccacttctgacagcaggacacttgcctttctctcaaggctatcacgtcgcctacgttgtgctgctgctcgttgtggttgcaggactagcgtcggagttaacatacaacatactctgcagcaccatggtgacacctcgctaggacttggagctatcatcgttgcacagggctcgtcacgttcgacacgagatgcgtttgcgagccacaaggaggacgaggatgacattaagattcctctcgacaagattggaccataggatgctcctaagacacaaccttcacagcctataccacgcagacgacggcgacgatcgcgcaaccctaacaccccaggcatcaacgctcttggggctaagggcaacggtaactagaaggatgcgagggaaacatgatggtgcatgtcttctgctttggatttttttgtgctatggactatggatgacgatatagactttctgcgttgtacactttggttgatgatatagattatttgtggtatgcactttgtttgatct

SEQ ID NO: 4171 - DNA, 869 bp, Zea mays
  Clone ID: 700350139_FLI
gcgcgccctcccagttcgtctattaaaggggaaccagtgaaccacccgatgcaacttgcgtagagagttgggcgcagagaatccccaagcaaacaaacagggtagaggtagagggagaggagaggagaggagaggagaggagaggttgggtctgggacaccatggctccgatgaagctgtacggggcggtgatgtcgtggaacgtgacgaggtgcgcaacggcgctggaggaggctggctccgactacgagatcgtgcccatcaacttcgccaccgccgagcacaagagccccgagcacctcgtccgcaacccgtttggtcaggttccagctctgcaggatggtgacttgtacctcttcgaatcacgcgcaatctgcaagtcctcatcagtccgatgcttgggggaaccaccgaccagaaagttgtggatgagaaccttgagaagctgaagaaggtgctagaggtgtacgaggcacgcctgaccaagtgcaagtaccttgctggagacttcctcagcctcgccgacctgaaccatgtgtctgtcactctctgcctgtttgctacgccctacgcatctgtgctcgacgcctacccgcatgtgaaggcctggtggtctggtctgatggagaggccgtctgtccagaaggtcgctgccctgatgaagccatctgcttgaaacggttgccctgtcaatcggtgaatggaataagccaagtctgttctgggttgtttgcttgttcagtgatgtgtcttctatgacgaaagttgagtgcctatgtgtgagcatgcttgcttgtaacgagaccttgaattgttcggaaatgagcattcctgtgctcttctttaaaataaactttgccttaggttcc

SEQ ID NO: 4172 - DNA, 1338 bp, Zea mays
  Clone ID: 700350156_FLI
catatccgctcccctacctctccagcatcctcccgtctccgtcgtctcgtctccgctcctcacctcgccagccatgggcaagatcaagatcggaatcaacggtttcggaaggatcggcaggctcgtggccagggtcgccctgcagagcgaggatgtcgagctcgtcgccgtcaacgaccccttcatcaccacggattacatgacgtacatgttcaagtacgacaccgtgcacggccaatggaagcacagcgacatcgccctcaaggactccaagacgcttctcttcggcgagaagccggtcaccgtctttggcatcaggaaccccgaggagatcccgtggggtgaggctggtgctgagtatgtcgtggagtccaccggtgtcttcactgacaaggacaaggctgctgcacatctgaagggtggtgccaagaaggttgttatctctgccccaagcaaagatgcgcccatgtttgttgttggtgtcaatgaggacaagtacacctccgatgttaacattgtttccaatgctagctgcaccacaaactgccttgctccccttgctaaggtcattcatgacaactttggcattattgagggcttgatgacaactgttcatgccatcactgccacccagaagactgttgatggaccctcagccaaggactggagaggtggcagggctgccagctttaacatcattcccagcagcaccggtgctgccaaggctgtcggtaaggttcttcctgaattgaatggcaagctcactggcatgtccttccgggttcccaccgtggatgtgtcagttgttgacctcactgtcagaatcgagaagggggcctcttacgaggaaatcaagaaagctattaaggctgcttctgagggcccactcaagggtattatgggctacgtggaggaggatctggtttccaccgacttcaccggtgacagcaggtcgagcatcttcgacgccaaggccgggattgccctgaacgaccacttcatcaagctcgtctcttggtacgacaacgagtggggctacagcaaccgcgtcgtcgacctgatccgccacatgttcaagacccagtagagagagatatttctgcctccctatcgtgggtcgtccccaatggcctttggtcgcagaccatctttgctgcttgtctatgctgagaataaatgtgaacggtgcccctggacgctggatccatgctggttttggacacgttgtctttttgtgtttaacttatctgctaccgtcctgtaacgaattcactaagttctagttcttttgtgctttgttaagaatataaacaatgaggtttcaattttggtggcgcc

SEQ ID NO: 4173 - DNA, 1716 bp, Zea mays
  Clone ID: 700350210_FLI
cttcaatcgcctcccgattcccgcggggctcgcagatcccggaaggacaccccgccgcccccgatgagccgccaccgggtcgagacctgcgactcgtggcggcccccgcggaagaaccacgccggtgcgccgccgctcctccgcgcggggcctcggctcctcgccttcgcctcgctctccgtccgcgacggcggggactccgccgcggccgtcgccaaggcggttgaggaggcggttgtcgtacgatccgatgaggtgaaggaggcggtggccggggaggagaggaagaagacgaagtcgacggagcgcaggctgccccccgcggcgcagctggtgagccatccgctcgcgctgctggcgctagtacccaacagcgccgcgatctttgccgcgggggccgccgcgggcactgtagccaagaccgtcaccgcgcccctcgaccgcgtcaagatcctcatgcagacgcatagcgtgcgggtggcgggagagagtgccaagaagggtgttggatttctcgaggctatggcagacattggaaagaaggatgggcttaagggttactggaaaggaaaccttccacaggtcattcgcataattccttacagtgcagtgcaactcttctcgtatgaagtttacaagaaaattttccggagaaaggatggagagctttctgtatttgggagacttgccgctggtgcttgcgcgggcatgacatctacacttgtaacttacccactggatgttctccggctcaggctagcagttcaatctggacacagcactttatctcaggtaaccagtcttgtaagtgcaaatttctgtactttttttttctggaaactggcgtagcctgatgactttgtaggttgctcttaacatgctgagagaagaagggctggcctccttctatggaggcttgggtccatctcttgtagcaattgcaccttacattgctgtgaacttctgtgtttttgacctgatgaagaaatctgtaccagagaagtacaagaatagaccagaaacatctctggcaaccgctcttctttcagcaacatttgcaactttgatgtgttatccgctggacactgttaggagacagatgcagatgaaaggcacaccatacaatactgtttttgatgctattccaggcattgtggagcgtgacggtctaactggtctttatagaggttttgtgccaaatgcgttaaaaaatctaccaaatagcagcattaaactgaccgtgtttgacacggtgaagacactgatagctactgggcagaaggagatggacaaattaattcaagaaaatgaggagaaaagaagctaggaaaagagccttggtcaatcttgaaggctttggtagaaagcatgcctcgttgcacactccatatcgctatgtttcctcgtttgctggtgacatattttaggatctaggcagcgcatctttctgttccttttcaaatagatctagtttccagtgctttccgtagcatccacattcatagagatagaggttcgcattgagttgatctctttatctagtgtcggtagcattcccctacagatcttacctattctaatagaggatagtgtatcaatgtgaccgccccagattccttaaatgtaattatacataatagccagaacaatcaaatgtcatggagcacaggagcatgttctccttgtcaatgaattagcatctttgatttaaagaac

SEQ ID NO: 4174 - DNA, 1176 bp, Zea mays
  Clone ID: 700350279_FLI
caaacattgcaaaagcactcctctcttcgtcctccccctccctcctccatcccattccataccattccgccaaagaagaaccacagacgctcgctcccaactcccaagccaagccggatcccaaaatcggcacagcgcacccactccgctcagtcccttcgttcacccccatccatccagccagccagccagccatgggcggcaaggactgcggcaaccacggcgaggacgacctgcggcggtcgtgccggcgcctgctagcgatcctcctagtcctggccctgatcgtgggcgtgatcgcgctgatcatctacctggtggtccgccccacgcacccgcgcttctacctgcaggacgcgtcgctgcagcagctagacctctccaacgccaccaccaccaccaccacctccgcgtcctcgtccctcctctccacgacgctgcaggtgacgctggcctcgcgcaacccgaacgagcgcgtgggggtgtactacgaccggctggacgtgtacgcgtcgtacaagtaccagcaggtgacggtggccgcggcgctgccgcccgtgtaccagggccacggcgacgtggacgtgtggtcgcccgtgctctccggccccggcgtccccttcgcgccctacctcgccgacgcgctccgccaggactgccaggcgggctacctcgtcctccaggtcaaggtcgacggccgcgtgcgatggaaggtcggcagctggatctccggccactaccacctcttcgtcacctgccccgcgttcctcgtcaccgccggcggcaacggcgcgcccggcgcttccgggttcaggttccagaccaccacctactgccacgtcgaagtttaatagattaggagcgagaggaggaggagggaggggaaggaagcagagagaccatggtccatggctctgctgctcctcctgctgccgttgcctggtgtggtaataactctctctatctctctctctgtccgctgctggcgttactgctgcagtgatgcgggatgtaaaggaggggtaaaaaagttcctttcgttttcgcctccctcttttttttttgttttttttttgcatcttctccttcacctttccatatactactagtatgctctgtcgactgatgttcaaaggaagcttccaattgtcaataaacattttggatcggaggatc

SEQ ID NO: 4175 - DNA, 693 bp, Zea mays
  Clone ID: 700350304_FLI
acgaaaccagagcaaattccggcgagccggtgcggtgcggcggaggaggccgagggagacgccggcgcgagaaggagcatcaggaggaggcagcggagatggatccggactcggtgaagtcgacgctctctaacctggccttcggcaacgtcatcgccgccgccgcccgcgacctccaaaaggaaatggtggctaaagacaaggctcaagcagcacctgcaagccatgatgaagttgatcttgatgagctgttggatgacccagaacttgagaagttgcacgcagagagaattgctgcccttaagaaagaagttgagaagcgtgaagtgctaaaaaggcaaggtcatggtgaatacagggagataactgaaggggacttcctcggggaggttactggcagtgaaaaagtcatatgccatttttaccaccgtgaattttaccgttgcaagatcatggataagcatttgaaggcccttgctccagtctacgtgggaacaaaattcgtcaagcttgatgctgaaaatgctccattctttgtggccaaactggcaatcaaaaccttgccatgtgtaatattgttcaagaagggtattgctgttgaccgattagttgggtttcaagatctcagaagtaaagacgattttccgacaagagcgttggaaaatattctcaagacgaaagggataatcgatg

SEQ ID NO: 4176 - DNA, 1818 bp, Zea mays
  Clone ID: 700350335_FLI
gctcaacacgatctcaattcgattccagttcatccatccaacgcctcccgcctgtacgtatagaagaaagaaggaagaaccgtcaccgtacgtcctcgccagtacaaataatggccctgctcaaagccgcgcgcgtcgccgatgtgcccaccctggacgtggtggtggcccccggcctggtggcggttgccaaggcgaggagcgccgcggctgtgggcggccggttctcggtgatcggccaccgcggcaaggggatgaacgcgctggcgtcggaggacccgcgtctgcgggatgtgcgcgagaacacggtccgctccttcaacgacgccgggcgcttccccgtcgactacgtcgagttcgacgtccaggtactaataaactgatgattcattcattcatggcacggcctaccaatgcaaataaatctatctcacgctatgagaagaaaaccgagagagagagagagagagggcttgccttcccggccggccgttagtgctcaattgggcacgcgattaccgaggcaagcagaggcctcgggtcgggtggggcttgtttgacggggacggcagatccacgtctctgtcacgtgactccaggcggtggtcgcttgctccatgtgccgcgtcgcatcccgatctctggctgtggttgcctggctggcaagggccaaccgcccgtcgtcagcgatgaggatgcttgtagtgtcgtgtcgacttttgcaaaaacaacgtgcccagccctgggtttgtgcgccgccgcaccagccaaaacaaagacgaaaccgaaagactcgtcaaaaggcaaaaccaagtgaggaaagacaactgaccatagcaaaaaacacaactttgctagttggtttccacgtatctttgccgcatgaactggtcccggccgtcacgtttgcttatagttccaccacaataatagtcgacccgtggtcccgttggttttgattgagagtagagagcatccaccggacagttaaaagtgtgtttcattgttttttcccctaataatctagtacttattctctacgtccacataatttagtcgttttgggtttattctaaattaaactattttaattttaatcaacaatatatataattaaattattttaaacttaaaagaattatatattatgatagtttaattcatgataaatttagtaaaattacttttgtattgtaaaaccttataaaaggttcgatatatatataactggtcaaaattgatagggaacgacttagaacaaacttaaaataactaaattaaactaaattatatggacgaaggggtaggtacctactccacagtacttaatttcctctagtagttaaccgaaacacggtagatactgaatgaatgtgttgcaagaaacatactgatctgtctacttttgcttctcccctcttcgcctcttcaataattcggtgtgcaaagatgttgagaagagaaccgtgaataccgattttgcaggtcaccaaggacgggtgcccaatcatcttccatgacaacttcatcttcacacaagacgatgtgagttcatgtatacgtgcttcatatcatatatatataacgtgttaaaataagatagcggaactttattttactccggcaccaatgtagaggctaaacctcttcgttttggtccttctcagggtaagatttcacaaaagcgtgtggccgatattcagctggaagacttcctgcagtatgggctccagaacgagcaggggaaggtacggcgagtcaccatgcatcttgcttatgggattgagtaaccagtagccactaccatctctcgtctcc

SEQ ID NO: 4177 - DNA, 2161 bp, Zea mays
  Clone ID: 700350345_FLI
aataattactctctcgagaacttgatgattgatccttatttaaacatattgggcattgccacttgcgtgagcgttgattcaatatgtttaaataattactctctcgagaacttgatgattgatccttatttcaatcggattacttctttgttgcacaattgcagtgaagatgttaatgaacttgatgttaaacctgatgggtcatggcgtgtgatgggtgatgccgctaccagagatttatctcagtggcatatgcctgatggtactctttgtgactcaaaggaagatacaaaccctggtgtcgcaagtgttaatgagttcaagagagagggtgcttctgatgaacatagaactttgaaacttggaattaaaaaaaaccctattggattatggcaggttagcagtaaagcagatgatatgaaacctgtggttagaaatcacatccaaaataacactgggttttcaacaccaaacattgtgcctatgatcagtagccccactgggagttacagagatggcgaagatgtaagtgtgaaccaagaagggggtggtattcaatttgatatatcattgaaccaagagtttgacagttttgcccacaactttggtcagacatacaatacagaggatagaccacaacatccacaccataatgctgcagatgtcattgttcttagtgattctgatgaagaaaatgacccgactgttcagccgccagctgtctatgaaaatactcctacaaatgatgacagttttcctttcgtcactgatgctgccggatctggatatcctgaaaggtaccaggaggatgctagtgttggtacaagtggtcttggtttattgaggcagaacactggtgaatttgaaataaataactggcaaatgctttcttacccacaaccagagcaagggtttcagttttttgtgactgatactgatgttggcaatccttttgttgctccacataattcctttactattgcaccagaagactactctcttggctgtaatgttggaatagaggacccctctgcagctcacgatgtttcaatttgccgaaacagtaatgatgtgcatggaagcttggttgataacccactggcattaacaggtgacgatccatctttgcaaatttttcttccaagtcaaccttccactgttccccttcagcaagaattgagtgagcgttctgatactccaaatggagtccaccctaacgattggaggatatcgcttacgcttgccgctggtggagggggcaatgaagagtctacaagtgttggcggtctaaaatcacaaccaaaagtttcatcgaaagaggcaggagttgaacctttacttgatgctgcttctgctcttggaagcatgaacaatgacagatgcactggatctaatctaaatcctaaaaggattgaaaatatattttctcatcctcgccaaccgcggtctgttaggcctcgtctgtgtttgtcattagatactgattcagagtagtttggacatcacactgggatagctgaatttgctattaatctggtaaagttggcttccagaatcttgatcgttactgtggagggctatctggttattctggttgatacaaagagatacaccagtgtggatgctttgttgcattaacctggtaagattcaagtgttctatatgatccaagtgggatctgcatagagttcatctaatggttggtacaggatattttctaactgggagtggtttaatgtggctagtggagcaggctgtacattgtccctgacatttactgggtataaaggaatagggggccatcacttggcacaagacaaatacatgtgttgtgtgtaccatcattgtatttagggtttgggtgctaatttagatgtttattaccctgacgtttgatggagaataaattattccttgaagtggtggtcaataaacagagagcccttcggttttgagtcggagctgctgaccgttcatctgttcttgttgcgaagtggtcgctcccgctttggttcagctgcagctttcatggcgggactgaccatgccaaagtcttgtgtagcagagggcaatctccatgatgtcatgcgatacaagtgatctgtattttgccctacaggatgacaagtttctttgtgcaacatgctgtattattggttcg

SEQ ID NO: 4178 - DNA, 1667 bp, Zea mays
  Clone ID: 700350350_FLI
cttcttcctcctcctcctcttcttggtcttggagctggaccttcctcttcccctcgttgatcgttcgcggttgccgattcgccatcccctccaaatcaagacaagattgagtgggtcttgggcccctgtccctagctgcattgcgaattgaggcgccaatttgggagacgactgcattgatgaatgccggaggccacagcactcactgatttagggattcgatgtcacgggcacccggatgtcattgccgatcgcccttgtagtcggcattgccggtggcgccaccttgctcgcggtggcggccgtgctgctcgcgctctggtgcgctgcgcggatgagggcgcggcgtaaccgcaactccgacactggctcctccgacccctcgacgctagtggagtggggaaaaggggggcgcagctcgttggcaccggacctggagcatcaggttgcgaggcaattctcgctggaggacctggtgcaggccaccaagaacttcagcgacacgaacatcatcggcgcggggagcttcggattggtgtacatgggcctgcttctcgatggcactgttgtcgcgatcaagaggcgcgtgggggcagcgacgcaggtgtttgctgatgaggttaggttgctttcagagattcgtcaccgaaacattgtaactctcattggttactgtcaagaagggggtctacaaatgctggtgtatgagtacctgcccaatggcagtgtctgtggccatctgtatgataacaggaaaggctctgcaacacggcttgagttcaaacaaaggctctcaatagctattggggcagctaaaggtttgaatcatctgcacagtcttgatcctcctttgatacacaaggacttcaagacaaacaatgtgctggttgatgaaaatttcattgcaaaggtggctgatgctggacttgttaggttaattagaggatctgacgatgccggcccatcgcgtgggttcagtaacagtgtttaccaagatccagaggtacagtcgatgactcagttctctgaaagcagtgatgtttacagctttggagtttttcttttggagctaattactggcagggaagcagcttccttgatacctacagagtccagagaatatttggcacactggatggaagcgcatttcagttcaaatgaactgattgacccaagattagccggcaacttcactgcagaaggtatgaaggagcttgttggtctggccttccaatgcttgaacccatcatcaagacgccgaccgaggatgaggcttgttgcgactgaactagaccggattctagagacggagatgtccatgacaacgttcatgggcgacggaaccaccattgtcacgctcgggagtcaattgttctcgtcgtgaagcgacgttgggattgatttcatgtctgctatttgatgacatgatgattgtgtgtgagagcctaacaacagctattgtttctgccatgctgttcaggctctgcattgttatgaaatgccatgtatggtcatttttaagcttgtcatggttgataggtaggagtgagaagaaatagagctgtatgtatgtctcttttttcttctttttgttgcatgggagaagaattgtatgtaaatcttttagattgttaactatccttcaatgtatttgcagattgttcttc

SEQ ID NO: 4179 - DNA, 1108 bp, Zea mays
  Clone ID: 700350355_FLI
gcgccgcggccggccccccggctccggcaagaagaagcagttcgaggccctgggttcctggggcatcgctttcacccctcacatcctcgccgtcaaggcaggcgaggatgttgcttcaaaaataatgacattctcacagcaaggccctcgcacagtctgcatcctctcggcgaatggcgcgattagcaacgttacgcttcggcagccagccacatctggtggactagttacttatgaggggcgcttcgagataatctcgctgtctggttctttcctgctcgcggaggatggtgacactcgcagcaggactggtggcttgagcgtcgcgctcgcgggatctgacggccgagttcttggagggtgtgtcgctggaatgcttatggctgcaactcctgttcaggtcgtggtggctagttttatcgcagagggaaagaaatccaagccagccgaagcgcggaaggtcgaaccgatggctgctcctccgccgccgccgccacagatggctgccttcgtgccggctccggtggccaccagccctccgtcagaggggacgtccagcgcgtcgtctgatgactccggcagcccgatcaaccacggtgcgatgccgttcagccactccagccagcaccagcaccctcaccagcaccagcagcacatgccgcctgcctacgcgtccgggggctggtccctctcggtgcaccagcagaacaggcatgattctgacatgaagatgatgtcgaactaacaggtgccccacttgttggtttgggctggagaggaaggaaaggaacctgctgatggttaggttggtactgctgctatgaaacggtcctcttgcgcgtcgtctgtgctctggtcagtgacgacgtgtcgatctgctacttaagctaagctagctaggagagttagggttcatggtctcaccccccgctgttgtgcccctgagtaagattaatttaatttgaattagtcgctctcataatgctgcgagttgtgatggtttcctgatcagatcttcaccttctaggctagttaaaatatcatttctctagtactatggatcatggatttacttggatacttgggtttaattcaggaatttgatcgt

SEQ ID NO: 4180 - DNA, 1537 bp, Zea mays
  Clone ID: 700350369_FLI
ctcatcctgccgcactgccccattgtgtctgcgactctgcgagtgcgcatccttcgtctttccccttcccagccgccctcttccccccctctcccggtcgcctctaacgtcgctggtgactcacgaagacctccatcgacggcggtgaaactggggccgacttctggagggtttgacttgttggatacagcgccggctcttccaatcgccgggtgctctctgccactctgtcttgcggagcccccaccgcggaaaccggttggtgcgcgtggccatggcggtggcgaaggtcaaatcggtcgccctctccgtcagtcacaagtgccggaacatcttggccgccggttgggaagcccacctcaacactgtcaaggctgacaacaagggaagcaagaatgagatttacacgtcgagggtgcactacatgatccataagggcacgccctacttgattgtccccgagaacgacatgcacaacattaacattataatcgatgagcgggggtctcttgcagtattcagtccgatccgtggccgagttgcgagcttattgaagccatcgaagacacctcctcgtgttgctatgactggtgatgttctgcggctgaaagactcaaaggttccaattattgccgatagcctgaagcaaactattctgaaggaacatgaagctgctagtaaagctagttatggagtgtcagcaatactgtcttcggcaggtgctacctgcaggtcccggagtgagggcctccttagtctgctcagtgaggagagctcttacaacatcttaaaatttgacataggttcctgtgtctacatagacttcaatgggagcagccataatattgaattggacagctttgaagcaccaaaagcagatctgctaatgccattctctgcgaagcttgtggatggtatcaaccaaaatgactctaggaggagggcactggtgatgttctgttttgcgtattttaatgtgatagcaagaagcgctgtcatgctctccattgaccaccatggttttgatgtcctcgccaaagtgcctcaaggagacatccttactaatccacaataccactggaaggagttcaggttcacattcaaggaacctgccaaagatgctgaggacttctgccgcatgctggttgggttagaggaagagggtttgcagaccgtgaagagctgcagcggttacggttgacaacccacttgcaaggttcacattcaaggaaccagccaaggatgctgagggactctgccgcatgctggttcgattagagggattttgcagcgcgtgaagagctatagcggtctaggtgacagctcacttgccacaaaaccagtgagaaactatatatccgttattttggaactttgaaatatggttttagattgctatgttttattcgaagatctatggcttctcgaatttagtagagtagatgatgtttgaacatggagccgcaaactatcaatatctgtttgaatggtatttatataaataataaaactggtaacggtgaaaaccaaaatttat

SEQ ID NO: 4181 - DNA, 1072 bp, Zea mays
  Clone ID: 700350370_FLI
atcaaatgctacttgatcagctctttgacctcaaaagcaaggaacaagaattgctggatctcaataaagacctaaggaagcagctgcaagaaacaaggccagagaacgcgctccgtgtctcctgggaggaaggtgggcacagtggcgcaagtgggaatgttcttgatccttatcaggggctccttcagcacctggacaacgatccttccctgcagttcgggtaccatcatcaagcctacatggatcagctgaacaacgaggacctggtggacccgaatgagcatggtcgatctggatggatatgaaatgctctgatgacccaaaataaagttgatgcacagcagggattcaccctgcaggacgcgagactatgtattgaagctaagacctcgtgtgtgttgtgttgtgtgcgaagcttggaactttataaatcgttgtcatgcccatggctttctatttctttctcggagctgcgcaaaaccgtctccatttctgggcttctcaggacagctggacgcgggaagccggaaccaaaaactctgttccgcactcatctcctctgctccaggcttcaacatccgcgcaggagcgaaaacgcgtcccaaatccttttttatttgccagaaatttctgagccctaacccgcgtgcgcgtggtgcctgggccgaattattaggagatccataggctgtctcactccctctggccagcagcctgactgtgaactccagactccgatcgtctggtcctctagctctcatgtcatggactcatggaggctactactcggcatgttcctggcccaggaaggagtgagcgagctcgccagcccaataccaaatgcgccggcctacaaatccaaaagccccaatttagcgctgagtcctccaggcttcgagtcatcgctgccacgtgtgtatccctacccatcgcacatgggtcacttgccacatgtttggttcagttttttctgattcttttaataagaatttggctgtaaaaagaatcttgctgtgtaaaaatccaaaagcctcaatttagcgctgagtccttcgggcttggcccttgcgtg

SEQ ID NO: 4182 - DNA, 602 bp, Zea mays
  Clone ID: 700350386_FLI
gtccgccgtcgtgcgctcgctacccctctccctcgaggcctttgccggcgaagagcgcccagtcgcccaccaggatgaagtttgttgctgcctacctgcttgctgtcctcgctgggaactccagcccctctgccgaggacttgacagccattctggagtcagttggctgtgaagttgacaatgaaaagatggaactccttctgtcccaactgagcggtaaggacattaccgagctcattgctgctggcagggagaagtttgcttcagtcccatgtggcggtggcggtgtggctgttgcggcagctgcccctgctgctggcggcgctcctgcagctgaggcgaagaaagaagagaaggtggaggagaaggaagaaagtgatgacgacatgggcttcagcctcttcgactaagcctgtgcaatagtcaagagtattgtttttgagtcgcggaagcagagggaagaaaaatcgtagtcatgtttggactttaactttgttttatgttggaaagtacttgaaagacttttcctgtggtaattctaggcgtaggttgctgtgctggttggggtttactggtgaaccagagtttttctatctcccact

SEQ ID NO: 4183 - DNA, 2899 bp, Zea mays
  Clone ID: 700350391_FLI
aggatgccgaagaagtgttgtacactgggaggcctaacagtagcatgggtcaatctttacgagaccttgagaacgaccatgcagatttccagttgacaccacatgatcctcattctgtggttggagaagctaatttgccgcagcataatgtcccaagggacagcgatctgagtcctcttggcttactttggtctgagctggaagggcatccaaaacaacctctctcatcaaatgtacttggtgtaaatgaacgtagaaactccaagcctacaacacccaaggacattctacctgtaaacatgagacaagggccacttagcaggatgaatgaagtttctagtgtgcgtgatgagtggcctgcaaactttggacggctggacaatatgaatggccctaacatttctggcagaatccctcaggttgaagctgagcatcatttgaattttgatgggcacctcctgcttcagcagatcagacgggagcaacagcaacatcaacagcgacaggagcaattgatggcccgtagtaatttagagttttctggtgcatttcccgggcaggtgtttgattctttgcaccaacaccgacagcctatgaatcaacagcttcctgatgtagagcatcttttgagagtccagtttgaacttgagcaacagcagcaacaccaactccaacaagagcagcaccaacggcagctacagcagcaacgacaagcccagcttttgcaacgacagcaacagcagcagcagcaacagatgattcttgagcaattgttgcagcagcagctgcagggttctaattttggaccaacaaatatggttgatcaagtcttacttcgtgaacatgtatttaatgaactgcaccagcagcctcaccatttgcaaaggcagcatgatgcagctattgaacaacttattcaagccaaatttggtcacgggcttcatagggagcaccataatgatatgttggatgttctctcacgttcaaatcagagacaaatgcttcctttagagcagcaaattcttttaggccttcagcatgagcatgaacaacaacttcagtcccaacaattggcaaatgctctgcggcaacattcaggcagggaagaagaaaggcacttaagtggggtctggccaatggatgatgctgcccagtttatccgctcaggaaccagtccaaatcagagacacggtcgtttcgatctactggagaaccttcagagatcgtcatcgtttgatcatcatgaccatctagaccgcagcttatcgttacaggaacgattgcatatgggtggtctaggtattcactccctagaacgatctgattctttgcctggtggtggtcctggaccaaacacagatgtcataaatgccctatcacgccatcatggacttgggcagttggaaacacatggtgatgtattataccctttgggtcaaatgcctatgcttccttcaggtgttcatcctcagcaacataggcatcaggaacagcttcctggttctcacataggaaggcttgaaaggcactggtcagattccaatggtcagttgcaaaatagtctaatgcaatcttcacacatcaaccagttgcagatggaagtggagaagcagaggaggaatgtggaaatgaacctttctgttgacaatccacatgcatgggcagccctaatgaataaagagaggaatgcagaacaagatttgagtgatatgattcacaagaaacttgcccttcaatcgcagcagtcccttggttttcctgatgtttctgttgcggcatcatttgggcataaagatcactttgtgcaacctgttgcggagaaccctctgagatcagtggacatgttgtcgtttgaggagtctctttcagaaaggtcactttatgcaaagtcagggcagttggcacaagagggatcagctaatctgggtactttacccaacagtattgagaacactggaaattttaaccttagaccaggatctggatcaatgtttgagcagaagcatttccttggaattgacgatgttcaaagtgacttttcagagaccacaggtggtagaacatcagctaatcaactggttgggagtgtcaatgaattaacaaggggtaaaaggcagggttctagtgcaagtttggctggggatgatactaatttttctgaagaagctgttagtaaatgatgtccatatgcaggtctgattctggcatgtcaaaaggaagctcacactccttactaaagcgctctacaagccaacatagtactacatctcagtctgtttctgcagatctgtcagtgatcaggctgaagaaagcaggacttgcatcctctgatgagaataagatggaatcaggattggcctcagtagcccagggtatggaaggctgcgttattagcaacaaagagacgggggcgtatggcatgccatcagccaccaacaatccagatgcctctggtcagtccttcagcgaagcgttgaagagttcgaggaagcctccgttgcagtacgatgcctccgaatctgcagacggtggcccaggtggtaagggcgcaaagaagaaaacgaagaaaggaaagcagattgacccttctcttcttggcttcaaggtccacagtaaccggatcatgatgggcgagattgttcgagatgattagcacgcatgagtgtacatacccggtaggagttggccttagaatcatgattggcttcaagctctacagtaaaccctaaactctgtacatgccagaaattttgtgccatggcttcacttctgcttagatcttctcttagcctctgttagttatagacttgcccgatttctcaggtttacagaagtgtcatttgtacagaacagccaagatcatcatgtatttagtggcaaagttttgttgatctgtgtt

SEQ ID NO: 4184 - DNA, 2850 bp, Zea mays
  Clone ID: 700350396_FLI
agacagaaagaacaggaactcaaccaacacaagacacaacaagctgcagccgcggcaggcatggggcaccgcgcgcactgacaccgggccccaccaccattaccacccgacgcacactttatttagcccacgtcactcgcagcccgcaccggacacgtccacgcgacagtcactgctagctacgtaccgggctacgtacgacacacacacacacacacacagagagacgccagtaaccgtagcgtactgaacagcaaaatcccgtgtcatactgccatgtacgcgcgcgagagactaccccgccacgcgcgcacgccgatcccctggggcctgggccctggccgccgccgctgcgtgcgcacggcctcactcgctggccttctcgggctcctcaggagcagcagcctccgcctcggcggccggctcctggggaccagcaggagcaggagcaggagcctccggctcgtccgcggcgagctcctcgggagcagcagcctctgcctcggcgacaggctcggccgcggcgggctcctcggcaccagcaggaggagcagcagcagcctcctcctcggcggctgcctcctgctcgaccgcaggagtctcctcgggaccagcaggagcagcagcctccgcctcggcggccggttcggccgcgacgggctcctcggcaccagcaggagccgcggcctccgcctcggcggctgcctgctgctcggccgcgggaagctcctcgggatcagcaggagcagcagcctcggcctcggcctcggcctcggcgggggcagactcctcgggcacgacggccggcggcggggtctccaccacgggcgcttcctcggccgccacgacggtcggggtctggacctcggcagtggccattggtggcgatgagaaggctgatggctacacgaaggagtggcgcggctagctagagcctagagctaataagagactaagactgagtgaagggtgggatctgccacctcgccgtctcgcacgttcctttccccaactccccagcgcctctccgcgccgcgatccagatccaggttgttcagcatgggtctggtgaaggaaggcgtcgacatggaggagggaaccctagagatcggcatggagtacaggactgtatctggtgtggccgggcctctggttatcttggataaagtaaagggcccaaagtaccaagaaattgtaaacatccgacttggagatggcaccactcgccgtggtcaagtccttgaagttgatggagaaaaagctgttgtgcaggtttttgaaggaacttctggaatagacaacaaatacacaaccgtgcagtttacaggcgaggttttgaaaactcctgtctcactcgatatgcttgggcgcatttttaatggttctggaaaacctattgacaatggccccccgatattacctgaagcctacttggatatctctggaagttctattaatcccagtgagagaacctatccagaggagatgatccaaactgggatatccaccattgatgtgatgaactccattgctcgtgggcaaaaaatccccctattttctgctgctggactccctcacaatgaaattgctgctcagatctgtcgtcaggctggccttgtgaagacattggagaaaggaaagcatgcagagggtggtgaagatgacaactttgctattgtgtttgctgctatgggagtgaacatggaaacagctcaattcttcaaacgtgattttgaagagaacggttccatggaacgggtcaccctttttctgaatctggctaatgatcccaccattgaacgtattatcacccctcggattgctctaacaacagcagaatatttggcatatgaatgtgggaagcatgtacttgtcatcttgacagatatgagctcttatgcagacgcacttcgtgaggtttctgcagcccgagaagaggtgccaggtaggcgtggttatcctggatatatgtatactgatctggcaacaatatatgagcgtgctgggcgtattgaaggaagaacagggtccattacccaaattcctattctgacaatgcctaatgatgatatcacacacccaactccggaccttactggatacattactgagggacagatatacattgataggcagctccataacagacagatttatccacctatcaatgtcctgccatctctatctcgattgatgaagagtgctattggtgagggcatgacacgtagagaccattcggatgtgtctaatcagctttatgccaactacgcaattggaaaggatgttcaggccatgaaggcagtcgttggagaggaggcactctcgtctgaggatctgctttacttagagttccttgacaagtttgagaggaagtttgtgacacaaggagcatacgacacacggaacatcttccagtcactagatcttgcatggacattgcttcggatcttccctcgcgaacttctccaccgtatcccggcgaagaccttggaccagtactatagcagagatgcctcccactgaatcactgatcgttgatcagtgttccaatagtttggcaagtgttgaataaattgaacagattggcttcatggccttttccctgtatttatgtgtagtcaggtccaattcttttctgttgatgagcgcaagtttttcgtagatgactcgcggtcacggcaatatttgtgatattgtgtcatctgtggactatggttaaatttcagttatttgttttctttcaccttccagaactgttagcaagagcattctggaccaggatgctcgaacacaactggctgtatgtacatttgtgaatggtgaataaagaaggggcaataaactgctgcg

SEQ ID NO: 4185 - DNA, 1265 bp, Zea mays
  Clone ID: 700350401_FLI
gagagagagaggtccatccacaggaccaccagaccagagccacagcaccagcggcagccacccaaagcccaggaccgcctcaccgccaatggccgaccgcgtctaccccgccgcgaagccgaacccgcctccaggcgcggcgggcaacagcaacggcgcgcaggcgtcgtcgttccctgcgcccaagtcgcagatgtaccagcggcccatctaccgtccgcaggcccccgcgaagcggcagcgcgggcggtcgtgccggtgcagcttgtgctgctgcttctgctgggcgctggtggtggtgatcctgctggcgttcgtgggcgccgtgtgcggcggcgtcttctacctgctgtaccggccgcagcggccgtcgttcagcgtgtcgtcagtgcggctggcgtcgctgaacctgacgtcgtcggcgacggcgcccgtgctgagcgacgccatcacgctgaccgtgacggcgcggaacccgaacaagaagatggtgtacctgtacgacgacctgaccctgctggtggccacggccgccaacgccgtgccgctggggagcgccacggtgcccgggttcgcgcacgcggccggcaacaccaccgtgctgaccgccaccgtctccgccagcgcggtgggcgtggaccccagcggcgccagttccgacatcaagcggtccggcggcgggtcgttctccgtggtggtggacgcggacaccagcgccggcgtccgggtgggcgggctcaagacgaagaagatcggcatccaggtgcactgcgagggcatcaagctgacggcaccgcctccgccaccgccggcgcccaagagggccaaggggaagaacagcaccgccgcgctcgcgcctgctccggcgccgtccgccgccgacgcgacgccggcgaagacggccacggtgagcacggcggcgcactcgtgcaaggttagggtccgcgtcaagatctggaagtggactttctaggtacgggcagcgggaggagaggagacaccttaggggctgcagcgcgcaaaaaaagattttcgctttcattgctatttatttatctacatatataaatatatatatacggcgataagtttgttatcaccatgattactatatatcggagcgggcaggagtatatgtattgtaggaacaagacatgcgtgcgtcggtgtaaattcattcccccaggcattttcttttccttttgcttcaaccattttccccccatgtgattgatcagtggaacggatgatgtataattacgtgt

SEQ ID NO: 4186 - DNA, 1363 bp, Zea mays
  Clone ID: 700350407_FLI
cgccgcctaggagcattcacgttggtggcgggcggtggctcggttcctctcctccaccgcacctccaagaatccacctccacgactgagctgacggctcggcggcgccatggcggttcaccggctccaaccttccctctctggcctacagtgctccaccgcccggtcgccagtgctcctccatgggccacggctgacgggtgcacgcaccggcaggagaggtggatttggtggacctagattcgatgtgcagagagcgacttggaggtggctgacatcttcaagcactgcaacatgcagttacaactactgttggccatacagggaaatgctgggcctattataccaattgttcaaagcatggaccttgtatagctacatgtttttatcatagatatattaatttctgaaatgcccatatattggtatatttgtggaaatttattggccaactgtaagcccgtcgtgatgcacagaacatttgtggtataagatttttctgttgatgtttgcaggttatttttccagcacttgacattcgagtgaaaaatgtcgcagggacatattctcttgaacataaaggagaaaatgatctcttcgcacatcagacaaggcttctactctttcagaagaaagtcattttcaagagaatcttgaacaaaatgaccagatgtttaggcctagttggaaggacatttttcgaatgaatcagagtgagctcgaggctgagattcgaaaaggtctctcgagattctactcttgatccaaggaggaaggcctatctgatccaaaatctcatgaccagccgttggatagctgctcagcagaaatcaccacaaccaagcgtcgaaggacataatggatgtacacgacgacctggatgtgttccttcgtaccgagacccagggaaacaaatatttggctgtgagcattacaaaagaaactgcaagcttgttgctgcatgctgcaataagctattcacttgcatattctgtcacgataaagttagtgaccatacaatggacaggtaactcaagaggtccacttattgactcttatgaccatgtaattggtgttaatacaactacattaacacgtaaaggttggtagatctggaaggtcttgatggtctaatacctgtctatgagtacgaaagaaaaggcgagagaagtcggtctctgcagcatcgcgcgtgaaaaaaaatcagccaattccatgagcattgatgttgtcatgacttcaaggagagaccatgctaagaataatgcattatgacatttgtcaggcttacatatcgattgtttgatatggatagatgtataggtttatgaccaatccagttcaaagcaatttgagtacaaaag

SEQ ID NO: 4187 - DNA, 2241 bp, Zea mays
  Clone ID: 700350414_FLI
caaaaatctccctcgtcgggcgtcgctggccgtactccgaaatctaccattctacccccactccctccggcgccgctgcagtgccacccctccatcggtccatccccaatccgctatgcaactgctgctcctactgatactcgcttccttcctcctccggccgcctgcggcggcggccagcgcggcagactcgtcatcaggctgctggcccaagacatgcggggacctcaacgtcacctaccctttctgggtggaggagcccggccggcccccgtgcggaccaccgaccttccagctcaagtgcgacagtagcggcgcgttcctgatcagatccgtctaccaggcctcccaggtgctcggcatcttccccgagaacaactccttccacgtggtggaccacaacctcccgctcgccaccggctgcccagcgccaacggtgaacctctcgctcttatttcccgggacattcgtattaagcagagccaacaaagagctgctcttccttgggaagtgcacggggttcccgccggcggagtcggccgggtttcgcagcctgccttgcgacaacagctcctttgtccggctcggcgacggccggaatttctccagccaaagcatccagggcggcgtgccacaaggctgtctgttcacagtattgccgactctcggggctcctgatggaaatggggacgactacgtcgccagcatgaggaatgggttcctcgtggattggaaagcggtgccaggggattgtcccaagtgcatggcacgcggcggggaatgcacgtacggcggtcccgacgccgagttcgcctgtgattgctccggtggcaagtgcggtaccaaagggaatggcaggaagattccactaatagtttcgatttcagtagctgcaagcttgctcctaccatgtatatatgtgttggtatggcataggaaaaaactggagtttttcctatgcaggaagaccagcagtgccatagaagagaacattgaggccctaatattagcacatggatcactagctccaaaaaggtacaggtactcagaagtaacaaagataacatcttcctttaatattaagcttggggaaggtggttatggcatggttttcaaaggaaggctagatgatggtcgtctagttgcagtgaaattcctgcatgactccaaaggtgacggtgaggagtttgtgaacgaggttatgagtattggcaggacatcacacattaatatcgttagcttatttgggttttgtttggaaggctcaaagcgagccctaatatatgagtatatgtcaaatggttctttggataaatatatatacacagagaatccgaaggcagttttaggatgggataagctctataccatagcaattgggattgctagagggttggaatacttgcaccacagttgtaatacacgcatagtccatttcgacatcaagcctcataatatccttctggatcagaactttcacccgaagattgccgattttggtttggccaagttgtgtcatatgaaggagagcaagctttctatgactggtgctagaggtacgcctgggttcatagctcctgaagtgcactctcgaacattcggggttgtttcaacaaaagcagatgtttatagttatggaatgatgctgctagagatggttggaggcagaaaaaatgttaactcagcggctcaagagtcaagtgaaaagtattttccacattggatttatgaccactttggtcaagaggatggactgcaggcgtgtgaagtcacacgtgaaaatgaaggtatcgcaaaaaaactgagtgtgattggcctatcgtgcatccaaatattaccaatgcatcgccctaccatcggaaaggtcatggaaatgttcgagagaggatcggatgaactggacatgccaccaaggcaaaacttcagccaaatattccaagatccagtacacagtttgaatgcggaaaccatgagcatgattagtggcaccaaagcaaaagcttctagtgaagtgctaaagatgaaggggataagcgtcgtgaactcaaaaaccatacaacggttgccaactctgtaaaacagttagttacctacgacattggaaatgaacattaaacatggagcccccaccaaaataccgtatctacatctccaaacaggtgttggattagaataatgtaaaatatatcatggttgtgtcatgatattcggtgaactatagtgttataaatagtggttttg

SEQ ID NO: 4188 - DNA, 1812 bp, Zea mays
  Clone ID: 700350418_FLI
gtgctgtcatccaaggtgtacgacgtggcaatcgagtcaccgctgcagctcgcctccaagctctcccaccgcctcggggtcaacctctggatcaagcgcgaggacctgcagccggtgttctcattcaaattgcggggagcatacaacatgatggcaaagctctcccgtgagcagttagagaggggcgtcatctgctcctctgctggaaaccatgcccagggcgttgctctttctgctcagagactgggttgtgatgctgtcatcgtcatgcccgtgacgacaccagaaatcaagtggaaatcagtggagcggttgggcgcaacggtggtccttgagggggactcatatgatgaagctcagtcatacgcaaaattacgatgtcagcaagaagaccgcacattcatacctccctttgaccatcctgatgtcatcactgggcaaggaactgtcggcatggaaattgttcggcaactgcaaggtccactgcatgcaatatttgtacctgttggaggcggtggattaattgctggaattgctgcctatgtaaaacgggttcgcccagaggtgaaaataattggagtggaaccctccgatgcaaatgcaatggcattatccttgtatcatggtaagagggtcatgttggagcatgttggtgggtttgctgatggtgttgctgtcaaagctgtaggggaggaaacatttcgcctgtgcagagagcttgtagatggcattgttatggtcagtcgagacgctatttgtgcttcgataaaggatatgtttgaggagaaaagaagtatccttgaacctgccggtgcccttgcattggctggggctgaagcctactgcaaatactataacttgaaaggagatactgtggttgcaataactagtggggcaaatatgaactttgaccgacttagacttgtaactgagctagcagatgttggccgaaaacgggaagcagtgttagctacatttctgcccgaggagcacggaagcttcaaaaaattcacagaattggttggcaggatgaatattactgaatttaaatacagatatgattttaatgcaaaggatgcccttgttctttacagtgttggcatttacactgacaatgagcttggagcaatggtggatcgcatggaatcggcgaaactgaagactgttaatcttactgataatgatttagcaaaggaccaccttagatactttattggaggtagatcagaaataaaagatgaacttgtttaccggttcatttttccagaaaggcctggtgcccttatgaaatttttggatgcattcagccctcgttggaacatcagtcttttccattaccgtgcacagggtgaaactggagcaaatgtattagttggtatacaagtgccgccagtggacttcgatgaattcaagagtcatgctgataatctcgggtacgagtacatgtcagagaacaacaatgagatatacaggttgctgttgcgtgacccagaggtctagtataataggtgccgatgggttcctttgctcctatagtttggtgtcacttttgaagtataaggttccactccaaggtagaaggtgcaagtttcttcttcagttggaatgcagtcattgccaaatataccttcaatgtgccatctcaccatctgtttactcagttagatcatgtagtgtatcagtcgtgtatttttattgttgtgcttcgtgaactcacttatccgtttgcggcacctagagtgtgtcaaataatgataactaatatgatatctaaatgtctgataatatatatgtatttatgatttgggcagc

SEQ ID NO: 4189 - DNA, 1259 bp, Zea mays
  Clone ID: 700350443_FLI
cccccaatcactcaccacccctttcgtctcgccctttttaacccaatcccctctccacgattccacacccatctcctgagtcctgctgcctgcgctcgcctcagctcctttcttccccgccccttggcttttgcttggttgcatcgggccggtcgagccggagaggaaaagctagctagcagctaccagctctcggccggcggtggtagtctgcctgcagctggggttagttagctgcaagggttgggagccatggggaggggtcgggtggagctcaagcggatcgagaacaagatcaaccgccaggtcaccttcgccaagcgccgcaacggcctgctcaagaaggcgtacgagctctccgtgctctgcgacgccgaagtcgcgctcatcatcttctccaaccgcggcaagctctacgagttctgcagcggacagagcatcaccaaaacacttgagaggtatgaaaaaaacagttatggaggaccagatactgctgtacagaacaaggagaacgagttagtccagagcagtcgtaatgagtacctcaagctgaaagcgagggtggataatttacagaggactcagaggaatttgcttggtgaagatctggggtcacttggtgtcaaagagcttgagcagcttgagaagcaacttgattcatccttaaggcacataagatccacaaggacacaacatatgcttgatcagctcactgatcttcagaggagggagcaaatgctgtgtgaagcaaataagtgccttagaagaaagctggaggagaccagcaaccaggtgcatggccaagtgtgggagcacggtgccaacttactcggctacgagaggcactctcctcaacagcaggccccatcacatgttggcaatggtttgttctttcatcccctggaagctgcagcagagccaaccctgcagatcgggttcgctcctgagcatatgaataacttcatgccaacatggctaccctgaagatggatcttgaggcaaaggaaataaataaagatgcggtggcagcatcatactctatgcaagctaagagtgacagctgtgtttcagtcacatatatgatctagtctgtgtgtcaatgtgtcgaaaaacatgtctgtgattttgttatatgaatgtaacgcgcaatgaaacatacaggactagctgcttgcttgacgatgcgtttgcgtgtatccgtataaattaaaggctataagccacatcgtatatgcgtactgcacatgcgtgcattatct

SEQ ID NO: 4190 - DNA, 1083 bp, Zea mays
  Clone ID: 700350517_FLI
cacaaacaagagcttaaactgtcacagtacaaggatatcgagaagcgatatactaatcaatttctccagcttaagacaactgaaatggcaaacaaggacttggacagatattatactgctttagacaaggctcttatgcggttccacagcatgaagatggaggagataaataaaataatcaaggaactgtggcaacagacatacagaggccaggatattgattacataagcataaattctgattctgagggtgctggcactcgatcatacagctaccgcgttgttatgcaaactggtgatgctgagctggaaatgcgagggcgctgcagtgctggtcagaaggttcttgcttctcttataatcagactagcacttgcggaaactttctgcctgaactgcggtatattggctttggatgagccaactacgaatctagatgggccaaatgcagagagtcttgctgctgcgctgttgagaataatggaagccaggaaagggcaggagaacttccagttgattgtaatcactcatgatgagagatttgcccatcttatcggtcaaaggcagcttgctgagaagtactatcgagtctccaaggatgagaaccagcacagcataattgaatcccaagagatatttgactaagggtgttctaggaggctgtagcacgcactcgtttgctagtcgaatccagttaatttatgccaagtactggtgccagagcaatgttaacaagctttaggaggctctgttacgccgttacgtcagttgcgtgaaacctatccttcgttgttgtatacttatttaatctggccagaggatggaatgtgtgcactgggtgatggatgtttcacgacatcaatgaatgtttcacaatctagcatccgttttttttgcttcacatgatgtcatacaaaatcgctacggtttcatttggttttggaggtacctacgagtacgatggaacacaacggcatgtttctgcgtcgttggagccgttggattcgcttcaacatttgtaaggttgtctcttaacgtatgatgcttgtgcaatgacgaccatatttgagaaagatatttgtt

SEQ ID NO: 4191 - DNA, 2520 bp, Zea mays
  Clone ID: 700350520_FLI
agcagatcaaggtctggttccagaaccgcagatgccgcgagaagcagcggaaggaggcctcgcgcctgcagactgtgaaccggaagctgactgcgatgaacaagctgttgatggaggagaatgacaggctgcagaagcaggtctcccgactcgtgtacgagaatggatacatgcgacagcagcttcacaatccttctgctgcgactacagacacgagctgtgagtctgtggtcacaagtggtcagcaccaccaacagcaaaacacagcagctccgcgtcctcaacgggatgcaaacaacccagctggtctcctagctatcgctgaggagaccttggcagagttcttgtcaaaagcgacaggaactgctgtcgattgggtgcaaatggttgggatgaagcctggtccggattccattggaatcatcgctgtttcgcacaattgtagtggcgtagcagcccgagcttgcggcctagtgagccttgagcccacaaaggtcgcggagatcctcaaggatcgcccttcttggtaccgcgattgtcggtgtgtggatattctccatgttatccctacgggtaatggtggaactatcgagcttatctacatgcagacttacgcaccgacaactttggcggcaccgcgcgacttttggactctccgatacactagtggtcttgaggatggcagtcttgtgatctgtgagagatcactgacacaatcgactggaggcccatcaggacccaacactccaaattttgtaagagccgaagtgcttcctagtggctatctaattcgaccctgtgagggaggtggctccatgattcacattgtggatcatgttgatttagatgcttggagtgtgcctgaggtccttagaccactttatgaatccccaaagattcttgcacagaaaacaactattgctgcactgcgtcacattaggcaaattgcgcatgaatcgagtggggaaatgccctatggagggggccgacagccagcagttttgagaacatttagccagaggcttagcaggggtttcaatgatgctgtcaatgggtttccagatgacggttggtcactgatgagcagtgacggtgctgaggatgttactattgctatcaactcttctccaaacaaacttattggtcctcatgtcaactcttcccagctgtttactgcgatcggaggtggcatcctgtgtgctaaggcatcaatgctgcttcagaatgtgccacctgccctactagtacgatttctgagggagcatcgctccgaatgggctgatcctggtgttgatgcttattctgccgctgctctgagggctagtccatatgcagttcctggcttgcgtgctagtgggtttatgggcagccaggttattctgccgcttgcacataccttagagcatgaagagttcttggaggttattaggcttgagggacacagcctctgccatgacgaagttgttctgtcacgagatatgtatcttctgcagttgtgcagcggtgtggatgaaaatgcagctggtgcatgtgcacagcttgtgtttgcacccatcgatgaatcttttgccgacgatgcgccactgctaccctcaggcttccgtgtcattccactggatgcaaagacggatccaccatcaggcacacgcacacttgaccttgcatctaccctcgaggttggatctggtgggacaacgcgtgcttcgagtgacgcctccagcacctgcaacacaagatcagtgctgaccattgctttccagttctcatatgaaaatcacctacgagagagcgtcgcagccatggccaggcaatacgtcaggaccgtggtggcatcggtgcagagggtagccatggcaatagctccttcgcgcattggtggacagcttgaaatgaagcaaactccaggatctcctgaggcacacacgctggcaaggtggatcggcaggagctacaggttccacactggagccgaactcctccgcacggacacccaatgcacggatgcttccttgaaagcgctgtggcaacactcggactcgatcatgtgctgttccctgaaggctgctcccgtgttcacctttgccaaccaagccggcctggacatgctggagacgacgctgattgctctccaggacatctcccttgagaagatccttgacgacgatggcaggaaggcgctctgcaccgagtaccctaagattatgcaacagggcttcgcgtacctccccggtggcgtgtgtgtgtcgagcatggggcggccggtgtcgtacgagcaggcggtggcgtggaaggtcctgagcgacgacgacaccccgcactgccttgccttcatgttcgtgaactggtccttcgtgtgagaacccggtccccctagtagtagagccaagttgcctagcgtttgcggctctgttgtttgaactctgtaccccatgtaccgtcgcttttgcctgtgtccaggcaacctatgaaacacacctttgtagttgttcatcacccccgtggaacaaacagctttgtact

SEQ ID NO: 4192 - DNA, 1523 bp, Zea mays
  Clone ID: 700350551_FLI
gggcgagcaaaggcaagtacaccattgggcttgggcaagattgcatggccttttgcagcgaggtggaggatgtcatctcaatgagtttgacggttgtcaattctctgctgaaaaaatacaagattgatcccaagctaattggtcgcttggaggtgggaagtgaaacagttatagacaaaagcaaatccatcaaaacttggctgatgcagatttttgaggaaagtgataatactgacattgaaggtgttgactccagcaatgcatgttatggtgggacagcagccctactgaattgtgtgaattgggtcgaaagtaactcctgggatggccgttatggtcttgtcgtttgcacggacagcgcggtttatgcggaaggaccagctcgtccaacaggaggtgctgctgctatagcaatgctcattggtcctaatgctccgatttccttcgagagcaaatatagagcttctcatatggctcatgtttatgatttctacaaacctgatcttgcaagtgaatatccggttgttgatggtaaattatcccaaacatgctacctgatggctcttgactcatgctacagacagttctgcaacaagtatgagaagattgcgggtaaacaattctcaatttcagatgcagaatattttgtgttccattctccatacaacaagctcgtgcagaagagttttgctcgactttactacaatgacttcatgcgcaactgcagctatgttgatgatgatgctaaagagaagctccagtccttttcaaatttgactggtgaagagagctaccagagtcgcgacttggaaaaggcctcacaacaggtcgcaaagcacctgtatggcatcaaagttcagccaacgactctgcttccgaaacagatcggcaacatgtatacggcatccctttatgctgcattggcatctgtgctatataacaagcatgatagtctgaatggacaaagaattgtgatgttctcttacggcagcggcttgacatccactatgttttcgttgaggctaaacaatggccagcatcccttcagtctatcaaacataggttcagttcttggtgtcaccgagaagcttcagtcaagacatgagaccttgcctgagaaattcgttgagacgctgaagctgatggaacaccgatacggcgcaaaagacttcgagacgagcagcgacacgagtctcctgcagccgggcacattctacctcaccaaggtggactccatgtaccggaggttctattcccagaagccggccgaggaaataggcggcggtaaaaccaagtgctgcaacggcttcgcaaatggccactagtgggagtccgcgtgccgtttgaattgctacgtcgcccttctgtactgttgatcatcattctctgtgttttgatcatgcttgtggttagcgttttcaccctagggtgtttctgaaataatatattactagatatatccccatctgttacaccggggtcacgaattttgccatttaggccttctctatttttctttagtt

SEQ ID NO: 4193 - DNA, 1201 bp, Zea mays
  Clone ID: 700350561_FLI
gcagcagcagctgcagcaccaccagccgcagctcgggaccgtgccccatctcctcgccggcggcgtcgctggcgcagtcagcaagacctgcaccgccccgctcgcacgcctcaccatcctctttcaggtacaaggaatgcactcagatgtggctacaatgcgcaatactagcatatggcgtgaagcatcccgcattgtctatgaagaaggttttcgagctttctggaaagggaaccttgttaccattgctcaccggttgccttactcttcaattagtttctatgcctatgagagatacaagaatttgcttcagatgctaccgggtcttgagaagaatggtggatttggtgcagatgttggtgttagattgctaggtggtggtttatcaggaatcactgcagcttctgcgacgtatccactggacttggtgcggacacgtcttgctgcccagacaaatactgcctactacaggggcatatctcatgctctttatgcgatctgcagagatgagggtgtccgtggattgtacaagggtcttggtgccactttactgggagtgggccccagcattgcagtaagcttctctgtgtatgaaactttacgttcccattggcaaatagagaggccatgtgattcccctgttctgatcagtttggcttgtggaagtctttcaggaattgcatcgtctacttttacattcccattggatcttgtgagacgtcgcatgcaattggaaggagcagccgggagggctcgcgtctaccagacaggactttttggaaccttcggacatattgtccgtacggagggttttagaggcatgtatagaggaatcttgcctgagtactgcaaagtggttcctggtgtcggcatcgtatttatgacatatgagatgcttaaggccatcctcacaggactggaatctgatgattagatatctgcgaggtcatgctacgcaattttgatacatggtgtcagaacaacatttgaggctgattagactgggagaaatatgagcatgtagcatacgttagggtttaggatgtgctaaggtttgcagtttgtgttatatggttacagatgtttatgtagtgcaccgtgaacgatgccacaggtcttccaaaatgaatatttttttggcatcaccatcattttgtgtatcttcaataacattgtaatggtacatgaagctgttgtcttt

SEQ ID NO: 4194 - DNA, 1164 bp, Zea mays
  Clone ID: 700350565_FLI
ctctttttctctcctgctcagccttgcttcccgtcccatcctttctttcccttgggcgcattcagcagcttcagcctggccggccggcctgctattaaaccactttgcttgcaagtccaagaaactgctagagaggaacaagctgagatctccagcatggggaggggaaggattgagatcaagaggatcgagaacaacacgagccggcaggtcaccttctgcaaacgccgcaatgggctcctcaagaaggcctacgagctctccgtcctatgcgacgccgaggtggcgctcgtcgtcttctccagccgcggacgcctctacgagtacgccaacaacagtgtgaaggctacgatcgagaggtacaagaaggcacacgccgttggctcttcctctggccccccactcttagagcacaatgcccagcaattctaccagcaagaatccgcaaaactgcgcaaccagatccagatgctgcaaaacactaacaggcacttggttggtgactctgtgggaaacttgtcactcaaagagctgaagcagctggagagccgccttgagaaaggcatctctaagatcagggccaggaagagtgagctgctggctgccgagatcaattacatggccaaaagggagactgagcttcagaatgaccacatgaacctcaggaccaagattgaggagggagagcaacagctgcagcaggtgactgtggcccagtctgtcgcagcagcagctgccaccgacgtggagctgaatccgttcttggagatggataccaaatgcttcttccctggcggccccttcgcgacactggacatgaagtgcttcttccccggcagcttgcagatgctggaggcacagcagcgccagatgcttgccaccgagctgaacctcggctaccaactggcgccgcctgacactgacgttgccaacaataaccctcagcagttctaaactggatccatgagaaagccaactgtgaccgatggaagctggctgttgcctctagatgatattggcttccataacctagcttattatggtgtgtattgttgccttttgtgtgtgattctccttgctactgatggagaataaacctaatcgattgggcataatgatcaaatgctacagcacccgtgaggctgtgatcaggacatcatgttt

SEQ ID NO: 4195 - DNA, 2435 bp, Zea mays
  Clone ID: 700350607_FLI
cgcctccctcccgcaccccggccttctctgcctcccactcactcgacgcctccgccgccgccgccgccgggatgaagaaccccgacttcactgcagacaaagcgctcgccaaggacttcctgtccaacttcgtcggccctcacggcgaccccaagtacctgaacatcctgcaagatgtcgccaacaggaagatacgcgcggtccagatcgagctggacgacctgtttcatcacaaggacgtcgatgaggagttcctgcagcgtgtcactgagaacacgcggcgctacgtcggcatcttcgcggaggccatggacgagatcatgccggagcccactgaggcgtacaccgtcgacgaggaccgggacatcctgatgacgcagcgtgtggacgagggggtggacggcggcgcggacggcacggacccgctgcagagaatgccaccagatatcaaacggttctttgaggtttacatcaagacattctcaaaggcaactccactcaccattagacaagtaaaggcatccaacattgggcagcttgtgaaaatatctgggattgttactcgctgctcggatgtgaagcccttgatgcaggttgctgtttatacatgtgaagaatgtggctttgagatataccaggaagtgactgctagagtgtttatgcccctcattgaatgtccatctcaacgatgcaagctgaacaaagcaaaggggaatctaatccttcaattgcgtgcatcgaagtttttgaaatttcaggaggtgaagcttcaagagttagcagagcatgtacccaagggccacattcctcgttctctgactgttcatctaagaggagagctgactagaaaggttgcacctggagatgtggttgagatgtcaggaatttttctccctatgccttactatgggtttagagcaatgcgtgcaggattagttgctgatacttacttggaagcaatgtctgtcacacatttcaagaaaaaatatgaggagtatgatctcaaaggtgatgaacaagaacaaattgacagattggctgaggacggtgatatctacagtaagttggcaaggtccttggcacctgaaatatttggccatgaagacgtcaaaaaagcactgctgttactacttgttggtgcaccccataggaagctcgcagatggcatgaagatcagaggcgacctgcatatatgcatgatgggagatcctggtgttgcaaagagtcaacttctgaagcatattatcaatgttgcaccaagaggagtgtacaccactggacgtgggagcagtggtgttggtcttaccgctgccgtccaaaaggatccagtaacaaatgagtttgtcctcgagggtggagcactggtactggcagatatgggcatttgtgctatagatgagtttgacaagatggaagagtcagaccggacagcaatccatgaggtaatggagcagcaaacagttagcattgccaaggctggcatcaccacctctctcaatgcgagaactgcaattctggctgctgcaaatccagcatggggaaggtacgacatgaggaggactccagcagaaaatataaatctacctccggcactcctgtcccgtttcgacctgctttggttgatcctggatcgcgcggacatggaaaccgatctcgaaatggcgaggcacattgttcatgttcatcaaaaccttgaatcgccggcgctggggttcacaccactcgagccatctgtgctcagggcatacatatctgcagctagaagagtgattccttccgttcctagagagctcgaggaatacattgcgactgcatattccagcatccgccaagaggaggcgaagtcgaacgcgccaacctcctacacaaccatcaggacgcttctgagcatactccgtatctctatcgccttggcaaggcttaggttctcagaaaccgtggcccagagcgacgtcgacgaagcactgcggctgatgcagatgtccaagtactcgttgtactcggacgaccgccagcggtctggcctcgatgcgatatctgacatatattccatcctgagagacgaggccgcgaggacgagcagcatggacgtgagatatgctcatgctcttaacttgatctccagaaagggatacagcgaggctcaattgaaggagtgcttggaggaatacgcttccctgaatgtgtggcagatccatccgagcacctttgacatccacttcatcgatgcctgatgctgaagccggcaccgatcaccaaacaaatttcatcatgagtttgtggcttcatgatttgtgacgggagggatgaacaccgtcgactgaagcctaacaggatccaaaacgaacaagcccttcatgatgtcgatgatgtaatgctatcacaggcacagctgtactagtagaaccattcttctctgacttattatgagtagc

SEQ ID NO: 4196 - DNA, 1181 bp, Zea mays
  Clone ID: 700350611_FLI
gacaatggatccaaggatgcagggaccggtgctcaggccacgctggagagactggtgtccaagcacaggcatcggcgtgaccctgatggccccccgtttgaaggcaggttttccgacgagtcatcatctttgctggagaggacgcttgaaatccgggacaggtcctacaggctcaagatcggtgtgatgagcgaagcgcatcctcctgtatatggtgacgatgaaagcgccgccagtgctgctgattcagatggcgaggagtttagccgaaacgtcaaggaagctgcggagatcctgaggaaggccagggcatccatggctgacgaagagaccgcagacgcactgctgtacaaatcagctaggctcctttccacagctgtggctttgaggccaacaagcctggtagcagtgggtcagctagggaacacgtacctcctccacggagagctcaagctcaaggttagtcgcgagctgaggacactcttggccagcagcggcgcctttctgaacggaagagagcgtgctccacggtccaggaaggtagacaggaggatggtaagcagagagagcatctcatccgctcttgtggatgtatgcgaggaatgcgagagcctccttgtcgaggccggcagaagctacaggatggccctctccatcgattcaggtgacgccaaggcattgtacaactgggggctggcacttattttccgggcacaattgctcgctgacatcggaccggaagcagcagccgacgctgaccgggtgtatctagctgcaatcgacaagttcgacgccatgttgtcgaggagcaacacttatgctccagaagctctctacagatggggcactgcgttgcagcagcgctcccatctgcggcctcggagcaacggtgagaagataaggcttctggagcaggcgaagagcttgttcgaagatgtgctgtatgtggaagcagacaacaagatggtgagggaggcgctgtcatcgtgcatatcagagctcaactaccatggccgctggttataaccgtgaggagctttgtagcaactagcaagcgaggggaggagggctaatgataacttttgagttttgaatgatgtattagcttctagctttttatgctgacaagaagctcaaacaatatcttgcaatacaatgcaatatgaccttttttttcttgt

SEQ ID NO: 4197 - DNA, 938 bp, Zea mays
  Clone ID: 700350616_FLI
cttcctcacccgcccgcgccccgtgtacctgctcgacttcgcctgctacaagccggagtcggagcgcaagtgcacgcgcgagaccttcatgcactgctccaagctcaccggatccttcacggacgagaacctcgagttccagcgcaagatcctcgagcgctccggcctcggcgaggacacctaccttccccccgccgtgctccgggtgccccctaacccgtgcatggacgaggcgcgtaaggaggcgcgcgccgtcatgttcggcgccatcgaccagctgctcgagaagaccggtgtcaggcccaaggacattggcgtcctagtggtcaactgcagcttgttcaacccgacgccgtcgctgtcagccatggtggtgaaccattacaagctgagggggaatattgtgagctacaacctcggcgggatgggctgcagcgccgggcttctgtccatcgacctcgccaaggatctgctgcaggtgcaccccaactcttacgccctggtgatcagcatggagaacatcacacttaattggtactttgggaacaaccggtccatgcttgtgtcgaattgcctgttccggatgggtggcgcggccatcctgctctcgaacaggcggtctgacaggcggaggtccaagtatgagctggtgcacacggtgcgcacgcacaagggcgccgacgacaagtgctttggctgcgtgacacaggaggaagatgagattggcaagattggcgtgtcactgtccaaggacctcatggcagtggccggagacgcacttaagaccaacatcaccacgctggggccgttggtgctcccattatcagagcaacttctcttcatgggcacattgattgccaagaaggtgctcaagatgaagatcaagccatacatccctgacttcaagctggctttcgagcacttctgcatccacgctg

SEQ ID NO: 4198 - DNA, 2592 bp, Zea mays
  Clone ID: 700350643_FLI
aggcatgcaaggctatttggtacctagctcatgctgttgacattatgtccattggtgcacaccatttttcatttcccttagctaattcatggcgacagatacattcaatgcaagagcaaagttcaaaggcagattcaaactctaccaatctgattaacatatttgtcaaatcatttctcgcctcacgaccaattcaggttgcagtttaccactgcttgcataatggtctagaatcagctattcatgcttgtcttcagcttatctcaagggcctgtcttcagaatgtgactttctgtgccattatgtgtcgtccatggaattcaccatctgatgttgacgtagtagaatatggtggagatggaacaatagtatctgacatgttttccttattgtcactgtgtggatcatatttaaataaggaatccaggcagaatagcaatcagaaatgcaaactatccaaccctcatgctcttgtagtgcactgctgccttgcactagcgacaatagctgcatgtttgaaatcagagggaggatcttcagcatcacttgtcctaacaagttcccagaaaaaacagcggtcccggctctcagttcttgcacacctctcatcagttgatgatacagtgaagagttgcctgcagccacactgtgcatcagcaatgcttgcgctctcatcacttgtttctcttgaaaatggtggacaaaccagatcgtctctttgtgaaactgcccttgctttgtttcctcgtatggcaacactgcacacactgctgaagctttggttatctgatggaagcgaggcactgtgtcgatataatgctggtcttctgaatctttttggactccgcgatggaagtattggactgctggagacaaggttgaaatggggcggaccattggccattgaacaagcctgctcagttggcatcccacagctcctaattcgcttgcttactgatggtttcataaaagaggtttctgacggaaaagatggttcgacgagccgcagtgggttgtctccattgggagttgtctggactctttctgctttatctcaatgccttcctggtggagtttttcgtgaaattttgtacagaagggaacagttaaagctcttaaccgacttgttgtctgatacacatcttaaggcattggccgcctggacgggtcttggtggtgggaagaggggagttcgggaactgataaactcagtcgttgatatcttggcatttccatttgttgcagtgcagagttctccaaacatgccgtcagcatctgcatccatcaatagtggtttcctgcttaatgttgcatcacccggtgggcgcattggtactgagaataaggaaatgctcaaaactatagagcaaaacatgcctcagtacattcaagttctactagaggttggaattcctggatgtatgctgcgttgtcttgactatgttgacatggaagatctaggtaggcccttggccattgtggccaaaatggcaggctacaggccacttgctttgcagcttcataaagaaggtcttctagatccaagtagagtagcagcattactcgagggtcctatagcaaaggagactttgcttgatttcctcatgattatttctgaccttgctcgcatgtcgaaggacttttatgtgcccattgataaagctggacttgttgttcttctgaagaacttcttatcaaatggagaccctgatataagggcaaaagcttgtagtgccattggcaacatgtgccgccatagctcctacttttatggcccacttgcagcaaataaggtgatccagctcgtggttgacaggtgttctgatcctgacaagcgcacacgaaagtttgcatgttttgccgttggcaatgctgcttatcataatgatatgctgtatgaagaattgagacggtccatacctcaactcaccactttacttcttggtcctgaggaggataaaaccaaaggcaacgctgcaggcgcgctcagtaatctagtgaggaactcagacatgctttgcgaagacattgtctcccaaggcgcaattcaggcgctgctgaagatggtcggcagttactctactgttgccctgagccccagcagacgagatgctctaaccgaatctccgctaagaatcgtgctcttcgccctgcgcaagatgtgcgaccacgccatctgcaggaacttcctacggtcttcggagctgctccccgtcatcgtccacctccggcagtcacctgatccaacgatctccgagtatgcttctgccatcgcgaccagagtgagccaggcctgagtgcctgacgtttctctggacaggcgcagcttaaggtgtgccaccctgggctgggcatgatcatgccacagcggcccaaatctacgatccatctgcagctgtaatgtagtgtatggtttacggatcaagcaagcttagcttgtgcatatgcataagacttctgaaaaaagagcgattccattcgctgtctgtacatacgctgatacgcaccaccagaactgaagctacatgtcatgtgtgttgatgtatgtatatgctgctagggtcgtggccatcgaatagattcatattttgc

SEQ ID NO: 4199 - DNA, 2890 bp, Zea mays
  Clone ID: 700350705_FLI
caaaattgtggtggggacgtcagcaatccagctgctgaggatctcatagttgcgatattgactgcattggactgtcttccgatcagcaatgagcaatcagtctcctgtggggttatgcctactgttggtcacctgctggctcacagaattgccgtgatcaaccaaaaggcaagagcactctgtcacaagtggggcggtgtaccaaaacatggtacaaatggagagcattttcatacagaggagtcaagccacactgaccagcttaagtctccagatgccggccacaagacagaaactaagagaaagtgtgtagtggacgaaggagagcctgatgaagaatcaaaacctgaggtgacaactcactcagatgcacctttgtccgacccttctctgactaatgataatgcagatgcaacagagcaaccagcagggctaacttcaccaaatccatcaaacggaaatgcaacattaggggatgtgaacaacttggtcaggtctcctacatctgcaggtcatgtgggtttagaagatgggcagtccacccccaatgaaatttcttccaatgatgctgaactgcccattaatggcatactccggtcaaactctactaatgcaaaaagtggtactggacaagatgctccagtggaatcaactccagtggccatgtctgtagaccataataaacctggaaagttgtttcctggtagtaaaatgggtctggaggatagtattatttcagttagctcaagtatcaaggagtctcagccatttgcagctggtagatcacatttggagaaggatacaactgaaactttgaaccatcttgcagttgtaacccgtgatttgcaagatttgtccgaggaaagtacaagcaaagaagatgaacctacatcatcatctagtacagatgatatggacatgagcggtgattatatattgcaaagatgcatgtcgagctttgggggctcctccaaggcagcagacacaaaatccactgcattggaaggggagaaatcaacacgaatggcagactttgatgatacagatgcactagaagttgcacgtctggtagctattgaggtggagcgggaagtcattgactacagagaacccttttgtagttctcctgatactaattccaggaatgctgacagtcctgacctggaaggaccacggcagcctgtagccattgccagtgaactgaatgataataaatcttccagtacagaggctaagtcaggaagctcctcatctcataaggaggatggatcaggcatcacagatggcagcggtccgttgagtagaaaacatacacacagtgtcgatctggggaacttagaccttaatgaaaatcagtgtgccgaggaaactgactttaatccgaagtcgatccttagtaattctgtcaatttgtcaatgcctatagctgtggctgcatcaagaggctcatctgtgtttccagctcggctccactttgaaggtggacttgggtggaaaggctctgctgcaaccagcgcctttcgaccagctccacctcggaggactcctgatgcagagaagtcactttcagcttcttcacataaaacaagcaacatattatttgatttaaatgtagctgacaacggcagtgctacttctggtgaaccactttcgacagcaatcctgccagcttcttctgaactaccttccgaggttgcttccaaagcagttgatgtgagcggaggactgaaacttgaccttaatttctcatgtggtgatgaggaagatgctatcactgcaagcaatgtgccgtcattgtggaatcaccaacaatttaatggcaactggagtcagccttctttctcatcttcaaagcaacctgcagccagaaactttgacttgaatgacaacatgtcgatcgctgatgtttctgtgcgaggaatggacgggtcttctgtcaagactccttcaaggccaagggatatgtcggaccattctgccgtcacaattatgggtaagaggatagttgtaggacagagagatgatggacagcaataccagcataactttctgggaccaagtgctgaatcaagagtttttgcaagacccactcaatcttttgcacatactcctgattatagtgttctcagttatccatctcaacctgccatgccttttaccccagcgttctttgccccagggggcagtccatacttggtggatgcaaaaggtgcaccagtcataccaccgctgtcaggtctaagcctcggcatttctcatccatctttcaacaccagagcaacacagccctcatctaatgaactgagttacttccatcctagcgtggatttcagttatggagtgtcatctgaaggcgcacgtagggaagcagggagctactggcccatgtcctaccagggtcagacaatgtttgtggatgaacgcatgaggaatgtatcacaggatggtacttctgggttggtgctgaagcgaaaagagccagagtcaggttgggatttgtacccacgtcgttgagcgtgagcctgaaggtttgttgcagtcgcaatcgattttgtcccactctcttaaaaaggatatgttcaatgctccgtttatggcggcaccttggacattgtattttagggtatttctttggcacgggcccagttctactaggtctgaagacatacacggagaactgaataagagatcagctacaggtagatttgacagatgttgacatggcaaggacattgttagctgctggaaaccacctcgtgtagatctggttctttgtgaatgtattagctttgttttagttgacataatatagccaaattgctctctagggagctaaattatgtaaatcatcatcgtataactcatagatgaaatgcatccctttttatct

SEQ ID NO: 4200 - DNA, 2561 bp, Zea mays
  Clone ID: 700350719_FLI
aacgacctccgcccattccgctcgcggttgcctccgcctccgcctccgcctccgcgcctaacccaatccagagccagggcagggcaaccaaaccctaggccctcgcgctcgtggtatccatgggctgaccgcgtcccggtggggagcccggatccagagctagggttccgtcctcggcggcaacgccatggagtgggacagcgagtccgacggcgccggcagcgtcggcgtcgacgagcaggaagaggagcaggagcaggaggaggaggaggaggagcggggaggcgagggaggaggtggcgacgccggtgggatgttcacgctcgcgattgaaggcatgctgcgcgcgtccggtccgtgcgggctcgtcgtcaccgacgcgctcgagcccgactgtcccatcatctacgccaaccgcggcttcgaggaggctacgggctaccgcgccgaggagtttcttggcaggaactgtcgattcctgcagtgtagagggccatttgctcgaaggagacatcccctagttaatgctgcagtggtttcagagattcaaagatgcataaacaacagcattgagttccgtggcgatttattaaatttcagaaaagatggatcgccactgatgaacaggttgcatctgacccctatatatggagatgatgaaactataacccattatatgggcatccagttcttcactgatgctaatgttgatttgggaccattgccctgtccaatgacaaaggaaccagtgaggtcaacacggtttgctccagataactcatttcgacccatttctgcggggccagagcacagcaatttctgccgggaatattctagcctcttccagttaacggatgaagtgctttgccaaagtatactgtcaaggttgacaccaagagatatagcatctgtgagctccgtgtgcaggtgcttgtatcatttgacaagaaatgaagatctctggagaatggtttgccagaatgcttggggtagtgaaactactcgagctcttgagacggtgcccgctgcaagaaggttgggctggggacgtctggcaagagaactgaccaccctggaagctgttgcctggaggaaattgacagttgggggtgcagtggagccatctcgatgcaatttcagtgcctgtgccgtagggaaccgtgttgttctatttggtggggaaggtgttaacatgcagccgatgaatgacacgtttgtattggatttaaacgctagcaatccagagtggaggcatataaatgtgagtgcagctcctccaggtcgctggggccatactctgtcatgcttaaatggctcttggttggttgtttttggtggatgtggaaggcagggtctgcttaatgatgtattcatgttggatttggatgcaaaacaaccaacctggcgtgagatacctggagttgcacccccagttccacgttcatggcacagctcctgcactttggatgggacgaagttagtagtttctggtggctgtgccgattcaggtgtacttctcagtgacacatatcttcttgatgtaaccatggataggccagtttggagagaggttcctgcatcctggaaaccgccttctaggctggggcactcaatgtctgtctatgatggtaggaagatcctgatgtttggtggtcttgctaagagcggccctctgcggctcaggtctagtgatgtgtacacaatggacttaagtgaagaagaaccttgctggcgatgcctcactggtagtggaatgcctggggctggaaatccagctggcgcaggtccacctcctcgcctcgatcatgttggtgtgagcctgccaggtggaagaattttgatatttggtggctcagtggcaggtcttcactcagcatcacagctttatctgttggatccaactgaagaaaagccgacctggagaattttgagtgttcctgggcaccctccccgattcgcctggggccacagcacctgtgttgttggaggaacaaaagcgatagtgcttggtggacaaactggggaagagtggatgcttacagaaatacatgagctctctttggcaaacaactcagtctgagttcatggtggacaaaccggggaagagtggatgcttacagaaatacatgagctctctttggcaagcaactcagtctgagttcagggtggccaaaccggggaagagtggatgcttacagaaatacatgagctctctttggcaagcaactcagtctgagttcaggaatggttcttagtcatgctccttgcaaactaattgcggcttcttatgcgacctgaagcttgattgccttcaccttcagagtatcatctggcagctacatggctttacttgggagatgaaatggttttcactggtttgctcgctttatgtaggcagagggtagcgatatgttcatttttattgccgtttgcttggccttctttttaccagataattacagttcataagctactattgtggaatgagtaccagattttatatgtattctcagatgtttccgacttgcaatatgttaggaaaacaaaggactaccttgtac

SEQ ID NO: 4201 - DNA, 826 bp, Zea mays
  Clone ID: 700350736_FLI
caatattattcattgttgaaatatggcagttgattcagttggacaagccttatacttgtggcctaacgtcacttgatattttactggagaggttggatatgtctgtaaggaggatgaaatattgttatattggattaaatagagtattggaggtccaagttttggagctttctttgatagctcatttatgtagactctcaaagattgcagtttgtaccaaggtagttctgggtaaggtgctctgggtaattaatcgcttagaggatctgtgcgctgatgggtcctgtgaactgtctgacttcagtggagaaattaagaaggcctgtgataccaaccgtattggtgataatctgattggcaacatcaacaatttgtttcaactcttccatctgaaaccaacaacagactttggaatgcttaaagtgataagtgcaatgttgcgggtctgtgataacgattctgaaaatccattacaatacatctgtggattaccggtgggtgtcagctttaaaatatctctgtggaacatatctggtcaccatcgactgtggctccgcatgaccattggtgaatctgtgcaacataccttcctagaattttctcgttttgaaggcaatgatgagttgaggagtggctctatggttgttcctttgtatgctactccaaaggcatgttcatttgtgcttcgggtatgtctggtaatggaatgtccatctgcagggatcagcacccaccagggtggacatggaggaccgactgattgtgtggttcaactctctgatgaactgaatgtttattttgttagtgctagccaatggttatgatt

SEQ ID NO: 4202 - DNA, 1702 bp, Zea mays
  Clone ID: 700350737_FLI
ctccgctcggccaccagctttgaccgcctcccctcccctcctctcctgtgttcctccataccccactccccccgcaggagcggcgcggcggcggcaaaggcaaaggcaaaggcaagatgttcgggcgcgcgccgaagaagagcgacaacaccaagtactatgagatcctcggggtgcccaagtcggcgtcccaggacgacctcaagaaggcctaccgcaaggccgctatcaagaaccaccccgacaagggcggtgaccccgagaagttcaaggagctcgcacaagcctatgaggttttgagtgatccagagaaacgtgagatttatgatcagtatggtgaagatgcccttaaggaaggaatgggtggtggtggatcccatgctgatccatttgacattttctcatcattctttggaccctcttttggaggaggtggtggaagcagcaggggaagaaggcaaaggaggggagaagatgtagtccactcacttaaagtttctctggaagatctttacaatggaatctcaaagaagctctctctttcgcgcaatgtcatctgctccaagtgcaagggcaagggctcgaagtctggtgcttcaatgaggtgccctgggtgccagggctcaggtatgaaagtcaccattcgtcagctggggccttccatgatacagcagatgcagcagccttgcaacgagtgcaaggggactggggagagcatcaacgagaaggaccgctgcccagggtgtaagggtgagaaggtcgttcaggagaagaaggttcttgaggttcatgttgagaagggaatgcaacacagccagaagatcaccttccctggtgaagctgatgaagcgcctgataccgttactggagacattgtattcgtcctccagcagaaggaccactccaagttcaaaagaaagggtgaagatctcttttatgagcacaccctgtctctgaccgaagctctatgtgggttccaatttgttcttacacatctggacaacaggcagcttctgatcaaatcaaaccccggcgaagttgttaaacctgaccaattcaaggcaataaacgacgaggggatgccgatttaccagaggcccttcatgaaggggaagctctacattcatttcacggtggagttccccgactcgctggcaccagagcagtgcaaggctctcgagtcggtacttccgccaaagccttcgtccaagctgacagacatggagatcgatgaatgcgaggagacaaccatgcatgatgtgaacaacatcgaggaagagatgcgcaggaagcaggctcatgctgctcaggaggcgtacgaggaggacgatgagatgcctggtggagcccaaagagtgcagtgcgctcaacagtaagcagactaccataatgggattcaaggcactttggttgctcttcaattatgcgagtgcgcctgtggactgtatggttctatggttttgctgtcgctgagctacgaagtaggaagctgatgcgcccctggctctgcaagcgggggaatgtatcctttttttgctgcaactggaaaatgctacccaggcatagctggctaccttataacttttgcttgtgagatttgctagagtgacgattttaatttataggtggacttaatgtttgtgtaaggctaggcataacatcatgtctcaatggacgttgccgttgcacattggtgcatttt

SEQ ID NO: 4203 - DNA, 1462 bp, Zea mays
  Clone ID: 700350790_FLI
gtgggtcctcactcctccccctctctctctatcatcacccttcttccgccggaaggaaaagagaaaaacacacactctctttccgagctctctcgctgtctctcacccagccgccaccatgtcaggcctctacaaccagggcttctcccctgcaagaaccctctccccccagattaggagcaaccccgacgctgatagccagtacttggccgagcttctcgccgagcaccagaagttggggccattcatgcaggtgctgccgatatgcagccggctgctcaaccaagaaatcatgcgggtgtcaagcatggttcatgaccatggatttagtgatcttgacagacgccggtttagaagtcctagccctatgtcttcaccgattgtccggcctaatctacatggaaatggttttggtccttggaatgggatgcaccaagagagattgggctttcctcctcctggaacaagtatggactggcaaggagcaccaccgagccctggctcttatattgtcaagaagatcatgcgcttggaagttcccgtcgactcttaccctaatgtactgccttccaaaacatgtgcaatttatccttcagtattaaatgatattttagttctatttttttttctgtagttcaactttgtgggacgcattctagggccaaggggtaattctctaaagcgagttgaatcatcaactggctgccgtgtttttattagagggaagggttccgtcaaagatacagaaaaggaggacaaacttaaaggaaaacctgggtatgaacatctgaacgagccactgcatatattaatcgaggctgagttaccagcgaacattgttgatacaagactgagacaggcacaagaagtcatggaggaattgctaaagccagtggacgagtcacaagatttgtacaagaggcaacagctgagggagttggctatgctaaactctactctgagagaagacagtcctcaccctggaagtgtctcccctttcagcaacggcggcatgaagcgcgcaaaaccaagccagtagagaaaggtttcaggctctcctccaccctcctccactccagtcgttcttggtgcagcaccagcaaggtgtgcctgcccttgaacctgcgctgcttcgtgtcgtgggtgcttgtgtaagaaaaaaaaggtatatgcattttgctgctgctggacggacaggtggtcgagacgaggaggaaatcgctggtcgttgaactgtctccatcttcggtggatccggccattttgctgctgtaaggtgatgggcattcgttctattcgttactgactgttgaccagattatgatgccgtggtttcaggggagactagctatgcctatggccctgataattagtgtgagctggttcgtttaggtgtttaattagtttgtattattattattcgcgttacgttgtggagtagtagcaaacgtcacagctggtg

SEQ ID NO: 4204 - DNA, 1140 bp, Zea mays
  Clone ID: 700350805_FLI
ggaggggatagcatcgtcatcgcaaaatgcaggctctcctgctccccgcgcgggccgcgccgccgacgccggcgatgcttcggcagcgtgcggtttctgcctccgcgtgtgcgtcgcaggtctgccgccccctattcggtgccgccagttgcatctcctgtggggtccacggaagcgttcggcggcacctcacagtggcggtggcggcggccccgccctcgccttcgtcctcaccttcgtcgggaccgctctacccgacgcctccacccaccgagcaggaggtggagagggtcaagctcgagcaggttatgaggagactagagaaaacagcaaggtatttcaagaatttgggtaccctggggttctggtcccaattggtgtgcacaattatttctgctggaattttggcattctctacagttgtaacggggaaggtgacatcaccctttacattctatgcaactgctgctggtattgctgctgcttttatttcagtcttctggtcatttggttacatccgtctctctgaaaggcttagaaaaacatccaaagaacctgctaaggctcctccacgtgctgatgttgttaagagccttaaaaatggcatcgtggttaatattcttgggatgggcgctgctgttctcggcatgcaagctactgttggtgctttggtagcaaaagctctcacaacctctgcagtaccctattatcaggctgctggccaaagccctgtcttggctttagatgttttcctagttcaggcttcagcgaacaccatcctgtcgcatttccttggggtggcgagctccctggagctgctgcgctcggtgtcactgcctccagcagaagccgccgtcccggccccggcccctgcacgggcctgagccatggcccgttgggcaggtcaagaaaaaccttcaatccttggctttggctctagacagttgctatttcttgattgcatgtacaacttgcatcaagaatacatacacatcgatgccttccagttcacctggacgcaacatgttcgcgtaattcccgccgagtgtgagctcttgcatgagcactcgcgaaccacatgtggcgcttgtttgctgtgcaagtgcaagtgagtgcagtgaccggctctcgctcgttctt

SEQ ID NO: 4205 - DNA, 1799 bp, Zea mays
  Clone ID: 700350812_FLI
cgtaaatagtcacatgtcaaatatattagcagcattccttttgttgtacaattagggtaaatgccacagatattttaatagctttcttatcataaaaaactgcatggattcatacagagtgaatatcaacgcggcgttagtgcatggaacttcgatatcgaggatctcaaggctcaagcatcattaattcatgatgacgagcctcctgaaataaaagaagacgaggacattgcaagaaacattgaggttgaaaaggacttgtcttcacggaaccatttgggaaagtcatttgcaaatgagtgcaattccaggcagcgagcctttgtcaccactttaaaatcggatggaaacagccccaccacgaatgaagcttttgattttgattttgattttagcgaggctgccactacaagaagggctgatggacatgaaagaaacataagagagaatgattcattgccctctacagcaaagcgagatccagagtcgaatcattggacaaatgacgttgggcagagacaactgtcttctggtgggagcaatagctcaacagctgaaaggggctatggttttgagagggatgcagttgtgcaaacaatacctgacaaacaaagaagtgaggcgagaaaaacagcaagccttagtggtccactttcactgccaactcgtgcttctgcaaatagtctgtcagctcctattcgatcttcaggaggttttgtagattcatcaggtgacaagtccaaacgaagtgtagtagagattaaaggccgcttttcagttacatctgagaatgtcgatcttgcaaaggttcaggaaggtccacttagtagcctctcacggaaatcaccagagggttcactgctaagaaaatctgccagcactggtgattgtttgattaatactaagctgatgcgtaacgctaatcagctgaaggaattctgcaatagttctgtatcatcttcagtattaattccccaccttaacaaccttgtgcaacagaccatgtttcagcaggatgtaatcatgaacctacttagtaacttgcaacaggatgagaaagttgatagaacacagcctggaatatcttctcaagtccgaacgatggagaatggtaaagtggctgatacagctaactctgagaaggaacggtcattacttgttaaaatttcagaattacagtctaggatgataacactgactgatgaactaattgcagctaagacaaaacatgttcagttgcagcaagagctaaatgctttgtactaccgagaagaaattgaggatgttagggatgaggatatcgaagaaacataatgtatgaattatctgcctctccctgagacagatcaattacccgcctctccctgaggtcaggggagaacaagagaaggaaagcggcagggagaactagcgatggaaagtggcgatgccgcaaatatttgctggatctagagaccagctgcggctctacggaatttgttctttgaaggttgccgtgcccctggcctgctgccatccagtgtgtataaccgtcttagttcgtttgtttttttgtgaccacaagattgaggcgtggtcatgcagctatttcggccatgcctatcattgggagtagctgtagtccgtaggctaccgggtggttatctatgcagaatttcagaagactgcaaaataaaactgtattttatctagcaataggatgtatattggcgcattcgttgatatgtatcatatagggctattcgcaaacatccaaacagagttgtttgcacatatctaataaagtatgcatttactgc

SEQ ID NO: 4206 - DNA, 993 bp, Zea mays
  Clone ID: 700350831_FLI
atccagccgccaccaggtgcagagtctttcgtcatctcttctccggcgaagaacccccagtcgcccaccagatcacttgttaaactttgttgaggggtgatggcggtttctttcgcaaacctcaactccgaggcagggcttaaaaagcttgatgagtaccttctcactcgcagctacatcactggctaccaagcttccaaggatgacttggctgtctacacttcgttttcggctgctccctcgtccaagtatatcaacgtagcaaggtggtttaaccacattgatgcgctcgtgaggctgagcggaattactgcagagggccaaggtgtgaaggttgaatcctcagcagttccttcagccccaactccagatgttgctgaagcacaggccccagttgctgaggaggacgacgacgatgatgttgacctttttggtgaggagaccgaagatgagaagaaggctgctgaagagcgtgctgcagctgccaaggcttctggcaagaagaaagaatctgggaagtcatcagttttacttgatgtgaagccatgggacgatgagactgacatggccaagctcgaggaagctgttaggagtgtccagatggaagggctgctctggggcgcatccaagcttgtcccagttggatatggtatcaagaagctgcaaatcatgatgaccatcgtcgacgaccttgtctctgtcgacactctcattgaggactatctgtgcgctgagccagtgaacgagtacgtgcagagctgcgacatagttgccttcaacaagatctaggcgtgacttccgatcagtccttctcctggggtgctggcgatggtggtggctgggcaatgcaccagcctaatttatccatagctatatgtctgctttgtgtggccagtgatattgccgtgagtatttttggatcctattcgagtcgaatgtaccagtaccagagttaatttgctttaattcgaaacaccgttccagttggaattc

SEQ ID NO: 4207 - DNA, 618 bp, Zea mays
  Clone ID: 700350844_FLI
ccgaaccccaaaccctagcttcgctcgttgcggcggcgagccggcgatggcgaagtctctgcgatccaaacgcgagaagcggcttcggacgttgcgccgggagatagcggagccgttctacgacaagaaggaggccgccaagctcgccgcgcaggccgccgccctagctgctgccccgctcccggtccgcgggcccccgccatcccaggatgccggcagctcccgcgcagctagctcggcctcggctatggatgtggagatgtctgatgcagggaacaacaggtctaagaccttcttgaggccacttggcagcattagcaagaagaaggtgcagcttcatttgaagatcaagaaagacaagagaaaagctaggaagaagggaaagttttcttttaagaagtagaggagtgtatgataaatcatgcagttttgttcccagtttgtaaaacaaacgcactgcagtcatgtcatgtggtgcacctacctaagtccattcgtgggtgacctactattaaatatgttgaaatgggtacgaaaaaaggatagtgctgacctatcagctgtttctgttctgcgggtataaatgtcaagtactcaaattgctgagatttggtttcc

SEQ ID NO: 4208 - DNA, 2459 bp, Zea mays
  Clone ID: 700350848_FLI
gcggtggcgcgcggcgacgcgagggaggccggcgagctgctcgcggcggggcgcgcggacgtgaactacgccggagtggtgtggctcagggcgcgtcgcgtcgcggaggcggagccccgggaggacgccgccgccgaggcgcgggccgtgcacgaggagatccgcgccgacgtctcgccgctcttcctcgcggccggcaacggggacgtcgcgctcgtccgcgccttgctcgcaaagggagcggacgtgaacggcaaggtgttccggggctacccgacgacggccgcggcacgggaagggtgcgcggaggtggcggagctgcttgtgcgtgcgggcgcgtcgcagccggcctgcgaagaggccgtcgtcgaggctgcgttgcagggacaggcggccctcgcggccatcttcatgggctcggacctcgtccgcccccgtgttgccgcccacgcgctcgtgtctgccgcagcgcgcggcttcgtcgacgtggtcgacacgctcatcaagtgtggagctgatccaaacgcgaccgcccgggtgctcctgcggtcgctgaagccatccctgcacgccaacgtcgactgcacggcgctctttgcagcaatcgtgagccgtcaagtcgctgtggtccgccatctgcttcaggccggcgtgaagagggacacgaaggtgaggctgggagcgtggtcctgggacgcgtccaccggcgaggagctgcgcgtcggcgccggactcgccgaaccttacgacgcggtatggtgcgccgtggagtactacgagtccacgggctccatcctacgcatgctcctccgtagcgggttcacgtcgactgccgctcacctcggccggacgctcctccaccacgccatcctatgcggcagcgctggtgccgtccagaccttgctggcgtccggtgcagactcggaagctcccgtgaagacgaccaggagcaacaggtccaggccggttcacctggccgcgcgcctcggccagccggagatcctgcggatgctggctgacaggggctgcgacctgaacgcgagggcggaggctggcgacactgccgccatcatctgctcgcgccacaaacgcgaggactgcctccgagttctcgtgtccgccggtgcagatgtcgcgctgttaaactcggctggcgactcgtcggcctccgtcgcttcctctgggggatggaagaccggcttcgaacgggctgttattggcgcgattcggtgcggggccgtcccacgctccagcgaacggagcgtgttctccccgctgatgttcggcgcgctgtgcggcgacgcgaccgcgatggaagtgctgctctctcaaccagacgtggacgtggacgagcaggattcggacggatgctcgcccataatggctgctgccaagatgggaaacgtcgaggccttccgcgccctcgtattcgccggcgccaacgtgaagctgagcaacaagcgcggggagacggccatcgggctggcgcagcagagcaagaagagagacctcttcgagcaggtcatgctcgagctcgcgctggagaagggcatgcctggaggcttctacgcgcttcactgcgcctcccggcgcggcgacaccgcggcggtgcgccacctcgccagcacgggctgcgacgtcaatatccccgacggtgacggctacaccccgctgatgctcgcggccagggaaggccacgcgggcgtgtgcgagcttctcatctcctacggcgctcgctgcgacctccggacgccgcgcggcgagacggcgctctccctggcgcgagcagcgctggctacggcggcgttcaacaaggccgaagacgtgatcatggacgagatgggccggcaggcggtccttcagggcgcgcgcgtcaggaagcacaccaagggcggacgcgcgaggcctcacggcaagtcgctgcgcatggtcgctgcggcgggcgtgctccggtggggcgggtcaagccggcgcaacgtgatctgccgggaggccgaggtcggtggcagctcggcgttccagcggcacaggcagaggaagggggacgcgtatgagccggggctgttccgcgtggtgactgcgacagggagggaggtgcacttcgtgtgccagggcggtaaggaggccgcggagctgtgggtgaggggcatcagggccgtcaccagggcggcgtttggcaagagaggcaaggagtgagtgacgcatggctgctctctctccgttaggctctgtaggttgcagcgagcgcgtgcttgtaaagagttgtagcgggcgtagagccgtaggggtgctatgtggttcggtgtggggtgcagctgcgctggtcttcagctcgaaggctttggcttgccatgatggtttttggttcaggggcatggtgttgtgttgtgtgtatatagactggctgttgtctcatcgaagttgctttagctaactggtttgtagtgcgtttctatctg

SEQ ID NO: 4209 - DNA, 1195 bp, Zea mays
  Clone ID: 700350851_FLI
agcggagccacaccacaccacaccacccttggtccggcactagcactagctatccagtggagacgaagatggcgacggcgcggtggctgcaggttgccgccatggcggtggcgctgctggcggagtgggcgacggcggcggcgcctcggaagcccgtggacgtgccgttccagaagaactacgtgccgacgtgggcgcaggaccacatccactacatcgacggcgggcgggaggtgcagctgtacctggacaagtccaccggcacgggcttccagacgcggggctcctacctcttcggccacttcagcatgcacatgaagctcgtcggcggcgactccgcgggcaccgtcacggccttctacctgtcgtcgcagaactcggagcacgacgagatcgacttcgagttcctgggcaaccggacgggacagccctacatcctgcagaccaacgtgttcaccggcggcaagggcgaccgcgagcagcggatctacctctggttcgaccccaccaaggagtaccactcctactccgtcctctggaacctctacatgatcgcgttcttcgtggacgacgtgccgatccgggtgttcaagaacacgagcgccgacctgggcgtgcggtacccgttcagccagccgatgaagctctactccagcctgtggaacgccgacgactgggcgacccgcggcgggcgcgagaagacggactggtccaacgcgcccttcgtcgcctcctaccgcggcttccacgtcgacggctgcgaggcctccgcggaggcgcgcttctgcgccacccagggcgcgcgctggtgggaccagccggagttcagggacctcgacgccgcgcagtaccgccgcctggccgacgtcaggcgccgctacaccatctacaactactgcaccgatcgcgaccgctacggcgccgccgtgccgcccgagtgcgcccgcgaccgcgacgtctgatgatgatgcgttgggccggcaagcagcctgtaatgtatgtatggtatggtattgttgtgtgtcaggttcgtcgtcgtgggtctgcagagacacagagagagtccgatccggcgcgtacgtgtgcccgcgtgggcacatgcatacgtacatgcttgtgttgtactgtacgctcgtatctcctcacaccgaaatgaattgcgattaagtatcgaaatttcggcagcttatccatc

SEQ ID NO: 4210 - DNA, 1317 bp, Zea mays
  Clone ID: 700350874_FLI
ttactattttcaccttgtttgccacaaagacagaggcatccctgttacgcatgctaaagggttcacctgatgtttacttaagtggcccaataaagaagtatataacagacaggggtggtaggtttcacttaaggtggggatgcagagaggttctctatgagaaatcacctgatggagagacctatgttaaaggccttctcctcaccaaggctacaagtagagagataatcaaagctgatgcatacgtcgcagcctgtgatgttccgggtatcaaaagattacttccatcagaatggagggaatgggaaatgtttgacaatatctacaagttagatggtgtccctgttgtcactgtccagctccgctacaatggatgggtcactgaacttcaagatttggagaaatcaagacaactgcaaagggcggttgggttggataaccttttgtacacggcggatgcagacttttcctgtttttcggaccttgctctctcatctcctgctgattactacattgaagggcaaggttccctgatccaagctgtgctgactcctggagatccatacatgccattgccaaacgaggagatcattagtaaggttcaaaagcaggttgtagaactgttcccatcttcccggggcttggaagttacatggtccagtgtggtaaagatcggacaatcgctgtaccgtgaggctcctggaaacgacccattcaggcctgatcagaagacgcccgttaaaaacttcttcctctctggatcttacacgaaacaggactacattgacagcatggaaggagcaactctctccggcaggcgaacgtcggcctacatctgcggtgccggggaggagctgctggccctccgaaagaagctactcatcgacgacggcgagaaggcgctggggaacgttcaagtcctgcaggctagctgaacaacccctcctgcactgcagagaagcttggatctttccaaccacacatacatgctggaatggacaaaccaaccaaccattggcttttctcgcttcagggtgctggcgattcccgcagcgacctcctgtgtatcgtatccaatttgagcattagatctgccccccctgcaggcgtttctttcctatccctgatccgagaagcagggtgtagtctaggtggctggcatacgggattacatcaggcagtgtgtaagttcagctggaactcgattggtaattgggatggatgattgatgatatatatatagcacacactgttcttgcgtcttgcaagaaaatatagcaagcgatgatccggcgacacttgctgggagactgtacc

SEQ ID NO: 4211 - DNA, 936 bp, Zea mays
  Clone ID: 700350884_FLI
gggttttgctgctctccgaccccgagctccgaaggccgcagcatcaggcgcggcccccctcgcgtgtgaccgagatggcgctgccgaatcaggggaccgttgattaccccagcttcaagctcgtcatcgtcggcgatggtggaactggtaaaactacatttgtgaagaggcatctcactggagagtttgagaagaaatatgaaccaaccattggtgtggaagttcatccgttggatttcaccactaactgtggtaagatcaggttctactgctgggataccgcagggcaagagaagtttggtggcctcagggatggatactatatccatggccagtgtgcgatcatcatgtttgatgtaacctcaaggcttacttacaagaatgttcctacgtggcatagggacctgtgcagggtctgtgaaaacatccccattgtcctctgcggtaataaggttgatgtgaagaacaggcaggtcaaagccaagcaggttactttccacaggaagaagaatctgcagtactatgaaatttctgccaagagcaactacaactttgagaaacctttcctgtaccttgcaaggaagctggctggtgatccgaaccttcactttgttgaagctgttgctcttaagcctccggaagttaccatcgacatggctatgcagcagcagcatgaagctgagcttgctgcagcagctgcacaacctcttcctgatgacgatgatgatctgattgagtagaaaggatcatgagtcttggacttgagcaggagttgtgccttgcacgatttaagttgttctagggtggactctctcttgagttatcattgtctggatcatttttttctccttggacttgttgcaacttttgagtgtggaaatggattggaatagtcgccatgaatttgctggctactttatacatgtctttgttcat

SEQ ID NO: 4212 - DNA, 2269 bp, Zea mays
  Clone ID: 700350903_FLI
aattggtgtaattcctgccacattagatccaaaccgtttaattgataacaacgcctggtccctttcagcggctgaaagagaccaggcgttgttatcaattggtgtaattcctgccacattagatccaaaccgtttaattgattattcttacctattgaagttatccagcttagctgataatctagcactgctgggccatacagtccttgaggatcgcgctaatgcttcaatagggcttgaaaagggcagtgaacatgctatagacttttggaacatcagtgaaaatgatgaattctgctatggtggggcatgtgaagtccgtgctctgtcttcattacaagctttagcatctagagaaaatcaatcggtgttcatggaatgtttccagtgtgaaaagacagtttgcaaagcttgctgtgctgggaaaggggccttccttttgcttaacacctacagggagttgaagatatatggtgggagtcaaagtggtggctactcagcactcacagatagttttgtgtgcaaatcgtgctgcagtgaaattatcaaacgtgcattgtatgtggattatgtccgggttcttcatagtttgcgcagaaaagatcgttcagagaaagcagcactgagtgctgtgaatcaggtctgccaactggagtacaagaaagcatctgatttatctcaaagtattcaatttggtcagagacaattgaagcagatccttgatggtgaagaatcccttgcagaatttccatatgcaaactttttacaaatggttgaaactgccaatgactctgaaccactgctttcattactggcgccttttggtactggagagtatacgtcttactggaaagctccacaaggtatcacttcagtggaattctcaattgttcttggtggtttatcagatattgcaggagtttccataattgtcagttcttgcggttactcagcatctgactgcccaattgtagagatatgggcgagtaataaaatacaccgagaagatcgtacatttataggaaagtgggatgtacaggatataatatcttcatctccacagcttcgtggacctgaaaaatctagtagattgagtgaagaaccaagacacattaaatttcacttcccaaatcctatccgttgtcgtataatttcaataaaaatgacactttcccatagaggttctcattcaaccaagtttagtgaggagtttgatcttctatcattgaatgatagctcatcttatgaatcgaagccaaccaatttacataattcatttatccatgcaaaaagaattgtagtttttggcagtttgttgagaaaggagatggagcctgacacatcaggggggataatgagaatgaaaagttatttagacagatcaccggccttggggagatttaggatcccagttgaagctgagaggctgagagataatgatcttgttcttgagcaatatctcttagctaattcacctggaatagctggattccggcttgattctttcagtgttataagacctcgtgtgacccattcaccttcttcatcagagttggacatgagggagttttcattgacacgaatggaagatagatttataaacccagcaattctgtatatacaggtcacagttgttaaggagtccggcaagttggttgtagaggaataccgtttaccagaagtaaaagcaaacacgccactatattttgatttcccagatctacaacaggatgcgcgctgtgttatctttagattgcttggtgacgtcactgcctttgtcgacgacatttctgagcttgagaacttaaacttgcggaatcttcctttggcgtcgggactgtctttgtcaaataagatcaagttgtactactatgctgatacatatgagatgggaaagatcggcagtctctcagctgtataatgtatgtgaggtcgtcgtacatgccaacctgggatggtaacccgtccctagaagattgttgtaacctactgtttctacgtgttgttgtggaagtaagagctgctgctacagatacatgatgcttttttttactgcttctgtattcttgcttctttttgcttttgattagatgaccccattttgagggatgtagggattttgcctgtagaatttctggaaattcatctctttttttaatgtagaatagccggaaattcaattcgatcgcagtccacgaaactgccagctacgtttgtcgatacctgtattgggacctggattattgtatagagccaagaacttgcattg

SEQ ID NO: 4213 - DNA, 998 bp, Zea mays
  Clone ID: 700350912_FLI
aagatcagattgagcgtgttactcagattttgggcaggcggacaaagaacaacccctgcctaattggagagcctggtgttggaaagactgctattgctgaggggcttgctcagcgtattgctaattgggatgttcctgaaacaattgaaggaaagaagagcgtcggctccatggacgaggacgatgacagtcccgcctccggctccggtcgccataagaagaagttgcgcctcatcatgggcctccacgacggatcagcaaaggttcaaacaggaatatctctgaacaccttgggctctctaggctatgagatagatcatgtatggagacggagaatagcagtgtgtcattctaaactgggtgatcagccaaaaagatcccatggataatcattaacgattatatggttgtttctaatttaacagagggagggaaccagcaaaggcactccatgggggaatggttgtggctagatttattaatggtgttgcggctgcaagcgtcgtgtggcatctgtcgcgacctagaggactagaggcatagaccgtcatctaattttgggctatcgtcaacatcttgagagcatcggggagtggtggtcaacccaactcagcaggccgctgccgatgcaatgccaccacaacctcgcggtgtcgctgtgctttctgtgatgctatttggctggcgcacagagttcagtggcgagaaggttggatatgcattatgctaagctaaaaagactgaggcaggcgcagcaaagcgtgcctcttgtcttatgatattaacagtggtagtgttctttttcttccatctcttatctttctcttgtccatctatctctcactcttctttatgaaaaaaatatgctcagtcgattttcatcctagccttgatgatttatgtagctgcagcaagcttgtttttaatctgtattgcctctcaaccgaacattattgttgttcagttatggtttatggaagatgctcatcattggagat

SEQ ID NO: 4214 - DNA, 2059 bp, Zea mays
  Clone ID: 700350914_FLI
gcaaggagcgagagaatgaagtcgtcgctgcggaagctgcggggcttcgcgctgcagcgccaggagcagcgggtggaccgggaccgcggccggggccacgccgccgccgccgccacggcggcggacgagctcctcgcggctgctcaggatatggcagatatgagaagctgttacgataacttgctttctgttgctgcagcaattgcaaatagtgcatatgagttctctgaagcacttcaagaaatgggaacttgtctgcttaaaagagttacgccaaataaggatggaataaatgataaagttttgctgttgcttgggaaatcacaatttgaacttcggaaacttttagatagttatcgtgtgcatgttcttaacaccatcaccactccatcgctgtcgcttcttaatgaacttcaaactgtggaggaaatgaagcaccaatgcgatgaaaaaaaagaattgtatgaattcatggtaaacgcgcagaaagaaaagggaaggtctaagaatgctaaaggtgataatggatcatcagagcaattgaaacaagctcaggaagattatcaagaggaagcaactctttttctattccggttgaagtcattgaagcaaggacagttccgaagtctttttacacaagctgctcggcatcatgctgcacagctaaatttgttccgaaagggagtcaagtcccttgaggctgtagagccacatgttaggctcgctgctgagcagcaacacattgatcatcagttcagcgcacttgaggaagaggattaccttgttgaggatgaaaatgatgacgattacaatggcagtcatgatggagagttatcttttgattatggagaaaataaggaagttgaggaatctggtaatgcttctaggaatcatacagaggttttttttaacagaagcaaagaagagtattcttctgttccacatgaaagacaaagaatcgtaagtcagtcagcaccactttttcctgagaaaaagctcaatacagaagagagaataaaagatttgcggcgttctgcaacaaggaagttgaatacttatgttttgcctactccaaacgacgttggagctacttctcagagagcatcaggaaatcctacttctgaacctctcgagagtaaaggtgccttccattcatctccactccactcatctgcagacataagagatttgggagacaataatctacctagtcctacaagattgtctaacgtacagtctgtgctgaaagatagcaataccaataaaacagaaacaaggaaagtactcccagtgggtgatctggctttacctagctatcatgacctgaagacttctgataacaaaaaagtgaaaagagggtcattttctggtccaatagcttccagaccacggtcaacagagaacattgatgttatttctgcagcgcctaggcatagctcagcacatcagccagtgcacatgagagtatcccccggcaactcgccgccacccatttcctcaccgaagatcaaggaacttcatgagcttcctcgaccacctgttaatacatcaaaaaatatagcattccccagtttagttgcccactccgccccattggcaccaaatcctgcatctttgactcccaaagttcaagatcattttaggacaaaacaaacgctccaaagaactgcttcacctttaccaactccaccacctggatctatagcccgcagtttttctataccttctaggggtatttcagacagtaaagagacagaagatcaacacaagggagctgccagaatgagtctttcttctcttccttcagcacaaacattcttggaagatcgtcagccattgtcagcagctgctggatcggtcagcaaaacataggagtattctctattatcattatcaagcagctcgccgagccctcttcctgaaagaatgttgtacatattagcatttgaactctggccagtatcgccgaagaagttggtgtttcgcgtgccctttggttggttaagatgtagcctgtgcaaataatgggttctgcggaaataaaatccccatttttctc

SEQ ID NO: 4215 - DNA, 1459 bp, Zea mays
  Clone ID: 700350951_FLI
ggaagccacaaccaaactttgatcaggtcaaaccagcattgccagcactacagcaccttattcactctcaggatgaggaggtcctaactgatgcctgctgggcgctctcatacttgtctgatgggactaatgataaaatccaagctgttattgaatctggcgtgttccctcgccttgtggaacttctgatgcatccttcggcctctgtactcattccagctcttcgcacggtgggtaacattgtaactggggatgacatgcagactcagtgtgtcattgacaatcaagcacttccatgccttttgaatcttctgactaccaaccacaagaaaagcatcaagaaagaagcatgctggacgatctcaaacatcacagctggtaacaaggagcagattcaggctgtgatcaatgcaaatataattgcacctctggtgcaactcctgcaaactgctgaatttgacatcaagaaagaagcagcctgggcaatttcaaatgccacttctggtggcacacatgatcagatcaagtaccttgttgcccagggttgcattaagccactctgtgatctgcttgtttgcccggatcccagaatcgtaacagtttgcttggagggtctcgagaacatcctgaaggttggcgaggcagagaaaaaccttggtgcaggtgatgtcaatgtctatgcacagatgattgatgatgctgagggcctggacaagattgagaacctgcagagccatgacaacaccgagatatatgagaaggctgtgaagatgctggaatcctactggctggaggaggaagatgatgccatgccctcaggcgacaatccccagaatggcttcaactttgggaaccagccctctgttccatcaggtggattcaactttggctgaagatgcccatttggaatggccgctgtgccattatgccttggctagtgctctgggctagtcagaggtgtggggtagcggcgtcaaccaagtcatggttgagtcccattggtctggtctcagggagttgtcatgtcagtcccagtcagcagggtcagtccttgggctgcattaccagtggtgcagcttggtcggtggtcagtcttgaaggtcagccggttggatcatttgggctcttgctcccaccagcaccacctctggtgggaggcatcaggcatggagtcgcgggtgttgtcgggagttgggttttgcctcctatacagcataaatgaattatattgttttacctgttggtagaaagaaccttgaaagatagggaacgtgtcgttttttgtcaaagcggttcctgtgctgtataacatgttgcatgagtattggcgcaacttataagacaatgtcaaatgggtttttgggagtcccattctggtttcttgagtcttcttcattggtctattgtgtaacatgtacacaggtttgtggttcgtcttgtcttgtctgttgtatttgcc

SEQ ID NO: 4216 - DNA, 884 bp, Zea mays; identical to SEQ ID NO: 1550
  Clone ID: 700350978_FLI

SEQ ID NO: 4217 - DNA, 1245 bp, Zea mays
  Clone ID: 700350993_FLI
caagagcgctcccctaccctttttcccctcctcgcagtcgcagcagcagcgcacaccagaaaagcttttctgcctcctctccaccttgcttcccgcaactaccacgcacgccgaatacttggcaagaagaaaccctttctcgtcccgttgaactggcgccgtcgactccaccggggcacgctgtcgcgggttgctctccggtcctcgttctccttgctgctgaatccgctagtggagatcgacctgatttctcctgtcctgtcaattggattttagcccggctttcaaggtagagaaagaagctgtctggtccatcatggccttcccaactccagcttctgtttttgttgacgagaaccaacagataaatagaggtaagagggctgctggatcaaggaccaaagggctgaagccgtcggagaatcctgggaatctagagaggagagctcttcaggatttgtccaactttgccaaaggcacaggtttgaagggcacttccaccctgaaagagaggtcccagcgcaaggcttttagtaatgtgaccaacactattaaaggcactgctttgaaggacaggcccatcacgaaagagaaatctacccagaaacagaggtcacagaacccagtgaaaatattatctgatgaagatatcaaactgtgtcatgagtgggctaaggatggggtggaagggtttcactcaacacaaaatgattctcagaaggttgataaggatctgctagccaaacgtgtcaagaagaaagtggcgtcagtaaactcagccttgcgtggttggtcagatacggtatttgattctctgatgtttccagctagggaggttttatatgaaccaaaagtgctggagctggaacctgagattctccgggacatcagttgggatctccctagttcagtagatggtaaagcaaagctggatgaagactgtcttgcctatgatcagcttgaccagtacccatctttggagaacaatccagttacatttgagctgagagacgagccagcgatcccgcagctgggagtgcattgaagaatcccgcagctctgcttgctgctttgctctagaatgctaggtcttgaacccctgatgtttttctccagctatgttctggtggatgtgggtggtataggatttcacagtttgatcactagtacctgatccagcggaagcgacagcgcttcctgtttgttatgcttgctgatgggcgatggttgtggaactgctgatgg

SEQ ID NO: 4218 - DNA, 1526 bp, Zea mays
  Clone ID: 700351006_FLI
aagactgatgagaaaggctgtgcttctacacttaaagctttcattgattatatatctttgagggaaactgaaaattttcgatcccgaaaggaggaaaataagaattctatcacattaacaactattcatcagtcaaaaggtttggagtgggatgttgtgtttattgtgcaggtatttcttcactcttcaggacgagcttgcatatacaaatattctgccatatatgtagtgttaggcagacagtgtggtagcgtctggcatctaattgctgattaagcagcttgtcctctgtgatctggctgaagaaacaattcagtactgtctggccacatgtgtgtttgctagagaggcctggaccatcctcttattcatcaaattgagatggccgactctctcacctcatccaaatgacagaatcctacactggtggagtcaatctgttaaggcaaatgattcggaaattcctttgttgcatgagtacaatggtagtgtgaaagaagctggaagcacactggaggaggagaggaggttactctatgttgcaatgacacgagctcggaaaaagctgtacatcttgcatgttacaattgattctaaccgtcagcttctgcaaccatcacgttttctcagggaaattcctgatcaccttcttgaggtgcagggcgaagagcctctgagaaaaatgcctgaacgaccttcaggtgatgttccttttgatgactctgaagtggatacatcaatcggaaagccaattatgggaccaaacgaagcttcatcttatccagaacaggctcaggcatgccttgctaatgatttcttgagaaggtttgatattgatgatagatcggtagtctcacatatatttcatcattggggcaagaagcaggcatttcaaaatccaaagagattacttgaaaagatcagttttgtaattgatgaacgcctacgtggtaaaggatacaagcgcaaggatgtcttgcgaaagctgaaatcgttcctaagcggtgatgaagcattgggctacgcacaatatgttatcaagtgggaacagattcctatagaaaagcggaatcatttgataagagaaaggaacatttccaaaagcagaggattgagaactctatgggttcgtcagaacccacagccaagcagatatcgtaccttcgaagcttggggtgcaccatcactccgacttctcgcttacacgcatcacatcttatcgaaaagtacaaatcgctctaacttggttgaagaaagtacaaatcacaacattttattgttttttatgtacatgccgtccatactacaaatgtagtagtgttgtgtactggatacatcaaggttgtacggcagctccgatcatatctattgtctgttcttcttagccatattcctgtagtacatgctgcattgttgtgacaccaagagtttttgcttctcttgggccttggcagtggtattggctaggcattggctaaccttgtactccattcctacttatatgaactccattgtgtttattattc

SEQ ID NO: 4219 - DNA, 1410 bp, Zea mays
  Clone ID: 700351016_FLI
gatgaagaagcagttcttcgccgagatatatacgaccgcccacctactatgaattgggggaaaggtcgtgtcaccttgcttggtgattctgtccatgctatgcagccaaatctgggccaaggtggctgcatggctattgaggatggttaccagctggctgtagagctagagaatgcctggcaagagagtgtcaaaactgaaactcctatagacatagtttcctccttgaggcgctacgagaaagagagaaggctgcgtgttgctattatacatggactggcaagaatggcagcaatcatggctaccacctatagaccgtacttgggtgttggtctagggcctttatcgtttttgaccaagttgcggataccacaccctggaagagtcggtggcagattcttcatcaagtatggaatgcctacgatgttgagctgggtgcttggtggcaacagctcaaaactagaaggaagacttttaagctgccgactttctgacaaggcaaatgaccagctttatcaatggtttgaggatgatgacgcactggaagaagctatgggtggagaatggtacctcatcgcaacaagtgaaggaaactgcaatagcttgcagcccattcatttaattagggatgagcagaggtcactctttgttggaagccggtcagatcctaatgattcagcttcttccctatcattgtcctctccacagatatcagaaagacatgctactatcacatgcaagaataaagctttctatctgactgatctcggaagcgaacatggtacctggattaccgacaatgaaggtagacgttaccgcgtgccaccaaacttcccagttcgtttccatccctccgatgtcattgagtttggttccgataagaaggctatgttccgggtgaaggtgctgaacacgctcccgtatgaatctgcaagaagtgggaatcggcagcaacagcaagtccttcaggcagcatgaatggagacactggctaccaccactatcatcagccacactgtactgtacagcatccggtaaagacacaacactgcatcacggaaaggatacactcgttctcgaatatttgtcgtctgctagttcaattttaaactaaaacgtgacaaatgaaaaaacgaaggaagtagaagatatgtcaaaacacatgcaatttttgcatccatgaagatgccaaacaggatcttgaatactagcacctagcggattgaaataatgaagttgcagttctgcgtgaactggattgtacgatagggatagacaatttagctgttgtcggactgtgtacatcgttgtaccatcaccggaaatattgtacaccgagaagccatattgtaattacggcatgagaacagtaacactttgatcatgtaatacagtatatagttgtttagc

SEQ ID NO: 4220 - DNA, 2183 bp, Zea mays
  Clone ID: 700351026_FLI
gatgaagcctggtccggattccattggaatcatcgctgtttcgcacaattgtagtggcgtagcagcccgagcttgcggcctagtgagccttgagcccacaaaggtcgcggagatcctcaaggatcgcccttcttggtaccgcgattgtcggtgtgtggatattctccatgttatccctacgggtaatggtggaactatcgagcttatctacatgcagacttacgcaccgacaactttggcggcaccgcgcgacttttggactctccgatacactagtggtcttgaggatggcagtcttgtgatctgtgagagatcactgacacaatcgactggaggcccatcaggacccaacactccaaattttgtaagagccgaagtgcttcctagtggctatctaattcgaccctgtgagggaggtggctccatgattcacattgtggatcatgttgatttagatgcttggagtgtgcctgaggtccttagaccactttatgaatccccaaagattcttgcacagaaaacaactattgctgcactgcgtcacattaggcaaattgcgcatgaatcgagtggggaaatgccctatggagggggccgacagccagcagttttgagaacatttagccagaggcttagcaggggtttcaatgatgctgtcaatgggtttccagatgacggttggtcactgatgagcagtgacggtgctgaggatgttactattgctatcaactcttctccaaacaaacttattggtcctcatgtcaactcttcccagctgtttactgcgatcggaggtggcatcctgtgtgctaaggcatcaatgctgcttcagaatgtgccacctgccctactagtacgatttctgagggagcatcgctccgaatgggctgatcctggtgttgatgcttattctgccgctgctctgagggctagtccatatgcagttcctggcttgcgtgctagtgggtttatgggcagccaggttattctgccgcttgcacataccttagagcatgaagagttcttggaggttattaggcttgagggacacagcctctgccatgacgaagttgttctgtcacgagatatgtatcttctgcagttgtgcagcggtgtggatgaaaatgcagctggtgcatgtgcacagcttgtgtttgcacccatcgatgaatcttttgccgacgatgcgccactgctaccctcaggcttccgtgtcattccactggatgcaaagacggatccaccatcaggcacacgcacacttgaccttgcatctaccctcgaggttggatctggtgggacaacgcgtgcttcgagtgacgcctccagcacctgcaacacaagatcagtgctgaccattgctttccagttctcatatgaaaatcacctacgagagagcgtcgcagccatggccaggcaatacgtcaggaccgtggtggcatcggtgcagagggtagccatggcaatagctccttcgcgcattggtggacagcttgaaatgaagcaaactccaggatctcctgaggcacacacgctggcaaggtggatcggcaggagctacaggttccacactggagccgaactcctccgcacggacacccaatgcacggatgcttccttgaaagcgctgtggcaacactcggactcgatcatgtgctgttccctgaaggctgctcccgtgttcacctttgccaaccaagccggcctggacatgctggagacgacgctgattgctctccaggacatctcccttgagaagatccttgacgacgatggcaggaaggcgctctgcaccgagtaccctaagattatgcaacagggcttcgcgtacctccccggtggcgtgtgtgtgtcgagcatggggcggccggtgtcgtacgagcaggcggtggcgtggaaggtcctgagcgacgacgacaccccgcactgccttgccttcatgttcgtgaactggtccttcgtgtgagaacccggtccccctagtagtagagccaagttgcctagcgtttgcggctctgttgtttgaactctgtaccccatgtaccgtcgcttttgcctgtgtccaggcaacctatgaaacacacctttgtagttgttcatcacccccgtggaacaaacagctttgtactagttgttcgtcttcgcttgcttgctatcttatgatggatcctggtttgctcctg

SEQ ID NO: 4221 - DNA, 655 bp, Zea mays
  Clone ID: 700351051_FLI
cgccttcatgtcactaatcgacaagggcgtctcgaatggaaggagcccatccaacccaacgaagaagcaaaatccccaatctctgcgccgccgccgttctgtgtcgttcttcgcccgccgtcgttccgtgtcgttcttagcccgccgccgtttgtagtcgcggcttcatcgtcgcgtaccgatccccaccgcccccactgccaccagaggtgtcgacatgtctcagaacaacccctcccagcttctcccctcagagctgatcgaccggtgcatcgggtccaagatctgggtgatcatgaagggggacaaggagctcgttggcaccctctgcggctttgatgtctacgtcaatatggtgctggaggacgtcaccgagtatgaatacactgctgaagggcgccgtattacaaaacttgaccagatcctcctgaacggcaacaacatagccattttggttcctggtggttcaccacctgatgtgtaatgaacttttgcttcccagagtatcattcgtggtgaaggcagccccgtgaactttgcaccttatattttttaatcattggatgtttcctcatctcggatgtgtttctcctgttcatgattataccgaagtttattgttaactctgtcagcatggaatctctcctctgtattg

SEQ ID NO: 4222 - DNA, 581 bp, Zea mays
  Clone ID: 700351058_FLI
attgacctttgcttcgccaatgaggatgaagctagagaggttatagggggaggtctggaatcagatccagaggaggcgcttgcgttcttgggcaagtattgcaaatgggctgtggtcacacttgcttcaaagggatgcatggcaaagcatggcaaacaggtcgttcaagtgccggccatcggggagagcaacgcggtggacacaactggagcgggcgacctgttcgcgagcgggttcctgtacgggctggtgaaggggttgccgctggaggagtgctgcatggttggggcatgcagcggcgggtcggtgacgcgggcgctcggcggggaggtgcggccggagaactggcagtggatgtacaagcagatgcacgccaggggcatgctgctccctgagctcaagaactgaactaaccatgctgcagctggtgttagctgcatgctgcaccagctgttgtatctctcagcactcctacctttcccctgctagaatattgaaccactcctgagattgaaccaatcagatggagtgtattgataattgcacttcatatgtgtgctagtgtactattcccttggtct

SEQ ID NO: 4223 - DNA, 1176 bp, Zea mays
  Clone ID: 700351094_FLI
cacgcctccccatccacctgtcactcttaccgccagccccacatcacggagcatcccccccttaataacagcaaactaccacacccatgtccacctccgtctccgtctccgtctccgtctccgtctccgccgccgccgttgccgctctcgtcccacccctcaccggccgccggtcgccgccggcatctcgcgtaccgcagatttgccgcagaagaatcagatccaaaccccgtatcttctcttcttccccctccttccccattgtccccgccgctgccatggccaccggcggcgccgcccccaccgctttcgatgccgggtccaagaagaagttgctcatctttgactccgaggaggatctctcggtttctctggcgaagtacactgcggagctgtcggagaagttcgcggccgagaggggtgcctttaccgccgtgctctctggcggatccctcatcgaggcactcaggaagctgacggagccgccgtacctggattcagtggactggagcaagtggcacgtcttctgggtggatgagagggtcgtgcccaaggaccatgtggatagcaactacaagctcgcctatgatgggtttctctccaaggtgccgattcctcctggacaagtttatgctataaacgatgcgttgtcagctgaaggagcggcagacgactacgaagcgtgcttgaagcagcttgttaagaacggtgtgatttctatgtcagcggcgactggatttcctaggtttgatctccagcttctgggaatgggacctgatggccacattgcgtctctcttccctggccaccctcttgttaacgagaaagagaggtgggtgacatacattaaggattctccaaagccacctccagagagaatcacattcacgtttccagtaatcaactcatccgcatacgttgcgatggtggtgactggagctggaaaggccgcagcggtgcagaaggcgctctcagacaagcaaacctcgtcagacctgctgcctgttgagatggctgtgctgcaagatggagaattcacctggttcactgataaggcagcggtgtccttgctgcagaacaagtagagtcccatggtaaccttggctcgaagccattttagctcataaaataaaagatccaggggcctgcgtgcatagctgcattcgtcctccagga

SEQ ID NO: 4224 - DNA, 1143 bp, Zea mays
  Clone ID: 700351139_FLI
gggggagctgctccatggcaagaaaggtggccatctccactgggacactcgctacaagatcgccgtcgaggccgccaaggggctcagctacctgcaccacgattgctcgccgccgatcctgcaccgcgatgttaaatcgaacaacatcctgcttgattccgatttcgaagcacacgttgctgatttcgggctcgccaagttcttgcaggactctggcgcatcacagtgtatgtctgccattgctggctcctatggctatattgccccagagtacgcatacaccctcaaggtggacgagaagagcgacgtgtacagcttcggcgtggtgctcctggagctggtaacgggaaagaagccggtaggcgagttcggggacggcgtggacatcgtccactgggtcaggtcgacgacggcgggcgcgagcaaggagcaggtggtcaaggtcatggaccccaggctgtcgagcgtgccggtgcacgaggtggcgcacgtgttctgcgtcgcgctcctctgcgtggaggagcagagcgtgcagcgccccacgatgcgggaggtggtgcagatgctcggcgagctccccaagccagccgctgccgctgcagctgcagggcaaggagacgaggttcccggcagcggcgacggcgacgaatgttccgccgcgccgtcgggtgctccggcagctgatgaatctgttgaagcgccgcatggcgaagccaccaaagaaccgagctcacagtcttcgccgaccactgatctcatcagcatctgagagctgtgtcgagcttgtttttttttcttctcgttgctatgtttccttccttctccttgcgaagttcagatgtttggatgtttctagattattagggtttggtgttttaggtctcacctgcacttagggtggtctctgagattcagacatcttgtgttcatccatcttcatttaggtaggccccgggattcagacatcttgtgttcatccatcttgtgttcatgcatcttagcctcacttaggacactgctgtgtacagtagtacatatcaagctccctaaatctccattttgctgtcagaactgaaggaccatttagggggggattaaggagcctaggattatggagcagtcaaggtcgttaatgttgctgtt

SEQ ID NO: 4225 - DNA, 2048 bp, Zea mays
  Clone ID: 700351146_FLI
ggcgtcttctccggcttccattttcgcgaggaggcgaggaggacagagacgccgccgccgcttccgcttcgacctcgacctcggcttcggcttccacgagaattctagcaagtcttctggagaatataatccacatctgtttattttgctgcattttggtatggacgaatctgcctgtagatccactgccccagttgggtttcttagaagaggttcgggcatttccttgagaaatcaaagcaatgaggataggtcaaatcagtacaacaagcagccagggaagagttcaaatcccaatcctgtaaaattactgttcactgaaaataaagagaaaccaaggtattttcaagggacatttcattcatcaggctccagggcctcatctgtaagctcttcaaaagctcctgctagaaaatactgcgacgagagacagaaacagccctttttggcagagacagacattgctgaaagcagtaacagaagaactgaggttagacgcctacaaagtggcaagaaagcttctgtatttggtgatgggcatccatacacacagaagagtatctcagaagcttcatcatcctcaacaattactggaggcttgccagaagagcatgatcttggagctttatatttttctggttcttcaggtagttctgcacatccagttaatcccaggaatgctgcattgaatgcttcggcacatatgcaaaaggataaagaagaaatgagttcaggtagacctcaaggtgctcccacttttgttcgtcggcatactttacctcaaagtttttccactggtgtcaagtcaccaactgcccctggcactggagcacagagacgtggcctcaaaaatcttggttgcacttcaatatctgatgttctgccttcaggatgctcttcatctgattctgctcgtgataggagaatcgaagttacaaagaagagaacttctggtgcaggaagttcttcaagatcaaggataagtgaacaatctaatttcagtcagccacgtgctagttatcctggcagtactggtcctagagctagagctgctgaacaatcagcttctcaacaaacagcaaggaccaatagccgaaatattccggatcatacagattcaataaggactagacgaccttttactctgcgtgccagggagaggatgatgccaggtgaaagggaggacagtgtatttgctctgcatgagactgttgcaagcattcatccagaatgcggacattttcacatggatggtactcccccagagagattaggaagacccttttatgcagaactacctcatgcaatttattcatctaatcgtcaaggatcaagtagtcagacagcaaggagaagatctacatctcgtactgaagaaagccctcaacggatgtttcatggtatgttttgggagagagatggctacagggggataaacatggaaggaattgcacaggcgttgctagcattggataggattgaacatgatgttgaattgacttatgagcaactgcttctgctagaaactaatctgctcttaagtggccttgatttgcacgatcaacatgaagatatgagattggatatcgacaatatgtcttatgaggaactgcttgctttggaagagcatattggctcagtgactactgcccttactgaagagcaatttaccaagtgtgtaaaccaaagtgtgtatgaagcaagaaattcttatagagatgtaagcaagatcgcagcagatgatgtgaaatgtagcgtatgtcaggaggaatacgttgatggtgaagagattggtacaatgcaatgtgaacatcagtaccatgtgcgctgcattcacgaatggctcaggcagaagaattggtgtccaatatgcaaagcttcagctataccttcagagatgaccaagggagacgcatgaatcatggcccaaacttgtaaatagcgtggatttattattagacattgtagatgctgacgcagttcaccccaatatgtggatacgatagtctctcccgaacggtcgaacccctggaaccttttgttactgc

SEQ ID NO: 4226 - DNA, 669 bp, Zea mays
  Clone ID: 700351156_FLI
agcatggtaaaaaggttgtgtgtggaactccaagtggagcgctcttattatattcatggggatactttaatgattgcagtgaccgctttctcggacacacgcagtctgtggatacaatgctgaagctggatgaagacactttggtttctggatcatcagatggtgtgatcagattagtgggcatcctacctaataggataaaacagccacttgctgaacattcagaataccccattgaggcccttgctttgtcaaacgacaagaaatatttaggcagcatctcacatgataaaatgctgaagctctgggacatggaagaactcttgagtggcccacaggtagccaatggtgatgaacctgctgaagctggtagtgatgacaacgatgacgatagcgatgatgatgtgatggatgtagacatggcggcaacctcttctaaaggttcaaggagtaaaaaggcaggtaaaggacagagttcgagtcggccggcatcggatttctttgcagatctatagtcgtcaagtttcctaagttagaagctgtgtactctcctctctggtttttttttgggttactgtacgcgagtgcgagtgagcaactttgaccgccggtgcaaggcatgccaaatgttgttttatttataagtatattgctgatggaatttatcag

SEQ ID NO: 4227 - DNA, 1287 bp, Zea mays
  Clone ID: 700351208_FLI
gttaatgttccaccgttcgggtgtgctgattgttaaggcacagatctgggacaccgcaggccaggaaatatgacgagagacgggcgttgacagctaaacactccgtctgttgaatgttgatcccttcaacatttcccctattttaacatttattattattattaaccaatcgaatcaactgcacctcttgaccgcttctactccaccgcctgctgctccgctagtcttcttcaaccttgtgatgcttcagccccccgcccctggtattgatcgctcagcacaaagcgtcgtacttggataggagaaaacaattctagacagtcgacagagagagagaaaaaaaaaatagagaactgagagatcgaggacaaagggggagaggagatgtctcggggcggtagccacggggagctgggccagaggatcgattacgtcttcaaggtggtgctcatcggtgactccgctgtgggcaagtcgcagctgctcgcgcgcttcgcccgcaaccagttcaacctcgactccaaggccaccatcggagtcgagttccagacccgcaccctcaacatcgacgcccgcaacgtcaaggcacagatctgggacaccgcaggccaggaaaggtaccgagcagtaacaagtgcctactacaggggtgcagttggagctatgttagtatatgacataaccaagcgccagtcctttgatcatgtggctaggtggcttgaggaactacgtggccatgctgataagaacattgttatcatgcttatgggtaacaaatctgatctgggcacacttcgtgccgtcccaattgaggatgcgaaggagtttgctgagcgcgagaacctcttcttcatggagacctctgcacttgaggctatcaacgttgaaaacgctttcatgactgtactgactgagatttaccggaccgtcagcaagaaaaaccttgttgccaatgaggagcctgattctagcggaaactcgagtttactgaaaggaacaaagattgttgtccctggtcaagagccaccctctacattgaaagcaacatgttgtatgtcctcttaagcatgatattgtaccataataccatgttctttctggtcgtcggggtttctgattacccctgacatatctgcgtgatgaatggctgtgaatcttggaggtaaagatgagaaggtctacaggaacagttaactcatatacgctaactatctggaaacagccttctttttgtatctgattttgtgatatagtacagtcattaagaagccttctcttcaaactctt

SEQ ID NO: 4228 - DNA, 701 bp, Zea mays
  Clone ID: 700351221_FLI
ctcccagaagtcacgcaccaaacaccaccaccaaagaaggcgagaacgctccccttcccctccagtctccaggaccgtctcctcgcctgctcatctaccgctgctccccttctctgggctcggagaatcggagagaagcgcgcgcgaccatggcgtccagcgcctctcggttcatcaagtgcgtcacggtcggcgacggtgccgtgggcaagacatgtatgctcatctgctacaccagcaacaagttccccactgactacatacctacggtgttcgacaatttcagtgcaaatgtagttgtggatggcaccactgtgaatttgggcctttgggataccgctgggcaggaagattacaaccgcctgaggcctctaagctaccgaggtgcagatgttttcgtgcttgcattctcacttgtgagccgagctagctatgagaatatcatgaagaagtggataccagagcttcaacattatgcacctggggtgcccgttgttttggcaggcacaaaattggatcttcgtgaagacaagcactacttgatggaccatcctggattggtgcctgttaccactgcacagggggaggaacttcgtagacaaattggtgctatgtattacattgaatgcagttcaaagacacagcagaatgtcaaagctgtgttcgatgctgccatcaaggtagtaatccagcctccaact

SEQ ID NO: 4229 - DNA, 1921 bp, Zea mays
  Clone ID: 700351224_FLI
gcaggagcaaaaagatttggtctggaccagattttaaacgactctgctggtcgtcgaatctcaatccgccgtgcgaattaactgaatagggtttcgttggcgatggcgagctcgtggacgcttcctgaccacccgaagctccccaaggggaagccggtggctgtcgtcgtgctggacggatggggcgaggccaaccccgaccagtacaactgcatccatgtcgctcagactcctgtcatggactcgttaaagaatggtgctcctgagaaatggagactagtgaaggctcatggaacagctgtgggtctcccatctgatgatgacatgggcaacagtgaagttggtcacaatgcacttggtgctggtcggattttcgcccaaggtgctaagcttgttgatcaagctcttgcctcaggaaagatttatgatggagatgggttcaactacatcaaagaatcttttgaaaatggtactcttcaccttattgggttgttgagtgatggtggtgtccactcccgccttgaccaactacagttacttctgaaaggtgtcagtgagagaggagcaaaaaaaattcgtgtgcacatccttaccgatgggcgtgacgttttggatggaagcagcgttggtttcgtggagaccctagagaatgatcttttggagcttcgaggcaagggtattgatgcacagattgcatctggtggtggaaggatgtatgttaccatggaccgttatgagaatgactgggatgtggttaaacgtggctgggatgctcaggtgctcggagaagcaccctacaaattcaaaagtgcacttgaggctgtgaaaacactgagagcacagcccaaggctaatgatcaatacttgcccccatttgtgatagttgatgacagcggcaaagctgttggacctgtattagatggtgatgcagttgtcactatcaacttccgggctgatcgcatggttatgcttgcgaaagcactagagtatgcagattttaacaactttgaccgtgtacgtgtccccaaaattcgatatgctgggatgcttcagtatgatggtgagttgaagcttccaagtcgctaccttgtttccccaccagagatagatagaacatctggggagtacttggtgaagaatggcatccgcacctttgcttgcagtgagacagtgaaatttggccatgtcacatttttctggaacggcaaccgctcgggatactttgatgaaactaaggaagagtatgtagaagttcctagtgacagtggtattacattcaatgttgcacccaagatgaaggcgcttcaaattgctgagaaagctagggacgctctcctaagtggaaagtttgaccaggtacgtgtcaacctgccaaatggtgacatggttggtcacactggggatattgaggccaccgttgttgcttgcaaggcagctgatgaagctgttaagatcattctggatgctgtcgagcaagttggtggtatttaccttgttactgccgatcatggcaatgctgaggatatggtgaaaaggaacaaatctggcaagccgttgctcgacaagaatggtggtatccagattctaacctcgcatacccttcagccggtgccggttgccattggaggccctggtcttcaccccggagtgaaattccggaacgacattcaaatccctgggctcgccaatgtagccgcaactgtgatgaacctccatggatttgaggcccctgctgactacgagcaaaccctaattgaagtggctgacaactaaatactggccagctatgtccaattttggttctatagttttgagaagggatatggccatgccattcaataatttctgtttgcaagcacggtgctcaaactcaccaaaacattgagaaacgccttttgacttgcatttagatgctctattt

SEQ ID NO: 4230 - DNA, 513 bp, Zea mays
  Clone ID: 700351225_FLI
ggatgtttatgagtgcacatttgttcagtctgagataactgacctgccattcttcgcatcaagagtcaagttgggcaagaatggtgttgagtccgtcatttctgccgacctccagggaatgactgagtatgaggccaaggcacttgaggcgctgaaggccgagttgaaggcaagcattgagaagggtattgctttcgtgaacaaacagcgggaagctgctgcatctgtttgaggcgaagcaagtgaaacagaaggaacaatcgtcttgaatggcttttaagttttgcagcctagagttttttgttgtcggcatgtaggaagatgttccagatggttgctgtttgtttctaattgctacatgggggctgaacatccatcccccaagttatcgccggtttctgaaccaggccttatttacacataaattttgccccttctgtatcgtggttctgtttgtagcttgttggagtctacaaactacaaagaggctaataaaccacttttattggaagt

SEQ ID NO: 4231 - DNA, 393 bp, Zea mays
  Clone ID: 700351238_FLI
ggaaggatggcgggaaagttataatcggtgacattatgattgaccactctgggcctatgctggaaactcagctcctgatggacatcggcatgatgaccatgacaaaaggacgacagcacgacgaaaaagaatggcgtcagctcttcaccaaagcagggttcagcgaatacaagatcctgaaggaatttggacctcgtgttgccttcgaagtctatccgtgagatatatatttacatacatatgtatgcatatgggttgcgggctttggcatgaccatgtcataaataaatgaagagggtgggtgtgctttacagtattcatggatggccatggatctgagcgcatgcataatgtaattggatgctttcttaatattatcgttgggttgtatgt

SEQ ID NO: 4232 - DNA, 626 bp, Zea mays
  Clone ID: 700351266_FLI
ggatagaagcttggagcctcgtgtctccgattttggcctcgcgaggctgcttgtagacagtgctgcccacgttaccaccgtcgtcgcgggcacctttggatacctagcaccagagtacttgcaaaacgggcatgctactgagaaatcagacgtgtatagctttggagtgcttatgctggagctagtgaccggaaagaggccgaccgattcttgcttcatcaagaagggactgaacattgttggctggctgaacaccctaactggggagcaccggctggaggatatcatcgatgagcgatgcggcgatgtggaggtggaagccgtggaagccatccttgacatcgcagccatgtgcaccgacgcagacccggggcagcggccatcgatgagcgctgtcctcaagatgctggaggaggagatcttgtccccctgcatgagcgagctgtgctacgagcagcacctggagctctgagctgaggaggaagatgttgctggctgcgtgcgtgaagcgtcatggatgagactgaagtttttgtactgtagatacaacgatgatggatgagtgtaggtgatgttttgtgtgctcttagggccaatgaagaacagtaagcagcagttcgtgagtg

SEQ ID NO: 4233 - DNA, 1793 bp, Zea mays
  Clone ID: 700351289_FLI
ggaatttgaagagagatatgatcaaatctttaatgtgaacaataaggttgattccaaagagttatctgttggtagagctgccttatcaagtcttctgggtggtgttggctacttctatgggcagtccaaaattgcactcccgaaaggttttacacaaaaaaatggggataagtacatttcatattggcctgctgcattatatacagctgtccccagccgctctttcttcccaaggggatttctgtgggatgagggcttccatcagttagtcatttggcgttgggatgtgcatatatctatggatatcattggacattggttagatctgcttaattcagatggatggattcctagggagcaaatcttaggagctgaagctttaagtaaagttcccgaggagtttgttctgcagtatccttccaatggaaatcctcctactttatttcttgcgatacgtgatttagcaagtggaatacatgcacagcagttttcagatgaggaagcggaaaagatttcaagttttcttgaaagggcttatatacggctaaatgcttggtttcagtggttcaacagtacacaatcaggtaagtatgaaggcaccttctattggcatggaagagacaacataacgacaaaggagttgaacccaaagactttgacatctggattggatgactatcctcgtgcatctcatcctaatgatgaagaacgccatgttgaccttcgttgttggatgcttctagctacgaattgcatctgttccattgcagagttccttaaaatggatagtgctcttgagaaggattactataagatgtcaaatcaactttccgattttggaacacttaacaagttacacttggatgacacaattggtgcttattttgattatggtaaccatactgaaaaggttcgaatgagatggtttgatgtgaaagacaacaataatatgagacgagagttcttgcgagaaacattacaagcccctcagctgcagttagtaccccatgttggctatgtcagcctcttcccattcatgatggggactattccacctgaatcatgggttcttgagaagcagctcaatctgatatctaacacatctatattgtggacagattatggccttcgatcactttctagaacaagttcaatatatatgaagcgtaatacagagcatgaccccccttattggagaggtgccatttggataaacatgaactacatggttctttcggcactacatcactatgcacataaggatggtccatatagcggcagggcaaaggaattgtatgacaagctaagatcaaaccttatccggaatatagtgcagaattacgatgcaacaggtttcttctgggaaaactatgaccagaaggacaaaggaaagggaaagggtgcacggtcatttactggatggacttcactcattgttctgatcatggcggagtcctacccaacattgcacaggtgagatatagatcgcgaacaaccacagcagaagatagctatggcaattggaatggaggggctggcagctggcgcttgtttagcccggtttgcaaccagaacactgggatagtttgattcgtagcatctgctgccttaatcatgaaaattttgacaacacctcctggtcaatctgttcagcatcatttatagagtgttagtggtcatccctgttcactctcatactgtaaactagctcctcgaagaactgattttggggggccaaaaccaccccaggaaagcatgagcatatggaaaacatgttcttgaaagctgacact

SEQ ID NO: 4234 - DNA, 1801 bp, Zea mays
  Clone ID: 700351339_FLI
ctatgctctcctctccctgctcgcagtcagagcacagggactgcctccggagaccggagcaggccgcaagcgtccaggttcgagacgccagcacgctctcgcagtacagcagcattatcagggagcgtgccgtgggagtgggaggttgcctcaggtgcggagcagtcgccggcggcgaccatcggtgtctgagatgaaggagagaggcggctctagggcggcagtggacgagcgctacgcgcagtggaagtcgctcatccccgttctctacgactggtttgccaaccacaacctcgtttggccatccctctcctgccggtgggggccacagtttgagaaagctacctacaagaatcgtcaacgcctttacctatctgaacagaccgatgggagtgtgcctaatactctggttatcgcaaactgtgaagttgtgaaaccaagggttgcagctgctgaacatatctcgcagtttaacgaggaagcacgatcaccttttgtaaagaagtacaagactatagttcatcctggtgaagttaacagaatcagggagcttccacagaacagtaagatcatagccacgcacactgacagtccagatgtacttgtttgggatgttgaagcacaaccaaatagacatgctgtcttaggagcttctgaatctcgtcctgatctgatattaacgggacaccaggaaaatgcagaatttgcgcttgccatgtgtccagcagaaccatatgtcctgtcaggaggaaaggacaaatttgttgtcttgtggagcatccaagaccacatatctgcccttggggattcctcgtcttctcccggagcatctggcagcaagcagtctggcaaaattgcaaatgaaaaggagagtcctaaagttgatcctagaggtatattccatggccatgacagtactgttgaagatgttcagttctgcccttccagtgcgcaggagttttgtagtgtgggtgatgatgcttgtcttattctgtgggatgctcgaactggcactgacccagctgttaaggttgagaaagctcacagtggagatgttcattgtgttgattggaatccccttgatgttaactatatcttaactggttctgccgataactctgtccgaatgtgggatcgtcgcaatctgggttcgggaggagctggttctccaattcacaaatttgagggccataaagctgctgttctttgtgttcagtggtcacctgacagagcatctgtttttggaagttctgcagaagatggtttcttaaatgtttgggaccatgagaaggttgggaagaagaaaaattctaatgtcccagctgggcttttctttcagcatgctggtcatagggataagatcgtagacttccactggaattcgtcagatccttggacaattgtcagtgtctcagatgatggtgagagcactggtggaggtggaacactgcagatatggcgaatgagtgatttgatctaccgcccagaggatgaagttcttacagagctggagaatttcaaggctcacctggccagttgcgctccgaggaattgagtcatgtgaaaactctgagtaggttatgtagtttcctggccataagtatggccccaattgacattggatctgtcttctcatgctcctagagctgtacccttcgaggtgcttgtgcctttgtgagcttgtgttgaaccatgttgtatgactaaatagtccgcaaacgagtcagctggatggctaatctgtaggccaactattgggatattgttggatattatcaacaaccggttcagattcgtgatt

SEQ ID NO: 4235 - DNA, 1205 bp, Zea mays
  Clone ID: 700351357_FLI
gcgcgagccccggccgtccggttcccatctgcacgccgcgccgccgagctcaaggcctttttggaggacccagcgaactttgacaccctggctatggtgtttaacaggtcgagcagatttggaaggctgcagggagtgaagtgtgcgattgcagggaggaacctttacatgaggttcagctgcagcacaggggatgccatggggatgaacatggtctccaaaggtgtacagaacgtgctggactacctccaggctgacttccctgatatggatgtcatcagcatatcaggtaacttctgttctgacaagaagtcagctgctgtgaactggatcgatggccgtgggaagtcggtggtttgcgaggcggtaatcaaggaagaagttgtgaaaaaggttctcaagacaaacgtacaggctctcgtagaattgaacgtgatcaagaaccttgccggttcagctgttgctggagctcttgggggtttcaatgcccatgcaagtaacattgtggcagccatcttcattgctactggtcaggaccctgcacagaacgtggagagttcccagtgcatcaccatgttggaagctataaatgatggcaaagatctccacatctctgttactatgccatctattgaggttggcacagttggtggaggcacgcagctggcctcacaatctgcctgcttggacctgcttggcgtcaaaggtgccaacagggaatctccggggtccaacgcgaggctcttggccacggtggttgcgggtgcggtcctagctggggagctgtcccttatctctgcgcaggccgctggccatctggtcaagagccacatgaaatacaacagatccagcaaggatatgtccaagacccttgcagaggaaacagacaaacccaagaaatgctgaataatatcaagtagttgttctatagccctttgggagaaaaggagcagaaagggtcgtacaggatgactttcttgcggcatgctcaggtggaaaggggggaaaaagaccttcaggcgaaaagagataattcagtcgccttgtcatatttaccaggcggtgagacctgttgtggatcctggagtatgacctatttaatttgttgatgttgttgttatagttcctctaccgtacttgaccccgtttgcatcttgttttgaccgtcccatgggcattggagaatctgaccatgggttttgtcc

SEQ ID NO: 4236 - DNA, 1324 bp, Zea mays
  Clone ID: 700351364_FLI
ggacgtcccggccgtggcggaccctggaacggagcgaggcgaaggcgcgctgatccagtgcccgtactgcgactcggaggcgatgcacaagctggcgcagatcctcctcccgggcctcgccgccgtctgcgtggacggcaccacgggggacccgttccgcagcccttccgcggtggccgtggacctccgcaaggagatggtggactacatcacgcagcggagcgacagcttcatcgcggacgcgctgatcgagtcggaggcgaaccaggacgcgcccggggccgaggtgcccgacgaccccttcgagaccgtgtccgtcttcatggacgacttcgccagcaccaagcgcaacatcatcggccacgtctccggctggctgctcaccgacagccgcgacgacaagatcgacgacttcgtgcaggagatggaggccaccaagttctggccgctggagcgccgggaggccgtcgccgagctcctgctcaagaacgtcgacctcaagaccaggttccactgccccgagaagtacgagaacgaggagcgcctcgaggaccacaaggcgcagtgcagcttccgccccgtcgcctgcgccaacgacggctgccgcgccaaggtctccgtccgctgcgtcaaggaccacgacgccgcctgcgtgtacaagctgctccagtgcgagcagggctgcgacaagcgcctgctcaggcgcgacatggaccgccactgcgtcaccgtctgccccatgaggcccatgaagtgccccttcggctgcgattcctccttccctgaccgtgacctcgagaggcactgcgccgagttccttcagccgcatctgctcatggtccttaaggccatccataagaaaggccggtcggaacaagacctcaaggaccttgctcaaaagctggaaaagtttgatggagatggtaaactggctaaggctctggacgcaagacctcttactaatgttgtcaaggacctcgaagccaagatgaaaggtggacagtcaagttaaaagggctgggtctttcatacagacagacttcacaggatggataatggcattgtttggttcaagatatggtcccacgcgcagcatacatacagagaagaatatgagttttgttttattcttatctcctttacgattttttttaattttttgcttcatttttctccctgtcacaatcaaaccaattatcagtcagtatgcatagtcgtccgctattgctctgtatcttcagcttttgtatgaggatattatatcatttgttttggtatataaatcaaggaacaggccatgtttccagcaggcttgttctgaact

SEQ ID NO: 4237 - DNA, 1787 bp, Zea mays
  Clone ID: 700351389_FLI
aaccaaccatcgtctactcggcggctgggctagcaccctccctaccaccatggcggccgtcgtgcctccgcccgacaacctggacccgcagccggctactcccccagccgccgctccttccgccacgctcaccccgcctcccgccgccacctccaccccaccaacccccttgacgccgggccccgcggcgcctagcccaaaccctaacctaccccctgcccctgcccctgcccctgcccccgcccccgcttccacgcctccggcggcagtcgcgccaccgatgcccccagctccgatctccttcgcttctaccttccgtccactcggtgccccagcgccaccgccgccgtaccaggtcccgcagtacgtcgcggtgccggcgaacccgggctacccgatgcagccgccgggcgtccccgtcgttatgcctccgggcgccgtgcggctgccggccatgtacgggccgccccagccgggagtatacatgccgcagcagggcgctgcgatcccccatcccgcggtggtcgtgccagccattactccccacaacaagaggtgccggctcatgtttgattctgcagctctagatcgtttgctccctcactgagtgtgtttctttatgtacttagatgcttcagctctgggttgttccaaaaacttgctaaggaatgtctcgttatcctgcaccgtatcctatgattcgtcctggttttgttccacgtccaatgccgccgcctggtgttgtgccaattcaacgaccaacaataatttctgggatccgggctattcctcctttggtagccccaactgcccggccacctgctccagctgttaagctggcagataaaccgccaaccgcagtttatgttgggaagatcgccccaacagtggacagtgatttccttctttcacttcttcggctttgtggatctgtcaagagttggaagcgtgcccaagatcctagtaatggaaaacctaaaggttttgggttttgtgaatttgaatctgctgaaggcatccttcgtgcgacacggcttctcaacaaattgagcattgatggtcaggaactggtgattaatataaatgatgccaccaaggaatacctgaagaaacatgttgagggaaagaagagagcacaagagaaggaaaaagaaacagaagatgcaagcggggatggaactacagctgttgctgaaaatgaatcatcaaaacctgtccctgatgaattggatgagacaggagatgctggagataagtacagggaagacaacactgataaatttgggattgttactgacgaagactctcaaactgacaaagatgtcgcagaaaaaataagcaatatgattgaggagtggttaaagactagaccgccacccccaccttcaccagttcaaccatctgctgatagctctggcgtagataaggcaaaaaatgattctgatgataagaatgctgctgatgctgataaaagggcagctaatgaaactgagagatctgaaactgcctctcctgataagaggaaggatagagagcatgataaggacaaacgggacaaagatcttgaaaggcatgaccgtgaacgtgaaagagtacggagggatagagagaaggatcataagcatagagaagctgataggctctacagggatcgccttaaggagtgggaatctagggaaagagagagagaatatcagaggtatagtgaaaaggagaaagaaagagatagagatcataaccgcagaagggagatcctgaagcaggaagatgagagcgatgacgaggac

SEQ ID NO: 4238 - DNA, 1678 bp, Zea mays
  Clone ID: 700351460_FLI
ggtggccggacggtggtggcatcgccaattcaactccgcatctgaatcggcactcggcagcgcgccagctccatagtgtaggaggaggagatggcgctcacaagaatcggtcttgctggccttgcggtcatggggcagaaccttgccctcaacattgcagagaaagggttccccatctctgtgtacaacaggacaacctccaaggtggacgagaccgtgcagcgtgccaaggcagaaggaaaccttcccgtctacggcttccatgaccccgcgtcctttgtgaactccattcagaagccacgggtggtgatcatgctcgtcaaggccggcgcgccagttgaccagaccatcgcgacgctcgcagctcacttggagcagggcgactgcatcatcgatggggggaacgagtggtacgagaacacggagaggagggagaaggccatggaggagcgcggcctcttgtatcttggcatgggtgtctctggaggagaggagggtgcccgcaacggcccgtccttgatgcccggaggctcgttcgacgcttacaagtacgtcgaagacattgttctcaaggtggctgctcaggtccctgacagtggcccgtgtgtcacgtacattggcaaaggtggatcgggcaactttgtcaagatggttcacaacggaatcgagtatggcgatatgcagctgatttccgaggcttacgacgttctcaagtcggtcggtaagctcaccaacagtgagctgcaccaggtgttctccgagtggaacaagggcgagctcctgagcttcttgatcgagatcacggccgacatctttggcatcaaggacgagcatggcgatggctacctagtggacaaggtccttgacaagaccgggatgaaagggacagggaagtggacggtgcagcaggccgccgagctgtcggtggccgctcctacgatcgaggcgtccttggactcgaggttcctgagcgggctgaaggacgagcgggtggaggcctccaagatcttccagggtgactactactccaccggctcgccggtggacaaggcgcagctggtggaggacgtgaggcaggccctgtacgcgtccaagatctgcagctacgcgcagggcatgaacatcatcaaggccaagagcgcggagaaaggctgggggctcaacctcggcgagctggccaggatctggaagggcgggtgcatcatccgcgccatcttcctggaccgcatcaagaaggcctacgacaggaacccgggcctcgccagcctgctcgtagaccccgagttcgcgcaggagatcatggacaggcaggcggcgtggcgcagggtggtgtgcctcgccatcaacaacggcgtcagcaccccgggaatgtccgctagcctggcctacttcgactcctaccgcagggacaggctgcctgccaacctggtgcaggcccagagggactacttcggggctcacacctacgagagggtcgacatgcctggctctttccacaccgagtggttcaagattgcgcgcaacatctccaacaactgatgagctgctcaacggatggcatgcccggtgttgactactccagtcggtaatgagatttcctgcaggaacttgtctattgatctttgtaagttaattatttatatgaataaaataagagcaaacatgcttgtgtttgggc

SEQ ID NO: 4239 - DNA, 2405 bp, Zea mays
  Clone ID: 700351480_FLI
cgtcttcgtccaccccaaaccctaatacgtcatggcgctcactacacggggcggcgccggcggcggggatcccgcgaaggcgccgtccgcctccgaccccagcctcggcttcctcaccaagcgcgataccgaggtcaagctaccccgcgcaacgcgggtcaagaacaagacccccgcgccgatccagattacagccgagcagatcctccgggaggccagggagaggcaggagcctgagatccgcccgcccaaacagaagatcacagacccccacgagctctccgattaccgcctccgtaagcggaaggagttcgaggacgtcatccgccgcgtgcgctggagcgtctcggcatgggtcaagtacgcgcggtgggaggagcagcagcgagacttcgcgcgcgcgcgctccgtctacgagcgcgcgctcgacgtcgcccaccgcgaccacacgctctggctcaaatatgctgaattcgagatgcggaaccggtttgtcaaccatgcccggaatgtctgggaccgcgcggtgtcgctcctcccccgggtggatcagctctggtacaagtacatccacatggaggagctgcttggtgcagttgccaatgcgcgccaggtgttcgagcgctggatgtcttggcgacccgacacagccggctggaattcttacatcaagtttgagctgcggtacggggaggtcgagcgtgccagggctatctatgagcggtttgtagctgagcacccaaggccagataccttcatccgctatgctaagtttgagatgaagcgcggcgaggtcgagcgggcacgtcgggtgtatgagcgtgcagcagacctgcttgctgatgatgaggatgctgaagtgttatttgtggcatttgcagagtttgaggagaggtgccgcgaggtcgagcgagcacgtgcaatatacaagtatgctctagacagggtgcccaagggtcgtgctgaggaactgtataggaagtttcttgcatttgagaaacagtttggtgaccgtgagggaatagaagatgccattgtgggcaagaggagatttcagtacgaggatgaggttaggaagaatccactaaactacgactcatggtttgattatatcaggctggaggagagtgttgggaataaggacaggatcagggaggtgtacgagagggccattgccaacgtgccccctgcagaggagaagcgatactggcagaggtacatatacctctggattaactatgcactctatgaggagctagacgcacaagacagagaacggacaagagaggtttacaaggaatgcctgaggttgattcctcacaagaaattcacgtttgcaaagatgtggctcatggcggcccagtttgagatacggcagagaaatctaaaggctgcaagacaaattcttggaaatgcaattggaatggccccaaagggcaagatattcaagaaatatattgaaattgagctttatctgggcaactttgaccgttgtaggactctttatgagaaatatattgaatggtccccagcaaactgttatgcctggaggaagtatgccgaattggagaagaaccttagtgagactgatcgtgctcgatcaatatatgaacttgctattgcacaaccagcccttgatacaccagaggttctatggaaggagtacttgcagtttgaaattgatgaaaatgaatttgagaggacaaggcaactatatgagagactgcttgataggacaaaacatttgaaggtatggatcagttatgctgagtttgaggcctctgctggcttgggcggtgaagacagtgaagacaaggagaaaaagaatgaagttagttatcaggagcagcagatggagcgggttcaaaaatgtagagctgtctttgaaagggcatttgattacttcagaaccagtgccccagagttgaaggaggaaagagctatgcttcttgaagaatggcttaataaggaggtgaactttggtgatcttggagatgtcagcttagtgcaaaagaaggcgccaagaaaagtcaagcggaagagaccaatccctacagaagatggctccactatagcatatgaggagtatatagattacattttccctgatgaagttgctctagcaccaaacctgaagatcctagaagctgcttacaaatggaagaagcaaaaaactggagatggcgatgagtgatcctggcatcttagtatggcattgtcgtggttcgtgagcattttgccacagccaaaatcagatgccctgcaacactctggccagagctatcggaatgagaatagtcattttttcatgtcacaaaggatgttgttgctgttgaaaagaatcctgcgaattacatttaacttgtaactgtatgggctgtagtttggtggccatgagttgcttc

SEQ ID NO: 4240 - DNA, 675 bp, Zea mays
  Clone ID: 700351484_FLI
gaggaattcggtatagaagatgcacacctagaagatatcatccatgacgttgatcaggacaatgatggtcggatcgactacaacgagtttgtaacaatgatgcagaagggaaataacccactagggaaaaaggggcactgccagatgagctttggtcttagagaagcattgaagcttggctaagtggcatgatcaatcctgtgtgaagtgccattcggcttcatatgccaactttagctgatgaaactaagtccgtgaatttgggacgccggtaccaaaggtggagcaagtgcgcgatacgattagctttgggataccaactaagcagtgagcatgcaggaacacattggtgatctttcgtcgttaaccccccatgtacatggcttttttgaggtgggataggaatggcggttgtgtttcccatggccattctttgcacgttatgaagctcagctgcaggatgctcttatatagagagaaatgttagtcacatcacatcgcgtgtccatactgtatagcgaaacttaacatgttgtaatatcggtcggacaatgtgtgcgtgttgtatgttatctttcttagatagaggcacaggcttagcgttgtcatatatgtattgcaagaatatgcaggctgtatattaaccaaatgatttttttgtgtacatttcagtgc

SEQ ID NO: 4241 - DNA, 907 bp, Zea mays; identical to SEQ ID NO: 3703
  Clone ID: 700351492_FLI

SEQ ID NO: 4242 - DNA, 1430 bp, Zea mays
  Clone ID: 700351502_FLI
ggaagccctacgctacgcctaccctcgctgtactactagctgccttcctacccgcttcccctctcctcccgacgccgtctccctccctccctccgcctccgccgtcgccgccgggacacgcgaagcttccaggtcttgtctttgggtagaacatgtcgtgctttgcgtgctgtggtgatgaagatacccaagtaccagacaccagggctcaatacccaggacaccatccagcgagggccgatgcataccgcccttctgatcaacctcccaagggtcctcagcctgtgaaaatgcaaccaatcgcagtccctgctattcctgtggatgagattagggaggtgaccaagggttttggtgatgaagctttgattggtgagggatcctttggcagagtatacttgggtgttctaagaaatggtaggagtgccgcggtcaaaaagttggattctaacaagcagccagaccaagagttcttggcccaggtgtctatggtgtcaaggctgaagcatgaaaatgttgtcgagttgcttggttactgtgctgatgggacactccgtgtccttgcttatgagttcgctacaatgggttcccttcatgatatgcttcatggaaggaaaggggttaaaggggctcaacccggtccagtcttatcgtggtcgcaacgtgtgaagatagcggttggggcagcgaaaggcctcgagtatcttcatgagaaagcgcagccccatatcatacaccgagacatcaagtctagcaacgtccttcttttcgatgacgatgtagctaagatcgctgactttgatctgtcgaaccaagctcctgacatggcagctcggcttcactcaactagggttctcggaacattcggataccatgcgcctgagtatgcgatgactgggcaactcagctctaagagtgatgtatatagttttggggttgttcttcttgagctgttgactgggaggaaacctgtcgaccatacattgccaaggggacagcagagtcttgtgacctgggctacaccaagacttagcgaagacaaggttagacagtgtgttgactcaagacttggaggggactatcctcctaaagctgttgcgaagtttgcggctgtcgccgccttgtgtgttcaatacgaagcggacttccggccgaacatgagcattgttgtcaaggcgctacaacccctgctgaatgcgcatgcgcgggcgactaaccctggagaacatgctgggtcataagctttgcgtttgcttctctccctcctcttgttcttgtatgataggtaaggtatatgactcgtcgatgtcgttgttgcggacatgtggctggcagcgtgtaatgtctgtgattattcttcccctgagctgtaaacaagattcttgtatccccacagtatttgattctttctattggtgccgtttttacct

SEQ ID NO: 4243 - DNA, 1555 bp, Zea mays
  Clone ID: 700351593_FLI
gctgcactcgtctcggcgcacgcgctcgatgccgtgcgcgcagccgccgaccgcgacccggccctgcgcaagctcttcattcgggggctcgggtgggagaccacatccgactcgctccgcgccatcttctccgcctacggtgacctggaggaggccgtcgtcatcactgacaaatccacggggcggtccaagggctacggcttcgtcaccttccgccacgccgattccgccgtcctcgcactcaaggagccatccaagaagatcgacggtcgcatgactgtcacgcagctcgccgccgccggctcggcaggcgggccatccgttggggctcccggcagtggcggtgctcctgtggctgatgtgtcgctccggaagatcttcgttgggaacgtccctgcagacatgtcgtcggagcgtctccttgcgcactttgcctcctacggcgagattgaggaggggccgctgggatttgacaagcagacgggcaagttccggggctttgcacttttcgtatataagacacctgagggtgcgcaggcctccctggtggactcggtgaaggtaattgatagccaccagcttgtatgcaagcttgccatagatgggaagaaggggaagcaggggcaatcacagcaatctggacctggcaaccagcagcagcaacagcaacagcagatgctgccgggtggtccgcaggaaattcagggaggcctggggcttggttcacaaatgggagcacagtatggtggccctgggagtggtatgccttcgtttggttttggtggcgttggcggtgggtttgggggtccaaacccttatgctaacatgccatcttccatgggtggaggaggcgcaggtgggttagggtcggtgggaggccaggtgcccactgggttggctggtgctggtggatttgggcctgggggattgggtggtggctcatttgggggatcatctcagtttggtgctgctgggatgggggcatatggtggccttggaatgggtggaggctccatgtaccgcatgcaacagggagcaggtgggctgcctgcaggcgcatttggtgaaggaggaaactaccctcttccaggttctggtttccgaggccacgaccctcaaggtggaatgtctcctcctgggccaggtggcagggctcctcctatgtatcccaacgtgccaccttatttctaaggtgtgtgacaactcttgggagcatatcctttgaaatggttgtgctgaattcagaagtgttgtctgcttacatggatgccttgcatattctggctacttctgatctggaatggaatgtggaatgagtttgcactcgcagtttcccttattaagggatacatgaagctaggtagttgtgataatgcttagccgtgataatgcttcacatgtactttcttatgagtcatgactgctttgcagtttcattttctatatagataagtgaagttgcattaagtgtgtgttgtgttgattattgtcgtattatcctatgaaacccctttattttcatggtatgatgatgtgtttaatcttatggatttct

SEQ ID NO: 4244 - DNA, 921 bp, Zea mays
  Clone ID: 700351628_FLI
gcaaagcaccgccttgcggcctgtcgtacaatgttgcagaagtattctcttggtgaccgtactcggctctttgttgctgatggaactttgttttcccttttacctgtgaactccaggatgcaaagaatggaagggtcaattggcgttgaagaaaatggaagcatattcccagaatggacttcaaggagatcatggaaggatcggcagaagactaggaaagcaaatgcaaatggtcaacagcacctactggcagcttcagaacctgaactgatatactatggtaaacattcaggattagttggacagtgtaaatctgatgtcttttgtccatcagttgatgatgaagcttgtacatctggctatgacaaggtcctagtggatgcggagtgtactcatgatggatccataaaacatattcaaaaatttgaattctggggatggaaaagtctagatcgccgcgtacttgatgctgaaagaactgagaaccttcttcagcttcagttacatctcctcacaaatggttttaaattgttgaaaaccggtggatcacttgtatatagtacttgcagcttgacagttgcacagaatgaatgcgtggttcaacaattcctttcaacacacccttctgcagatttgcagaagatcaatttggccgacaattggccctgcagaagtggcggcatccccaaaacactgcgattcgatcctgcagtttcacaaaccagtggtctttttgttgccaagttctgtaaactaccgacttaaagcattttctggtctatcttcctggaccattcatgtcctctcacatgtaaaactgggttttcctgtcagcaactaaattacaagttggttcccaattcccctgcttttttttgtgataaattctcatttaatgtatgcttctaactttggcgagac

SEQ ID NO: 4245 - DNA, 876 bp, Zea mays
  Clone ID: 700351633_FLI
gtttgttccgtccaggcaaccaaaaagcgttgccccgccgcgcagaggaagaagagagcagaggaggatggctcgtacgaagcagaccgcccgcaagtccacgggaggcaaggccccccgcaagcagctcgccaccaaggcggcgaggaagtcggcgccgacgaccggcggcgtgaagaagccccacaggtacaggcccggaaccgtggcgctgcgcgagatccgcaagtaccagaagagcacggagctgctgatccgcaagctgcccttccagcgcctggtgcgcgagatcgcgcaggacttcaagacagacctccggttccagagccacgccgtgctggcgctccaggaggccgccgaggcctacctcgtcggcctcttcgaggacaccaacctctgcgccatccacgccaagcgcgtcaccatcatgcccaaggacatccagctcgcccgccgcatccgtggcgagcgcgcgtagccatcatctccgaggatctgatgaatgtctagttaccaaacaaataggccgtattagcgtcgttgttctgtattcgttattttggattcggttgcagggaaaaacagctttactgatcttatttgtgatctctggtggtcgcttcgcttctaagcgatcatctgtggtgctaaattcgtgctggttattctgttatggtcccgtgtttggtctggcggcctggtacatctcaagtgcccgacggaagttggccgttctgcatcatgtcggtttactgcgtcacagctccagctcactaccatccttctcttccgagatgctaatagttggccctctatttcattgagataatgttaatagttcgacgctgttgctggctgtctaataaatttacgatt

SEQ ID NO: 4246 - DNA, 774 bp, Zea mays
  Clone ID: 700351676_FLI
agctcgctctctacctgcaccagcctcgcccgcccttcgctcgccgccgccatggggaggggaaagttcaagggaaagcccaccggccgccgcaacttctccacaccggaggagatcgctgctggtacttcaggtcgccctcgcacctttaagaagaaggaggaagaggaagaggaggaagaagaaagagaagagtcagaggaggaagaatctgaagacgagtctgatgacaaacctaaacataaaggtactgagggtattattcagattgaaaatccgaacttagtaaaagtgaagaatataaaggccaaggaagttgatcttggaaagacaactgaactctcaaggcgtgaaagggaggagcttgagaaacaaaaagctcatgaacgttatatgaaacttcaggagcaaggaaaaacagaacaagcacggaaagatttggaacgtcttgctttaataagacagcaaagggctgatgctgcaaagaaacgcgatgaggagaaagctgccaaggagcagaggaagtcggaagcacggaagtaactgcaatatcatggacgatgagaccacgaaggcatgatctgcgttagttggatatttatttctaatgcatcagttatcttgttataaacctggtccctattctgtatccccataaaatatgcattgacaaaattagtaacagtcttgtgggcgtgtcttcctgtaaacttgagcttgacaaaattagaaagtagtattaaggtcagcttatgcgaaactggctcttttgtc

SEQ ID NO: 4247 - DNA, 747 bp, Zea mays
  Clone ID: 700351691_FLI
cgtggcgccgcagccggcgctgcgcccggcgctcgccttccacgccgggggccacgccgtcgcgctcccgcaccaccaccaccacgacatcccggcgccaccgcggaagcccgggccgctggccgtcggcgcgcagatcctgcggtccgagggcgccgcgggcctcttctcgggggtgtccgccaccatgctgcggcagacgctctactccaccacgcggatggggctgtacgacatcctcaagaccaggtgggcccgggagaacggcggcgtcctcccgctgcaccgcaagatcttggccggcctcgtcgccggcggcgtcggcgccgccgtgggcaacccggccgacgtggccatggtgcggatgcaggcggacgggcgcctgcccctcgcggagcgccggaactaccgcggcgtcggcgacgccatcggccggatggcgcgcgacgagggcgtgcgcagcctctggcgcgggtcctccctgaccgtcaaccgcgccatgatcgtcacggcgtcgcagctggccacgtacgaccaggccaaggaggccatcctggcgcgccgcggcccgggcgccgacggcctcgccacgcacgtggccgccagcttcaccgccggcatcgtcgccgccgccgcgtccaaccccgtcgacgtcgtcaagacgaggatgatgaacatgaaggtggcgcccggcgcgcccccgccctacgccggcgccgtcgactgcgccctcaagaccgtcaggtc

SEQ ID NO: 4248 - DNA, 680 bp, Zea mays
  Clone ID: 700351705_FLI
ggagccaataaagtccaatttgaaggttgttaatcgccacaaccatgacacaatttctatggctgtgattgacaagatgggccacatagcagttgggacatcaaccaatggcgctacatttaaaattccaggaagggtgggcgatggaccaataccaggatcttcttcatatggtgatgatgaagttggcgcttgtggagcaactggtgatggtgatattatgatgcgcttccttccatgctaccaagtggtagagagcatgcgacaagggatggatcctcgagacgctgccacagatgctatatcgagaattgcccgcaaatacccagatttcatcggtgccgtatttgcagtcaacaaggaaggggtgcatgccggggcatgccacggatggacattccaatactccgtacggaattccagcatgcaggatgtggaggtcattacagtatatccttagcaatcacaattcaacgaaaacaaaagtttgctttatcagcaggtaaaatatttactcgtgcgtggtatggtcacgaccgcccccctgttgatgttttaaaaatgttctgtgcggattattccaatgttttcttaaaatcgattgttttgaaactagtagtactgtatgtaccaatctgaccttagttgtttttttccctggaaagtgttgaatgtcttgg

SEQ ID NO: 4249 - DNA, 1875 bp, Zea mays
  Clone ID: 700351742_FLI
ggacatcgtctgaaaaatcatgaatgtgctcttgctcgcacactagtttcaggatatcagatccgccgcagactacttttaactggcactccaatccaaaatagcctacaagaactgtggtctttgcttaactttattctgcccaatatttttaattcatctcagaattttgaggaatggtttaatgcaccatttgcatgtgatgttagtcttaatgatgaggaacagctattaatcatacatcgtctgcatcaagttttgcgtccatttttgctgaggaggaaaaaagatgaagtggaaaaatatctccctgtcaaaacacaagtaattctcaagtgtgatatgtctgcttggcaaaaagcatactatgaacaagtcacaagcagggaaaaggttgcactaggatttgggctcagatcaaaggctctgcagaatctgtcaatgcaacttaggaaatgttgcaaccacccctatctatttgtagagcactacaacatgtaccagcgggaggaaattgttagagcatcagggaagtttgaattgcttgatcgtctacttccaaaactgcagagagctggtcacagggttctgcttttctctcagatgacgaaactgcttgatgttttagaaatatatttgcaaatgtacaatttcaagtacatgaggcttgatggatccacgaagactgaagaacgagggaggttactggcagattttaataagaaggattcggaatatttcatgtttctcctcagcacacgtgctggaggacttgggttgaacttgcagacggcggacactgtcattatatttgatagtgactggaaccctcaaatggaccaacaagctgaagaccgtgcccatcgtatagggcagaagaatgaagtgcgtgtgtttgttcttgttagtgtcggctccattgaagaagagatcctggaccgtgcaaaacaaaagatgggtatcgatgcaaaagttatccaggctgggttgtttaacacaacttccacagcacaggacagacgagcattgctgcaggagatccttaggagggggacaagctcgctgggaacagatatccccagtgagcgcgagataaatcgtttggctgcacgaactgatgaagaattctggttgtttgagaagatggatgaagaaaggaggcttagagaaaactacaaatctagacttatggatgggaatgaggttccagattgggtattcgccaacaatgatttacccaagagaaccgtggcagatgagttccagaatataatggtcggtgcgaagcgacgtagaaaggaggttgtctattcagactctttcggtgatcagtggatgaaatccgatgagggatttgaagacattccaaaggcgactcagaggtcgaagaagactgcttactcatctgacatccaagttgagtttagtgaaaggaggaaaagacctaggtctgtagaaaacagcgcagacggtgtgagcaacccgacgtggacgcctgacaaaggaagggctggagtttcatcatacagcaaggacgagactgaagatgatggcgaagacgaagtcattactagcggcttacaaaagggaaacagtttcacatggaataccctaggaagaagaaggtcaagccacttcagttcgtcatcggactcgagagggcgcccaacattctaatggcaacatacatgaatgttatggcctcgacctgttggttgatggaatacccttgtagagcagggctgcgactatgactgagtaccttcaagcttatgaactttattaggattactagtatactgtatggacttgttggcatgaatttgtaactcctttaaatattaattgtttaaacaactggtggtgtttgctatc

SEQ ID NO: 4250 - DNA, 1229 bp, Zea mays
  Clone ID: 700351755_FLI
agtctccactctggagtctggaactcccctcatcctccacatctccaccgcatcggaactaggaaggcgaagccgaaggcgcggcgcggcgcggcacggatcgagcgatggcggtggcccctcctacggcggcggcgctggagcagctaagcagcagcaagatgttcgacggcttcaatctccgcttccgccaccagagcgccacccttggctgcgccatgactttctccatctacctgcccccgtccccggcgtccaaccttcccgtgctgtactggctctcgggtctcacctgcaccgacgagaatttcatcataaagtccggcgcccagcgcgccgccgctgcccacggcatcgccctcgtggcacctgacacctccccacgtgggttaaatattgaaggagagtcagacagctatgattttggtgtgggtgccgggttttatttgaatgccacaaatgaaaagtggaaaaactggcgcatgtatgactacattgtgaaggaacttccaaaagttttaagtgataactttgaacaactcaacacgtcacaggcatcaatttttgggcactcaatgggagggcatggcgcgctgacaatttacttgaaaaacactgataaatacaagtcggtgtcagcatttgctccaattgccaatccgataaactgcccttggggtcagaaagcattctcaaattacctgggctcaactaaatcagattgggaggaatatgacgcaacctgcctgattaaaaagaacagcaaagttcccactactatcctaattgaccagggggaggccgacaagttcctggctgagcagcagttgctacctcacaagttcgaggaggcgtgcaaggccgcaggggctgctctgaccttgcgcatgcagcctggatatgaccactcgtactatttcatcgctacgttcgtggacgatcacattgcgcaccatgctcagtttctcaagagcgcctgactgtaaatgtgtagcgtgaggaagacaaggaggcagcctagcatgggtgttttatctatgccgacagtgttgtctcgtgtggcagcttgaggagaggtgaacagcacaccccacatgcgaaataagatggaagatttgctgttcctgtccattgacattgacgagctcgaatgggactgatgttgcaccgaatgtagtttccctgtcattcgctatgcgcaattatgttataacggccctggtgcaagg

SEQ ID NO: 4251 - DNA, 649 bp, Zea mays
  Clone ID: 700351762_FLI
gctcctcacactaccacccgccccctctacgcaaggcctagaagcgccgcctccacggctgcacctccgccagttgcgctcctcgcctcgccgctgcctccgtagccgtcgcgggcgccaccatgccgctccggttggatatcaagaggaagctcgcgcagaggtcggagagggtgaagtccgtggatctgcatccgacagagccatggattttgtcgagtctttactcaggaagcgtttgtgtatggaactaccagactcagacaatggtgaaatcatttgaagtcacggatttaccagttcgttcggctaaatttattgcacgtaagcaatgggttgttgctggtgccgacgatatgttcatccgtgtgtacaactataacacaatggacaaggtcaaggtttttgaagctcacactgattacattagatgtgtggctgttcatccaacccagccctttgtgatatcatcgtccgatgacatgctgattaagctgtgggattgggataaaggctgggtgtgtactcaaatattcgaagggcattctcactatgtgatgcaagttacatttaacccaaaagataccaacacctttgctagtgcttccctggatcgcacaataaagatatggagtcttttgggttaaat

SEQ ID NO: 4252 - DNA, 2171 bp, Zea mays
  Clone ID: 700351868_FLI
cagatcctgccttgcactgcaagcaaaccacccgcaagcccttactaatttaggaaacatatacatggagtggaacatgataagcgctgctacttcattttacaaagcagctatatctgtgacatctggattatcttccccacttaacaacttggctgtgatatacaagcaacagggaaactatgctgatgctatcacatgttacactgaagtactccgtatagatcctacagcagctgatgcactagttaatagagggaacacattcaaagagattggcagagttaatgaagcaattcaggattatgttcaggcagcaacaatcaggccaaacatgccagaagcccatgccaacttggcctcagcatacaaggacagtgggcatgtagaaacggctataattagctacaagcaggctctccggctgcgtcctgattttcctgaggcaacctgtaatctcctgcatactctacagtgtgtctgtgactgggaaaacagagatggcatgtttcgagatgttgaagaaattattagaaggcaaataaagatgtcagtacttccaagtgttcaacctttccatgccattgcttatcctattgatccattgcttgctttggaaataagccgtaaatatgcggcccactgttccttgattgcctctcgttttgggctgccgccttttgtgcatccacctcctgttcctgtaaaagcagagggtaaacactgccgactgaaagtaggatatgtgagtagtgattttggtaatcaccccctttcccatctcatgggatcagtatttggaatgcatgatcgtgccaatatcgaggtcttttgctatgcactcagtcaaaacgatggtactgagtggaggcagcgtattcagtctgaggcagaacattttgtcgatgtttctgccatgacttccgataatatcgccaagcttatcaatcaagacaaaatacaaattttgataaatcttaatggctacacaaagggtgccaggaacgaaatttttgcaatgcagccagcacctatccaagtttcgtacatggggttccctggaacaacgggtgctgcatacatagattacttggtcacagatgagtttgtttctccatctagctatgcacatatatattcagaaaagctcgtccatttgcctcattgctattttgtcaatgactacaagcagaaaaatcgagactgtctcactccagtatgtccacacaaaagatctgattatggattacctgaggataaatttatttttgcttgcttcaatcagctttacaaaatggaccctgagatatttgacacatggtgcaatattctcaaacgtgttcccaacagcgcattatggcttttaagattcccggcagctggtgaaactagagtgagagcatatgctgctgccagaggagtaagatcagatcaaattgtattcacagacgttgccatgaaaaatgagcatatacgacgcagtgccctggcagaccttttcctggacactcccctctgcaatgcacacacaacaggcactgacatactgtgggctggtctgccaatgatcacccttccactagagaaaatggcaaccagagtagctggttccctctgcgtagctactgggcttggggaggagatgattgttagcagcatgaagaagtatgaagatagagcagtagaactagcgctgaatccggtgaagcttcaagcgctgactaacaagctcaaggaagttcgtatgacctgcccgttgtttgatacagctcgatgggtgcgcaaccttgaaagggcatactacaagatgtggaacctttactgctccagtcgccacccggagccattcaaggtggtagaggatgacaatgagtccccatttgaccgctaacgagatctcatcagcagcccggctctgtaaataaggcgagagttgtagaatatttagcatcgtgaccgctgttgctccaggtgcttgtttgccgccccctttcctgccgtgcacatcacctctgtggaggctaacttcgtagtatgtatgtactacactgcaaaagaagtcctagggttagcctattgttatcactatttagtttgctatattgtatcgcggtcgtggtttctaaaataaactgcaacctttaggagtgttgatgtgaaatctcattctt

SEQ ID NO: 4253 - DNA, 761 bp, Zea mays
  Clone ID: 700351889_FLI
acccaaactgccatgcgtgagaatagatagacagaaagaacaggaactcaaccaacacaagacacaacaagctgcagccgcggcaggcatggggcaccgcgcgcactgacaccgggccccaccaccattaccacccgacgcacactttatttagcccacgtcactcgcagcccgcaccggacacgtccacgcgacagtcactgctagctacgtaccgggctacgtacgacacacacacacacacacacagagagacgccagtaaccgtagcgtactgaacagcaaaatcccgtgtcatactgccatgtacgcgcgcgagagactaccccgccacgcgcgcacgccgatcccctggggcctgggccctggccgccgccgctgcgtgcgcacggcctcactcgctggccttctcgggctcctcaggagcagcagcctccgcctcggcggccggctcctggggaccagcaggagcaggagcaggagcctccggctcgtccgcggcgagctcctcgggagcagcagcctctgcctcggcgacaggctcggccgcggcgggctcctcggcaccagcaggaggagcagcagcagcctcctcctcggcggctgcctcctgctcgaccgcaggagtctcctcgggaccagcaggagcagcagcctccgcctcggcggccggttcggccgcgacgggctcctcggcaccagcaggagccgcggcctccgcctcggcggctgcctgctgctcggccgcgggaagctcctcg

SEQ ID NO: 4254 - DNA, 1728 bp, Zea mays
  Clone ID: 700351905_FLI
ggtaaataaccttcactatagaaaacatgaaatataccactccattttgcaatgtgacctggtcctggtgtaacagattttataacataaatttcccttcaccttctctgttcgtacagaattatggtgcattctttgacctggtaggtgctggaattactggcccagtaaaactgagtggactaaacggtgcgctcgatctgtcttctgcagaatggacatatcagattggactcagaggagaagatttgcacctatatgatccttcagaagcttcaccagaatgggtctcagccaatgcttatccaatcaatcatccactggtttggtacaaggtcagtatggaattcaaatgatcatacattcatagaccagggaaccaatccatatgagacatttaaacacagccagtatggcttaaaaaaacaagatatatacattctatttgtttggctaacccatttctcgagttgctaccttgggttgatgtgctaactgtaatttccaaaacagaccaagttcacacctcctgcaggtgatgatcctgtcgcgattgacttcacgggaatggggaaaggtgaagcatgggtgaatggacagagcattggtcgatactggccaacaaatctggctccacagagcggttgcgtcaactcttgcaactatagaggagcctacagttcaagcaaatgcctcaagaagtgtggccagccatcacagactttgtaagacttccacatagccccccagacaatgctctataatattttcattagttccttttgttccctacctgcagagccagttctattatttcatctgtgtcaattttgtgttcagctctgtctgtaacttataggtcttaatagcagatttacaccctactagatttgaagtactgaaactatggcacaaaaagcatgcagtttcaaaattgcaatactagtgcacactgtaacgctgagcagtttgagcagcgtattctgatgttgcagagaaatatagcaactgcaagaactgaatgactattgattaattggatttgtaccttgttaaacaggtaccatgttccccgttcgtttctccaaccaggcagcaatgatctagtccttttcgagcattttggtggtgacccaagcaagatatcctttgtgatgaggcagacaggaagtgtgtgcgcacaagtatcagaggcacatccagcccaaattgatagttggagttctcaacagccgatgcagagatatggacctgcacttcgcctggaatgcccaaaagaaggccaggtcatcagcagcatcaagtttgcaagctttgggacaccgagtggcacatgtggaagctacagccatggcgaatgcagcagcactcaggctctctcagttgttcaggaggtaactacaagctacccattctcatgtttcaatgtatcaactgaattcttgtgggtcgctgacagtgttactgcgaactctgcaggcttgcatcggagtgagcagctgcagcgtgccagtgtcatcgaattattttggaaatccatgtacaggggtcacaaaaagccttgcagttgaagctgcatgctcgtgacatgtctgattaatattggttcataggaagcaaatcacctaggacaaggtgaaaccttctctgtaggcaagcaggcaaaaaggaataaatgttcccatcctgatcaaaaggaataaaaatattctgaaaattgccacatcc

SEQ ID NO: 4255 - DNA, 3384 bp, Zea mays
  Clone ID: 700351912_FLI
gtgaacagccccgctgtggattcccagagaagaatttatcagtgaatttggagaatttgacaggagggcagaggcaatggtgggaattcaaatcacagcacatggataaggttctgtttttcaagatgggcaaattctacgaactatttgagatggatgcacatgttggagcaaaggatcttgatcttcagtacatgaagggtgaacagccccactgtggattcccagagaagaatttatcagtgaatttggagaagttagctgagaagggttatcgagttctggttgtcgagcaaactgaaacacctgaccagcttgaacttcggcgtaaggagatgggtataaaggacaaggttgtcagacgtgaaatatgtgcagtagtcacaaaaggaacactaatagaaggagagcacctactggcaaacccagatccttcatacctcctgtccgtgactgaaagttaccaacgaagtccaaataagagccaagacacatgtaccattggtgttagcatagttgatgtttctacaagcaaatttattgtaggacagttccaagatgatccagagcgccatggattgtgttcaattttgtctgaaatgaggcctgtggaaattataaagcctagtaaaatgctgagtccagaaactgagaaggcattaaacaacaacacaaggaagcctttaataaatgagctggttccgtccacagaattctgggacgcagaaaagactattgatgagataaaacagtactacagctcagccaataaacagaaaaaagccgatgatatacaagactgtgtggactgtctgcctaacttattacgcgagttaattggagcaggtgataaaacatatgcactttcagctctaggaggttccttattttatttaaggcaaacccttctggatgagaaaatacttccatgtgctgagtttgagccacttgcatgctcggggttcatcaacaatatccgaaaacatatgatacttgatacagcagcattggagaatctagaacttttggaaaatacaagaactggtggcctctcagggaccctgtatgcacaactgaatcattgtgttactggatttggaaagagattgctcaaacggtggatcgcaaagccattgtatgatcgcagagaaatacttcggcgtcaaagtgctgttgctactttcaagggagttggccaagattgtgctgcacagttccgtaaggatttgtctaggctccctgacatggaacgcctgcttgcacgtcttttctcaagctgtgatgaaaacaagagaagttcatcagttgttctttatgaagatgcatcaaagaaactgcttcaacagtttacttctgcgctttgtggatgccagcagatgttccatgcatgttcttctattagtacattgatatgctcagagggatctcaacttattgatttgctgtcaccaggcaaaggcctatcaaatatttcatctattttagaccgattcagagatgcatttgattggtcagaagcagaccgcaatggtcggatcattccttctgaaggttgtgatcctgaatatgatgccacttgcaatgcaatagaagagatcaaatccagtctaaaagagtacttgaaggagcaacgaaagcttttgagacctgcatcggttaattatgttaatgttggaaaagatatgtacctaattgaagtgcctgagagtttgggaggttcagttcccagaaactatgagttgcagtctacaaaaaagggtttctatcggtactggacgccagaactgaaagagctaatattagaactttcaaaggctgagtcagagaaagaatcaaaattgaaagccattcttcagaatctgattcagctatttgttgagcatcacactgagtggaggcagctggtttctgttgttgctgagcttgatgtattgacaagtcttgctattgcaagtggttattttgagggaccaagttgctgtccaactataaaagaatcaaatggcacagacgatactcctactttccatgctagaaatcttggacatcccattctacgaagtgattccttaggcaagggttcatttgtaccgaatgacgttaagataggtggtccagggaatgccagttttattgttcttactggtccaaatatgggtggtaaatcaactctcttgcgccaagtttgtcttaccattatactggctcagattggagcagatgttcctgcagaaaaacttgagctttctcttgttgaccgtatcttcgttcgaatgggagcaagggatcatattatggctggccaaagtacattcttggtggagctcgaggagactgcctcagtgctttcatcagctaccaagaattctcttgtggtgttagatgagcttggacggggtacatcaacttctgatggacaagctatcgcggcttcagttctggaatatctagttcatcaggtgcagtgtctaggcttgttttctacacactatcataggttagcaatggaacacaacgataccaaggtatcgctgtgccatatggcgtgcgaggtggtcgagggagtaggaggtctggaagaagtgactttcctttatagattaacacctggtgcttgccctaaaagttatggtgtaaatgttgctcgattggcaggaattcctactaaattgcttcaaagagcgaatgaaaagtcgagtgaatttgaggccaattacgggaagcgacacaagatgaccaacgataagcacgtcagtgcacagagcgatgataagttttctgccataagggatctgtttcgaattgtgaagacatggcctcgtcctgaagatcaggaagcgagtataagcatgctccgtaaattgcagaagcgtgccaaggtataggctgtggaaggctaggtaggcgattgttacatagcatgctcgcctggtagagatggcctcgttttgctaccttggtggcattttttttgttggattggcgtcataccgagaggggagaaaattacgtggacacgggttccaatcgaggacagcattgccctaggtttagtgtggaagcagaaaaaggctcagtcccatcggatgtgtcaggattcattgatgggacgtggattgagaattctgcgtctacagctttactatcccttccaacaattttgtgccctcactaattctcctaccaggccaggagccccaaggtattggtctgtcctggtttgttcgagctcggtagggtgttggatcagtgctgacctgagacgtggagaaacatcccggactgtaactttcctgaagggttaattatgattactatatgtaaatcagaactactctctcgaagttgcaaggcaacttaggattaattttagtgcctttttgt

SEQ ID NO: 4256 - DNA, 1653 bp, Zea mays
  Clone ID: 700351932_FLI
ctcctcgttctcccattctctctctcctctcccgagtccctccccctatccccccccctctccgcctccgtcgctagggctccattcccctgcgcatccgccgccgccggatcccgcctcgcctccgccgcagcttcggcatcagaatcaccggattcggtggtgtttctcggctgcctcagcttccgccggcggaaggccccaggcggcgctccctgcagccctccggccttcactgagtcctccagaagccaaacatcgttgatacttcgaaggcagctgagtatatggtatttgtgggccattgtgctgtccatgcgagcggagagcatgcgtggcacctgtgcttcgggtgatgcccctgaccagagtagctgccgatgcattcggtgtgctgacaatcgcactgtttgctctgtttgctgctctgggcctcttctgcatcttccagtcggtctacttcaggtgtcggattcggagaggaccctccttccttccgcttggttattttaacggcccatgggtgactcgcattgctctgattctgatcacaatttggtggggagtaggtgagatagtgagattgagcttcttgaagaaaaagttgttctccagcttaacatggcagaggaacatatgtgatgtgtacatactttccaacctagggtttgcagagccagggatcttctttgcgtttgcttttctgctccatggctcgttacaaaagagggagctgggcacattaaaccaaagatggaattggaagaccatggcctacttgttggttttctgtattccagtgttctcggtgcaggcaatcctagtgtttgttgggcccaagtttgttagagaggagaaccatgatctcgggagaaggaagattgctaaatacttcatacggacctacacgccggttggagataccagtgtttgcacttacccattgtttggcaccctttttcttggacttgtagatgctttcctgatgagctatgtatcatatgttggattacgggtgctgtccttggttattaacaagtcactgcgaaggagagtttatctactgatgctgtctgtgctgtgcttccttcctatcagggtgcttctcctcgggttttcggtgctgctcaagccaggacatgttgcctttgagggtattatcttcctgtcattcttgatgatgctgtcctgcacgactgttgggatactcttgctggtttactaccctgtagctgattcattggccctccgagatataggccagagggacatagcagaaatggtgccttatgatgattactactatgaaggcacatcgcttgtggccaaccagagtttccgagaaatcgagcggaattctgacacttcaacgaagccgggatccatatccttccggacaatgatcagggaagaccaactccagcaggacggtacggatgagatcggattctcttcgcgcagtggtgtccatattggatcgccctcaggctcttcgccaagcgcagcagtgccgatgctccctctcaaggaaatccctagatactaagaagtattcacctgtgactttgcccctctactgtgttctccttctcccccccctttttcccttctctttcctcttactaccttaatgataacagttttgtggcaatc

SEQ ID NO: 4257 - DNA, 1322 bp, Zea mays
  Clone ID: 700351965_FLI
agacgaccttcttcccatcccttcccttccctctgctagtctgcttcgttcctcggccatggtggtcctcgccaagggtgagctcgagcagatcgccctcccggctgcagagccgcccccggccgacgtgcggtcggtggacctgtccgccccggcgggccccgcgcgcgaggccgcggcgcgcgcgctggtggcggcgtgcgaggagcacgggttcttccgggtgacgggccacggcgtgccggccagactcgtgcgcgccgcggaggccgcggcggccgggttcttcgcgcggccacagggcgagaaggaggaggagggccccacgctcgggtacggaagcaagcgcatcggcggcaacggcgacctcggctgggtcgagtacctcctgctcggtggcacacccgccgccgccgcgtcctcctcggcattattgccctgcgccgccgccccgtcgccgtccgcgccggccgggccgttacgggaccttctggacgagtacacggtggcggtgcggcggatggcgtgcgcggtgctggagctgatggcggaggggctgggcatcgccggggacgcgccgcagctggcgcggctggtggcgcgcgcggacagcgactgcatgctgcgggtgaaccactacccgccgcggccggcgctcaaccccagcctcacggggttcggcgagcacaccgacccgcagatcatctcggtgctccgcgccaacggcacctccggcctggagatcgcgctgcgggacggcgcctgggcctccgtcccgcccgacggggacgccttcttcgtcaacgtcggcgacaccctgcaggtgttgacgaacgggaggttcaggagcgtgaggcacagggtggtggtgaacagcgagaagtcccgggtgtccatggtcttcttcggcggcccgccgcccggcgagaggctgggcccgctgccgcagctcctgggcgacggcggccggagccggtaccgggacttcacctggagcgagttcaagaccagcgggtgcaggaccaggctcgcggaagaccgcctgtcccgcttcgagaagaagtagctagaggctacgtcatttgcatgaccggcggtaggatcgattaccatgtatgcttctctgtatatgtcagttgcattgccacagctctagctactggcgcccgtacgtgtatattagtggccatgctcgtattgtacgtgcacgtgtatgcacgcatatacatggtggcaccacacagggtatcatgcatccattgttatctatccatgagtaccaaccatgcatgcatggtcctgttattagcttttacaattac

SEQ ID NO: 4258 - DNA, 1592 bp, Zea mays
  Clone ID: 700351984_FLI
ggccgtctcgactgccccagtcctttctcagatccatgtctacccagaatctgctaactggcgcgtgcacgagctccgccccggccccgtccgaggcggaggaaggggacaggacgcctttggctgacgctgcgaacgcggcggaagagctgtaccgcctccgtgacacctttttcccccgggacccttccgagaaagtcgccgcactccgcgcccgcgccgacgccgccctcgcgctcctcgacgccttcccgtccgaacaaaagaagtctcgacaactgcgtggtgtttatgaatttttgaggggaaaaatactggatgtctttcctgattatcataaggaggctgaagatcatttatccaaagcagtaaagttgaacccatctcttgtagatgcatggttatgtttgggtaactgcatttggaagaagggggatctatctgcagcaaagaattgtttttcattagcactaagcaagggttcagataagaaaatactgtgccagatctccatgcttgaaagaagtatggctcaaggtagtgtagaccaggcgcttttagtagaagagagcattaagcatgcaaaagaagctattatgctggatattagagatggcaattcttggtataatatgggcaatgcttatctcactagcttctttgtgggaggagcctgggatcacactaagcttcatcattcagtgaaagcatatcaaaatgctgagaaggataaaactatgaatttaaatccagacctctactataattgggccacagcagacaaatatttagagaattatgaaagggcccttcgtggttttgaagttgcagctttaaaagatcccgggcttggtgctaatacagaagttcagaagatcatcagtctccttgataagcttgataatgcaatgaagggacaattacgatccaaaagattagcatcatttgtgtcatccttgagtggagtcaaattgaaatcatcgcacaagaaagccaccataagcactctatcagtgggtttgaacaaagccgttgctgttttgggaaaagtaattctgttcataagacatgacaatgttgctccgctgtattatttaatatgtgacttggaacggtcatattttatactgtcagtgtatgggctacataatgatgcaattaaagacggtgatcaagtggtattatttgaaccatactaccgaatccttgatgcatcatgtaaagacaagcactatcagttcaaatcaatacgagtggactttccagaacaaattctagttaacgagagagttccagcacctcatcatgttgcacgggcatcaatccatgcacacaacaaatcttgaccggtgaaaatttggtattgtgatttagttggtagccagtacttattttgtttttgatgtttattagacttattacaggaaaaccattctgcaagtttttatcagggtactgtgtggcgtcaataccgtgagcaactgccagctgggcatatcatgtgtactcgcgtaaatgtgtagtgacatgttaccctatggctcaaaatgtgtaaggaagacttgggaacatattaaccatctcatttctcc

SEQ ID NO: 4259 - DNA, 2077 bp, Zea mays
  Clone ID: 700351990_FLI
gatatctttaaggggatcaatttgaagcttctcgcctttgagaacatgttgaggacacatcccaagtggcaggggagagcagtgttagtgcagattgctaacccagcccgtggaaggggtaaagatctggaagccatccaggctgagattgaggagagctgccagcggatcaatggagactttggccagtcagggtatagccctgttgttttcatcggccgtgatgtgtcaagtgttgagaagatcgcctattatacgatagcggaatgtgtggtggtcactgctgtgagggatgggatgaacttgacaccgtatgaatacgttgtctgtaggcagggtgcaccaggatctcagtcggtatcagaggtgagtgggccaaagaagagcatgctggttgtgtcagagtttattggctgctcaccgtcactgagcggtgctattagggttaacccatggaatatagaggcaaccgcagaggcgatgaatgaggccatttcaatgccagaacaggaaaaacagttgaggcatgagaaacattaccgttatgtcaggagccatgacgtcgcttattggtcaaagagcttcatcatagacttggaaagggtttgtaaggatcacttcaagaggacttgttggggcatagggttgggttttggtttcagggtggtggccttggaccctcatttcacaaagcttaacatggattcaatcattaatgcttatgagctttcagagagcagggctatattgctcgattatgatggaactctggttccccaaacttccctcaacaaggaacctagtccacaggttttgagcatcatcaataccctttgctcagatagtagaaacatcgtttttcttgtcagtggtcgagacaaagataccttgggaaagtggttctcctcatgtccaagattggggattgcagctgaacatggttacttcttgaggtggtctagagaagaagagtggcaaacatgcactcaggcattggacttcggatggatgcaaatggcgaagccagtgatgaatttatatacagaagcaactgatggatcctacattgaggccaaggaaagtgccttggtgtggcaccatcaggatgctgacctaggctttggatcctcacaggcaaaggagatgcttgatcacctggaaagtgtactagcaaatgaaccagtctctgtcaagagtggccagttcattgttgaagtcaaaccacagggaataagcaagggaatagttgccgagaggatacttgcatcagtgaaggagagaggaaagcaggctgatttcttattgtgcatcggcgatgataggtctgatgaggacatgtttgaaaatattgctgatatcattgggaggaatttggttgctccaagaacagcactgtttgcgtgcactgtgggacaaaaaccaagcaaagccaaattctacctggatgatacattcgaagtggtcactatgctgagcgcactggcagatgccacaggtcctgaactggagactgattcggctgatgaatctgtcgcatatatctcatcacttgatattggtgacgaacaatcagaatccagtgataaaccagttgaagggtcttagccagttttctcttgcgttttcagaacatgatgattgtttcaatagtcaattctattctacacaattttctgatgggaactcaacgactaacaactggttctacgaatgctccagagtgaagcttctcaatctgctgtgctccaagttctccagttgggcaagatagtacagtctgttgctccaaggcgtagatccatatgttcatagctgacttacttggcacgttctttcactttctcattcctggttgaattaaaatgaaaacctcacagaagacaaagggagcgctgtttggctcattggctgaagtaatctggggggaggtataggagtggcgtatgtgaaaggagcctgtgcgcaggttgtgatatgattccttattaacacgacgttacaaagtggtgtcacttcttgaactaccagtagtaacaatccccaagagtgaggttcgaattgattaattaattgcttc

SEQ ID NO: 4260 - DNA, 1421 bp, Zea mays
  Clone ID: 700352002_FLI
ctttggttcatcttcggcagcttctacaccaactttagcctctgtgtttgcaactggttcctccactgtgccatcagcggctgcagcttctgcagcatctgggtcgtcgttcccagctgtttctaccagtggttttagttttgcagttgcgccatcatcatcagcagctgcagctactgccactaccaccactgtcacaagtgcttctacatctgcaggcatgacaaccacggctcctttgactggaacaacggggtttccaaattttaatcttcaaacaactaccccagcttctacctcatctcccacactggcatttggtgtttctactactgctgctagctcatcagccaccagcaccacaactcaagcaacttcctcagctgttcaagtcagcagcacaggtccgactactactacatctatcactccagcagcatcccaagcacctaagctaccatcagaaattgttggcaaaaatgttgaggagattattagggactggaacaatgagcttcaagaccgtactgcaaaattcaggaaacatgccaccgcaatagctgaatgggataagagaattctgcaaaacagaaatgttcttattaggcttgaggctgaggtggctaaagttgttgaaacacaaacaggcttggagcgtcaacttgaattgatagaaactcatcaacgagaggtagacaaggctctacagagtatggaggaggaagctgaacgcgtattccaggatgaacgagtgttacttcatgaagatggagctgcttcagcaagagatactatgtatgaacaagcagaagttgtggagcatgaactgcaacatatgacagaacaagtaaaatccatcattcagactatgaatgctactcagggtggtgagctcgagtccgctgatagtatgacaccatttgatgttgctgtccgaatactggataatcaactgcgttccctgatgtggattgatgagaaggttaatgagttctctggcagaatacagaggctgcctaacaacagcgtttcagccgaacgtgactctggaattcccaggttttggttaagctgattaattcgccgcattttcttgcggccctaatcgaggttcagtaaacattcttcgcttggttattctgctgctccaccggccaaggtttcgcgttattttctccccgttcaagcactttggtgccatgtagctctagccggttcactctggattggtaccattcagtgtcacttgtgcacacttcagcatagtttctatttgtttaacgttggacgtgattacggcatgtttggatctatttgtgttaactgttttagaagctaaaattagcactatttacgctattgtgttcaatatggagcacaagtctgcagaactaatctcaactcactttcatcccttaaaa

SEQ ID NO: 4261 - DNA, 1337 bp, Zea mays
  Clone ID: 700352012_FLI
ctttgagagtaagtgagagagcaagcaggttgctagccgaccaggttgccagctagccatggagccggggtcgacgcccccgaacgggtcggcgccggcgacgcccggcacgccggcgccgctgttctccagcggcgggccgcgggtggactcgctgtcgtacgagcgcaagtcgatgccgcggtgcaagtgcctgccgctgccggcggtggaggggtggggcgtggcgacgcacacctgcgtcgtcgagatccccgcgccggacgtctcgctcacccgcaagctgggcgcggagttcgtgggcacgttcatcctcatcttcttcgcgacggcggcgccgatcgtgaaccagaagtacggcggcgcgatcagcccgttcggcaacgcggcgtgcgcggggctggcggtggcgaccgtcatcctgtcgacggggcacatctccggggcgcacctgaacccgtcgctcaccatcgccttcgcggcgctgcgccacttcccctggctgcaggtgcccgcgtacgtggccgtccaggcgctggcatccgtctgcgccgccttcgcgctcaagggcgtcttccacccgttcctctccggcggcgtcaccgtgcccgacgccaccatctccaccgcccaggcgttcttcaccgagttcatcatctccttcaacctcctcttcgtcgtcaccgccgtcgccaccgacacccgcgcagtgggtgaactcgccgggatcgcggtgggagcggccgtaacgctgaacatcctcgtcgccgggccgacgacgggcgggtccatgaacccggtgaggacgctggggccggccgtggcggcggggaactaccggcagctctggatctacctgctggccccgacgctgggcgcgttggcgggggccagcgtgtacacggcggtgaagctcagggacgagaacggtgagacgccgcgcacgcagcgcagcttccgccgctgacgacgcacactggccgcgggcgcgagacattgtccggccgtgtcacgcacgcccgcgtcctcctcctcctccgccgccgcgtaacgcacggccacgacgtgtccgtggtcgtaagtgctgtgtctgtgtgtaccaataaataagccccgttttgcttcgtccagaacggtccagtgctacgtgtagtgtatctgtgttgtgatttgcgaattggattattgtgggtcgtctcgtcgaggtctctcgggtgtcgggtgggtctgatgcgatccatcagcgtcgtgtccgaataaaagccacgccgatgcgccggctgacgggcatctggatgtgtgatttctgaacaagatttgcttaatttcacttgctt

SEQ ID NO: 4262 - DNA, 1031 bp, Zea mays
  Clone ID: 700352025_FLI
acgatttgtctgtcacgactttctccccagatggtcgtgtcttccaggtcgagtatgccaccaaggccgtcgacaacagcgggactgttgttgggatcaagtgcaaagatggcattgtcctgggtgtcgagaagctggtaacctcaaagatgatgctggaaggatcaaaccgaaggatccattcggtgcaccgtcactctggcttggttgttgctggtttagcagcagatggcaggcaaattgtttcaaggaccaaatcagaagctgccagttatgaaaaggtttatggagaacccatttctgtgaaggaattggctgatcgtgtggcaagttatgttcatctttgcacgctgtactggtggctcaggccttttggttgcggtgttattcttggaggttatgatagggatgggccacagctctacatgatagaaccctcaggagtttcctacaaatacttcggtgctgcattggggaagggaagacaggctgcaaagactgagatagaaaagttgaaactttcggagcttacctgccgggaaggcattgttgaagttgcaaagataatttatggagtgcatgacgaagcgaaggacaaagcttttgagttggagttgagctggatctgtgatgaatcgaaccgtcagcatcagaaggttccaaatgaactgttggagcaggccaaagctgctgctcaggcagctcttgaggagatggatgctgactaagaaacaggacgatttgcccagacttggtgtttttggtgctgttgaaatctccgatccctttggggtgacccactggacatggccaatttgtcacaatttattattttgacccatgtcatgtgaaactcctttcgttgaagtctggtatctagattgacttgtatcagagctgtggtttacgcagactggattctggagtactggactgtgtgtgtgtttttcggaactgtgcatctgacttttagctgttcgttgactttgtttttcttttttcagataaagagctgtttcttgatttgatgc

SEQ ID NO: 4263 - DNA, 1282 bp, Zea mays
  Clone ID: 700352036_FLI
cgcgctatatgtctcgtctatctccaacgagctcaggatccctgtcaggtacctgcgagaggataagcctcacgggtcagctggagggctctacatctttagagattacatcatggaagacagcccgtcacacatagttctgcttaactgcgacgtctgttctagcttcccccttccagacatgctggaggcccataaaaaatatggaggaatgggtactttactagtcaacaaggtatctgcagagtcagctaaccagtttggcgagttggtagctgatcctgaaacaaacgaactgctgcactatacggaaaagccagagacttttgtgagtgatctcataaattgtggagtatatatatttacccccaatatctttagcgccattgaggatgtcttaaaacagaaaaaagacagagcaaatttgcggcgtgtatctagctttgaagctcttcattcagcaaccaaggctcttccaccagactttgttcggttagatcaagacattttatcccctcgagcaggaaagaaagagctgtacacataccagacacttgatttttgggaacagataaaaaccccagggatgtctttgagatgctctggattatatctttctcggttccgccgtacctctcctcatcttttagcctcaggagatggcaaaagaactgccactattgtaggcgatgtgtatatccatccatctgccaaggtgcatcctacttcaaagattggccccaatgtttctatatcagcaaatgcgcgcgttggagctggtgccaggcttatcaattgcataattctagatggtgttgaaattatggaaaatgccgttgttatacattcaattgtggggtggaagtcatccattggaaaatggtcacgtgtacagggcgaaggtgatcaaaatgccaaacttggcattactattcttggtgaagccgttgatgttgaagatgaagtagtgatagttaacagcatcgtgctcccaaataaaactctcaatgtcagtgtccaagaggagatcatcctataatagccgtcattttttgttttatccctaataaggtctgagtaccaatcacatagtttaagtttattcattctcaccatgtaagcttctattagattgagattattgttttgggtttataccttgcagcatgccactgcacaatcttgacttgctgtgctactttgattagcgagtgtggtgtaaaatgtacgaacaactaacacccgagctgctagcttcagattaaagcaagctgttcaaact

SEQ ID NO: 4264 - DNA, 1566 bp, Zea mays
  Clone ID: 700352054_FLI
cacccgccgctagcactgtaccagcgctagggggcaacgttgtagtgggaagcggaggcctgtagccgccaaatacaggggagggggacgcgttgaagagagtctgaggcgaacaagggcgacggttcgtctcgctgcgtgcactctctgtcactccccctctctctcctcatcagatccggccacttcctgctcgcctcgccgccggtcccgcgccccggagccctagagctctccccgcgacggggccgccggagtccccgggcgcgcggagagaatggaggcggcgctggaggcggcgcgcgccaaggacaccaaggagcgtctggccggggtcgagcggctgcacgaggcgcttgacgccgcggcgcggcgcgggctgacggcggccgaggtcaccgcgctggtggacacctgcatggatctgacgcgggacgccaacttccgcatcgcccagggcggcctccaggcgctctccgtcgccgccgtcgtcgccggcgaccacttcaagatccacctcaacgccctcgtccccgccgccgtcgagcgcctcggcgacgacaagcagcccgtccacgacgccgcgcgccagctcctcatcacgctcatggaggtttcttcaccaacaatcatagttgaaagagctggtagttatgcatggactcataagagttggagggtgagggacgagtttgtacgtacggtggcatctgcagttgggctatttgcttctacggagatttccttgcaacgagttttgctttcacctgtcctgcaactaatgaatgattcgaaccaaagtgttcgagatgctgctatctcttgtattgaggagatgtacaagcacatgggatcacaatttcatgaagagttgcagcgccataatctgccttcatacatgctaaaagaaataaattcaaggttggataaaatagaaccaaaggttcgatcatctgatacaacaatgcagtataaggctgtagagtctagaggcaatgctgggatggagcctgttggcagtgggacaccttcaggttctgttaatgatatggaaaatgaggaatcaggttcaaaaggtaaaaggccattaggacgggactccacgaaagcatcaaggaagaaggcaatgtctagttcctcccagtctactaactacctttcaagaattcatgacattcaaatagcaagactgaagcaaagtgaagaaaaatcagagctgaaacaacagaatattgagttcatgaaggaagttgaactcaaaaagttggagtttcaatccaagaaaatagaaatgcagcaaactaaattgatgatggaagacaggatccgaaaggacgaagagctgaataaaatgtatgctatggatatggatgctttaccagaagagttgagagctgtatacatcgcgaggagaaaaggtttaatcgactatttcatcaagaatccagtgtgatgagtattattgtatttcataatatgttgcgaaccaattttcggcgtatcgtggtcgggtgtgttcggccatctgtgatttcagtttgttgaacatttgcttcattgtttgac

SEQ ID NO: 4265 - DNA, 1836 bp, Zea mays
  Clone ID: 700352082_FLI
cgcacacacacgcaaccagatctcccccaaatccagccgtcggcacctccgcttcaagatgcagatctttgtgaaaaccctgactggcaagactatcaccctcgaggtggagtcgtctgacaccattgacaacgttaaggccaagatccaggacaaggagggcatccccccagaccagcagcggctcatcttcgctggcaaacagcttgaggacgggcgcacgcttgctgactacaacatccagaaggagagcaccctccaccttgtgctccgcctcaggggaggcatgcagatcttcgtgaagaccctgaccggcaagactatcaccctcgaggtggagtcctccgacaccattgacaacgtcaaggccaagatccaggacaaggagggcatccctccagaccagcagcggctcatctttgctgggaagcagcttgaggacgggcgcacgcttgccgactacaacatccagaaggagagcaccctccacttggtgctgcgcctcagaggaggcatgcagatcttcgtgaagaccctgaccggcaagactatcaccctcgaggtagagtcttcagacaccatcgacaacgtcaaggccaagatccaggacaaggagggcattcccccagaccagcagcggctcatctttgctgggaagcagcttgaggacgggcgcacgcttgccgactacaacatccagaaggagagcaccctccacttggtgctgcgcctcaggggaggcatgcagatcttcgtgaagaccctgaccggcaagactatcacccttgaggtggagtcttcagacaccatcgacaacgtcaaggccaagatccaggacaaggagggcatcccaccggaccagcagcgtttgatcttcgctggcaagcagctggaggatggccgcacccttgcggattacaacatccagaaggagagcaccctccacctggtgctccgtctcaggggtggcatgcagatctttgtgaagacactcactggcaagacaatcacccttgaggtggagtcttcggataccattgacaatgtcaaggccaagatccaggacaaggagggcatcccaccggaccagcagcgcctcatcttcgccggcaagcagctggaggatggccgcaccctggcggattacaacatccagaaggagagcactctccacctggtgctccgcctcaggggtggcatgcagatttttgtgaagacattgactggcaagactatcaccttggaggtggagagctctgacaccattgacaatgtgaaggccaagatccaggacaaggagggcattcccccagaccagcagcgtctgatctttgcgggcaagcagctggaggatggccgcactctcgcggactacaacatccagaaggagagcacccttcaccttgttctccgcctcaggggtggtatgcagatctttgtgaagaccctgactggaaaaaccataaccctggaggttgagagctcggacaccatcgacaatgtgaaggcgaagatccaggacaaggagggcatccccccggaccagcagcgtctgatcttcgccggcaaacagctggaggatggccgcaccctagcagactacaacatccaaaaggagagcaccctccaccttgtgctccgtctccgtggtggtcagtaagtcatgggtcgtttaagctgccgatgtgcctgcgtcgtctggtgccctctccatatggaggttgtcgaagtatctgctgttcgtgtcagtgttggtttaataatggaccggttgtgttgtgtgtgcgtactacccagaactatgacaaatcatgaataagtttgttgtttgaaatt

SEQ ID NO: 4266 - DNA, 1303 bp, Zea mays
  Clone ID: 700352084_FLI
gccaaccaaagggctggatctaggaagcagctttttctaaaagctgactttctcacagtgcaaatctgaaagcacccctaaacctgcttttagtgacttttcggatggaactgtgaaaacatatatcgaagaacttttaacgacttttagtgatttccaccaaacggtttttagctttttaacgactcacagcctacagcagctttttccacagctcacagcccacagcaacttttttcacagccacagctcaaccaaacagaccctatataccaatgagaacaaaaaaaactgaaaaacagggaataaagcgaaactacaacagttataggacagaagggcagacctggtgcaatgatgagagctgtctcactccatgtcgtaggttcgaacttcaaagcagcctcctcatttgcaggggaaggcttgccttagtttatcctatcccccgacctgctaatatgggagcctgtgacactgggtctgccctacaacagttataggacaacctatatctcaacaggcaagtacattattgcaccacaagttaggagcacacactttgtgtccttggtgataatgtttgaggctcaacaagttgcaatgatttcttcctatttatgttactgtattgcaatcatagaactgccaacaaaattttgttcccttttctgaaaaaaaatgtgttgcattgactgccaagtatgaaactattgagttataaatctgctaccaatgagcttcgttgtgtgcttgtttagacagatactggttttcttcagtaatcatcagttcaaatgtgtccatgctgtacaactagtgaacagttagtagagctgtagaggagatggtgagaaagcataaattcggcacagttcattcttggcttcaaattttgtgcttctgtctgcttcccagagagtgcatcctttgtcaatagttcagataactcattacaacagctgcatatcagaaaccaataccatatgttggtgacaaattatgctgcatcagtatgacttattttgtatttgtgcttgttcttcagattcccttaggtctagttcaagggcgggttacgcacataatctggcctccgtcgaggataggccggctggagagaaagatgcatgaagggagaatttcacctgattgatcttactcccgactacattggatgaccattcatgtccagataaacctgctcaattaccatttattgtcaaaaaatcataagttttgtaaagccatgaatgtatacttgccccagtagttgtattgtgatattgtgttctgggatctt

SEQ ID NO: 4267 - DNA, 1399 bp, Zea mays
  Clone ID: 700352106_FLI
gttaaagaaggattctgatgttttattgaccaacctgaaattcctagaggaaaacacaagaaagattcaaaagtctttcgaagatgaaagaacagctctcagaaaattaacagaggaacaccgagcagctaatgaaatacgtcaaaaggcctacattgaatggactgagcttagatcagagccctccaagaagaatgaatacttcttcaggtacagggatgaccggaatgcagcagaaattttcagagctaatggcgatataaatggacttaaatcacactgtaatagtcagattgagggagtcatggaaatgtggaacaaaaacgaggaattccgcaagcagtatgttgagtcaaacaaggttagcacactaaagagattagggacccatgatggacggaaacttggccctgatgaggaccctccagtcatatcaagcagaagaccaagcagcatctatccattgtctgcctcaagcccgggagtggccactttagcttcaataccagcacctgtggtagctgctccagctgcagtctctgccaaagaggactcctttcctgttttggaagccccccagaccagcaagcgcaccaagtcaaaagcatctgatatctgtgcccagaccgagaacaactctgttatagtatcggaggcagaggctttggaacagactttgaaagagaaagctcgtctattggaggaacaattggagttagctaggaaggcagaggagttggcacggaaggaggaggaattaagcaaagagagggctgccgctgagaaggagcggcttaggatggagcagaaggctaaggccaaggaggccgaggagaggaagaggcggaaagccgagaaggacaaggagaaagccgagttcaaagcgcgcaaggaagctgaggagagggagaagaagaaagccaagaaagacaaaaggagaggcacggcaccagcagattctagcctcactggtgacgggcacgccgcggccttggccacagcagacactgacagcaacgcatcggacaacccgagggaagctgaggctcctcaaccggcggcggctcccaagaggctgtctaggcccgcagcggcaatcaagcagctgaacagggtgcagcccatgccggcgccgctacgtaacaggggcagaaggagactgcggcagtacatcctgatcgcggcggccgtgctatcggggcttgcgttgttcgtggcaggcaactatattcccaggctcaagtcggttcactcctaagtttatctgtaggaaaggggtgctaatctgtcgcggtgaacctgggtgtgattcgtattatttcgattattctccggttggtttgtactattttttttacctcatataggttggttgtgaaagatgggggtgcattgtgtt

SEQ ID NO: 4268 - DNA, 1021 bp, Zea mays
  Clone ID: 700352112_FLI
aggcaacatccgaggcgtggctgtcaaagcatatagatgactctgtaggatatagttcaaatggttcaaatgttgttatatgggacacactgtctccaccagctacatctcaaacatctatcatgtgtcatgaaggaggagctcggtctatttctgtgtttgatagtgatagaggctatgggtctatctcaccgcttgttgtaactggtgggaaaaatggagatatagctttgcatgattgccgcttcctttctactggaaagtccaagcatcatagagttaccactgagcatggtgtcgaggcatcttccatgcatgacatcaaatctagtacttttggtggtactgacagtgggatggtctggcatataccaaaggctcatctaggtagtgtcacaaaggtaacgaccatcccaaataccagcttgttcttaaccggaagcaaagatggagatgtgaaactttgggatgctaaaaactcccagctagtctttcactggacaaagatgcatgaacggcacaccttttttcaaccaacctccaggggctttggcggtgttgttagagctgctgtaacagacctccaggtgttgcctaatggtttcgtttcatgtggaggtgatggttctgtgaagcttgttcagataaaagatgatctcgctgcagcatatcagcgttaaaacaagcaaagagggaagaagacatgctagaaaatgcgatggatgcagttggtcacttgataccattctattttgcttcgctcattatacttttgagatgctttactcctttcaggggtggtatagcaaggaggaagctatgatttaagagcactagagcagacatctagccaatttgacatcagcatttatacgtcgagtttttatatgagcctggtttgtggctagtcaaactgccctcagtggtttttttgaggcctgaattttcgcactttggacagggcaatgcggaccataattttttgtacatctgtacagtcaaatatcttgttttgttggcc

SEQ ID NO: 4269 - DNA, 1642 bp, Zea mays
  Clone ID: 700352146_FLI
cttcgtactcgcctatctccgcgactcaaagctttccccaattcccccccttctcccatttctcaccaccgccgccgctccccccgttcaacaacaccatgagggagtgcatctcgatccacatcggccaggctggtatccaggtcggaaacgcgtgctgggagctgtactgcctcgagcatggcattcaggctgatggccagatgcccggtgacaagaccattgggggaggtgatgatgctttcaacaccttcttcagtgagactggcgctgggaagcacgtcccccgtgctgtttttgttgaccttgagcccactgtcatcgatgaggtgaggactggcacctaccgccagctcttccatcctgagcagctcatcagtggcaaggaggatgcagccaacaacttcgctcgtggtcactacaccattggcaaggagattgttgacctgtgccttgaccgcatcaggaagcttgcagataattgcactggtctccagggcttcctcgtcttcaacgctgttggtggaggaacgggctctgggcttggttctctcctcctggagcgcctgtctgttgactatggcaagaagtccaagctcggtttcaccgtgtacccatccccccaggtgtccacatccgtggttgagccatacaacagtgtcctgtccacccactctctcctcgagcacactgatgttgctgtcctgctcgacaatgaggccatctatgacatctgccgccgctcccttgacattgagcgcccaacctacaccaacctcaacaggcttgtctcccaggtcatctcatccctgacggcttccctgaggttcgatggtgctctgaacgttgatgtgaacgagttccagaccaacctggtgccctacccgaggatccacttcatgctttcgtcctacgctccagtcatttctgctgagaaggcctaccacgagcagctgtccgtggccgaaatcaccaacagcgccttcgagccatcctccatgatggccaagtgcgacccccgccatggcaagtacatggcatgctgcctcatgtaccgtggtgatgtggttcccaaggacgtgaacgctgctgtggccacaatcaagaccaagcgcaccatccagttcgtggactggtgcccgactggcttcaagtgcggaatcaactaccagcctcccagcgtcgtccccggcggtgacctggccaaggtgcagcgtgccgtgtgcatgatctccaactccaccagtgttgtggaggtcttctcccgcattgaccacaagttcgacctcatgtacgccaagcgcgccttcgtgcactggtacgtcggtgagggtatggaggagggcgagttctccgaggctcgtgaggatctggctgcgctcgagaaggactacgaggaggtcggtgctgagtttgacgagggtgaggacggcgacgagggtgacgagtactagacgctctactggcgcggcgtcgtcgggcttgtgtgccactgctatcctgtgatctgccctgagtggctcctatcgtgttatgtttctgtcggttcttatctatctgtcgttgtgtggtttacaacttacgttgtaagactttattcccccgctttgctactgggttattaagtttggcgttattgttt

SEQ ID NO: 4270 - DNA, 1617 bp, Zea mays
  Clone ID: 700352166_FLI
gactagtcaggcagccaaagtggggccacctaagggatgtgcacaaggccataaagctctgcgaaccagcgctcatagcaactgatccgtcatacacttctctaggtccaaatgttgaggcagcagtatacaaagttggttcagtttgcgcagcattccttgccaacatagatggtcaatctgataaaaccgtcaccttcaatgggaagatgtacaggcttcccgcctggtctgtcagcatccttcctgactgcaagaatgtggtacttaatacagctcagatcaattctcaaacgacaggttcagaaatgagatacttggagtcgagcaacgtcgcatcagatggctcatttgtcacgccagaactggcagtatctgactggagctacgccatagagcctgtaggtatcacaaaggacaatgcacttacaaaggctggactgatggagcagataaacaccacagcagatgccagtgatttcctctggtactcaacaagcatcacagttaaaggtgatgaaccctatctaaatggcagccagtctaatctggcagtcaactcacttggacatgttcttcaggtctacatcaatggtaaaattgcaggaagtgcacaaggtagtgcaagcagctcactcatctcatggcagaaaccaattgaacttgtacctgggaagaacaaaatagatcttctaagtgcaacagttgggctgtcgaattatggtgcattctttgacctggtaggtgctggaattactggcccagtaaaactgagtggactaaacggtgcgctcgatctgtcttctgcagaatggacatatcagattggactcagaggagaagatttgcacctatatgatccttcagaagcttcaccagaatgggtctcagccaatgcttatccaatcaatcatccactgatttggtacaagaccaagttcacacctcctgcaggtgatgatcctgtcgcgattgacttcacgggaatggggaaaggtgaagcatgggtgaatggacagagcattggtcgatactggccaacaaatctggctccacagagcggttgcgtcaactcttgcaactatagaggagcctacagttcaagcaaatgcctcaagaagtgtggccagccatcacagactttgtaccatgttccccgttcgtttctccaaccaggcagcaatgatctagtccttttcgagcattttggtggtgacccaagcaagatatcctttgtgatgaggcagacaggaagtgtgtgcgcacaagtatcagaggcacatccagcccaaattgatagttggagttctcaacagccgatgcagagatatggacctgcacttcgcctggaatgcccaaaagaaggccaggtcatcagcagcgtcaagtttgcaagctttgggacaccgagtggcacatgtggaagctacagccatggcgaatgcagcagcactcaggctctctcaattgttcaggaggcttgcatcggagtgagcagctgcagcgtgccagtgtcgtcgaattattttggaaatccatgtacaggggtcacaaaaagccttgcagttgaagctgcatgctcgtgacatgtctgattaatattggttcataggaagc

SEQ ID NO: 4271 - DNA, 1110 bp, Zea mays
  Clone ID: 700352183_FLI
gcagcatatgtggagcatgcaaatgcaattcctaaatggacggggttactgcctaaatctggaaacatggtaattaatacggaatggggaagctttaaatccggcaagcttcctctctcagaatacgacaaagccatggactttgaaagtttgaaccctggagagcagatatacgaaaaaatgatttctggcatgtatctgggagagattgttcgaagaattttactcaagttggcacatgacgcttctctatttggagatgttgttccaactaagctggagcagccatttatattgaggacgccagatatgtcagccatgcatcatgactcttcgcatgacctcaaaactcttggatctaaactgaaggatatagttggggtcgcagatacttccctggaagtaagatacattactcgtcacatctgcgaccttgtcgcagagcgtggagcacgcttggctgccgcaggtatatatagcatcctgaagaagataggccgggacaaagtaccaagcagtggcagtaaaatgccaaggactgtaattgccttggatggtgggctctatgagcattacaagaagttcagcagctgcgtcgaagcaactcttacagacttgctcggcgaagaggcctcttcctccgtggttgccaagctggccaacgatggctctggcattggagctgctctccttgcagcctcacactcccagtatggcgagagtgactagtcttgaaaaccggtgtggatcgaacttcgagtgtagctctcatgtttatctttttttcccttcaaaacatccctaatattccggctctcctcggggaatttttcggcttcctttcttggctattctgtggatgcacttaaggctctgcagcgggatatagctagtatagagccaatcagtttggaggttatctaatggcataagatttggacggcaggagcatagaaatggaagctgaacaatgccattcatgttctgcccaatttttcttccccttgcatggtgttgtaaaccaatcaaaaaatttaacctttttttttgtgttggcaataaagaggaggacacgataatttgaccatgtgttctcttcactgcttcgtc

SEQ ID NO: 4272 - DNA, 789 bp, Zea mays
  Clone ID: 700352208_FLI
ctttcccttcttcccatccacgccagccaagttcaccgccgcgctctccggcggcaactactgttggatcgtagggcgaaggaaggaaggaaggggagccatgggaaacgcgtcgtccatgctgacccagtacgacatcgaggaggtgcaggagcactgcagctacctcttctcgcagcaggagatcgtgtcgctgtacgagcgcttctgccagctggaccgcagcgccaagggcttcatctccgaggacgagttcctctccatccccgagttctccctcaacccgctctccaagaggttgctccgtatggttgatggattgaacttcaaggattttgttgcgtttctttctaccttcagtgcaaaggccagccttcgtcagaagatcgagtttatattcaaggtttatgacatcgatggcaagggaaaaattaccttcaaggatctgctagaggttttacgggacctaacagggtcattcatgtccgaggaacaaagagagcaagtggtaactgaagttctggaagaagcagggtacacaagggattacgcattctcgcttgaagattttatccagatcatcgaccatcctggccttaagatggaggtggaagtgccaatcgactagtgaaatgtggaaaacaagcttccggttttgtctgcagaacatggttagtgtcatgtagcagggcaatgaccgttcactttcgtcatcttatttgtttccggtccacttgcctaaacttttgtaatctttgttggcttggccttttcgaatatatccaaaac

SEQ ID NO: 4273 - DNA, 1186 bp, Zea mays
  Clone ID: 700352235_FLI
caattgtcggttcttcacttatgaggaattgtatcagatcacaaattgcttctcatcacagaacctgctaggggaaggtgggttcggatcagtgtataagggttgcttggctgatggaagagaggttgcggttaagaaactgaaagatggcggcgggcagggggaacgtgagttccatgctgaggtggatattatcagtcgtgtgcatcatcgccatctagtttctcttgtggggtattgcatttcagatgaccagagattgcttgtctacgattttgtgcccaacgacacacttcactatcatcttcatggacgtggagtaccagttttggagtggccagctagggttaaaattgcggctggttcggctcgtggaatagcctatcttcacgaagattgtcaacccagaataatccacagggatataaagtcctccaatatcttgctggataataactttgaagcactggttgctgattttggtcttgcaaggttagctatggatgcttgcactcatgtaaccacacgagtgatgggaactttcgggtaccttgctccagagtacgcgtcaagcggcaagttgactgagagatctgatgtattctcattcggtgtcgtcctcttggagcttattactggtagaaagcctgtcgacgcatcaaagccattgggtgacgagagccttgttgagtgggctaggccattgctcacgcaggcgcttgagaccggcaacgccggggagctggtggacgcccggcttaacaagaactacaacgaagtcgagatgttccgtatgatcgaagctgctgcagcttgcattcggcattcagcatccaggagaccgaggatgagccaggtcgtgcgggtgctcgacagtctcgctgatgtcgatctaactaacggcgtgcagccaggcaagagcgagatgttcaacgtcgcgagcacggccgagatcaggctgttccagcggatggcgttcggcagccaagatttcacgacggatttcagccagtccagctggaacaacagccagagcagaggtcttgatgcctctggttcgaggccattgtaatcctcctcgtcgtcgtaaatttcgtagatctaactagctagggcgtttcgtgatgatttttttttacctcgtgtaattctttctgagtggatcaatagtgattgttctttcacc

SEQ ID NO: 4274 - DNA, 789 bp, Zea mays
  Clone ID: 700352242_FLI
ccttcctctcgtcccagcagccgcaagccaaaaccctagcaagcaaaccaccggagcagcggcgctcgcgcgggcggagccatggcggacgacgattacaacgaaatcgacatgggctatgaggatgagcctccagaacctgagattgaggaaggggccgaagaagagcttgagaacaacgaagatgcccctgatgatgtcataggtggagagggtgaagataaggaacaggaaaagaccaagcgtgagcgcaaaacaacaaaatatatgacgaagtatgaacgtgcgcgcattcttggtacacgagccttgcagataagcatgaatgctccagtcatggttgagcttgagggagaaactgaccctcttgagattgcgatgaaggagcttagagcgcgcaagatacccttcacgatcagacggtacctacctgatggaagttatgaagactggggagtagacgagctcattgtggaggactcctggaaacgccaggttggtggagactgaagatgctgatctacttggcatggaaaggatgtgtagttacaggtcttcgttgcctctgagtggatgctgaacagtgaatgaaccaagacgaaacgatgctatgctagatgttaccttgacgtctgtggttgccttggaactctggaaccgtgatggctggtggacggtggttgagttatgcttgttcgtttcagtttcagacatgctgtgcagatgattcgtaaactgactcgtctttcattcatttggaagggtttatcgtatcttgctatcttttgt

SEQ ID NO: 4275 - DNA, 1487 bp, Zea mays
  Clone ID: 700352293_FLI
ataccccgctcctctcctccccgtctgccggctcccttcttcttcgctgtcgacgacgcggactccccgccgcgctccctctctcaggcctcgcggggtgatcagaggcggctgggagactcgtgcgctccgacgagtccggttacggcgcggtaattaagcaggggaggagccggccctgagcggcggagtccaaaatgagtgacgacgtggtatggcactgcatccgccacaaccactgcagcttcatgtccaagatcacaacggggatcttctgtcgcaacccctacaacgcgacgggcatctgcaaccggagctcctgcccgcttgccaacagccgctatgccaccatccgggatcatgaaggtgttttctatctgtatatgaaaaccgctgaaagggctcatctgccaaacaaattatgggagagagtcaaactgccgaagaattatgagaaagcaatggaagtcataaacaaacatcttgaattttggcctaagctacttgtgcacaagatcaaacagcggctgacaaaaatgactcaatatcgtataagaatgaggaaacttcaactgaaagtgagggagaaggtcatgacaatgcccaggaagcaaacacagcgtgatctccggagaatggagaaagctgaaagggctgctcaactagaaaggaatattgaaaatgaattgaaggaacgcctgaacaaaggtgtttatgctgacatctataatgttcccttcaaagcgtttgatgaggttcttgatatggaaagagatgaagtggttcttgaagaagaggaggaagaagaaggtgaggtatatgttgaaggcgatgacatggaagagatggatgacatggaagactttgaaggcctcagtgatggaggcacggatgacgatgatgttttggatgatcccgtatcaaggaaatccaagggatcctcttcttattcgaagcaaaatgtcgggaaaaggtctaggaaggttatgactgaggtggaagaagacgaggagataaatacgaggcaaaggcaaagggcgtgagtgcgagatgtgcaactgcaacgacggttatatgatgtcagatgccggcaggcagccacttctgatgtatgttggatcattttatacttgccttcgtactgtaacgcggagtgctgagacgtcaattaattttggccgtggtttacatggcctaatatgttatgagcaagaaaaaagaaacgggtgataactcagttgaggatgtgggagaccatctagttttcgaggtgaatttaggcatctatttttgtaagttacagattggtctagctttgttctttgttacaaggaaaaccagagtcatgcgtttactaacacattctgagttgtcattgaggatttgggatatcctaagatcctaggtgagtagcctaaaccgtatatttcgttgactgtatcaaggtggcaacagtagctacaaaatcacatcccggtttcgtttct

SEQ ID NO: 4276 - DNA, 1216 bp, Zea mays
  Clone ID: 700352302_FLI
ggtgatctgcatgtgcctgtgatctactgctggctgcatcacctcaatagtctacctgggggcgtatgacagcgaggaggcagctgctcgtgcctatgacctcgcagctctcaagtactggggtcctgagactctgctcaacttccctgtggaggattactccagcgagatgccggagatggaggccgtgtcccgggaggagtacctggcctccctccgccgcaggagcagcggcttctccaggggcgtctccaagtacagaggcgtcgccaggcatcaccacaacgggaggtgggaggcacggattgggcgagtctttgggaacaagtacctctacttgggaacatttgacactcaagaagaggcagccaaggcctatgaccttgcggccattgaataccgtggcgtcaatgctgtaaccaacttcgacatcagctgctacctggaccacccgctgttcctggcacagctccaacaggagccacaggtggtgccggcactcaaccaagaacctcaacctgatcagagcgaaaccggaactacagagcaagagccggagtcaagcgaagccaagacaccggatggcagtgcagaacccgatgagaacgcggtgcctgacgacaccgcggagcccctcaccacagtcgacgacagcatcgaagagggcttatggagcccttgcatggattacgagctagacaccatgtcgagaccaaactttggcagctcaatcaatctgagcgagtggttcgctgacgcagacttcgactgcaacatcggatgcctgttcgatgggtgttctgcggctgacgaaggaagcaaggatggtgtaggtctggcagatttcagtctgtttgaggcaggtgatgtccagctgaaggatgttctttcggatatggaagaggggatacaacctccagcgatgatcagtgtgtgcaactaattctggaacccgaggaggttttcgctttccaggtgtcctgtcttgggtaatccttgatctgtctaatgccacagtgccactgcaccagagcagctgagaactttcttgtagaaagcccatggcagtttggcgttagacaagtgtgtcgatgttctttaattctttgaatttgcccctaggctgcttggctaacgttaagggtttgtcattgtctcacttagcctagattcaactaatcacatcctgaatctgaagtggttgtgcttgtgcagt

SEQ ID NO: 4277 - DNA, 2061 bp, Zea mays
  Clone ID: 700352308_FLI
gggagtgggccaggcaaagtcggctcttgcgtcgacatcgacggggagaaacagctgtgggcaggcgatgaactgtagcgcgtgacagtgaggggatttggttggatccaatgtttggtcggtctgcttgcatcacctggttgcagctctgcattttctggctataaagcgacggggcccttgcgctgggcgcggagactggagagggcgagagtcctcccatccacaagttcttagcttttgcgagattgagatccggctggggacagaccgacagaggaaggtgaattgtgggaaagaggacagaaaaatggggattggagatggatcttcaaatgggaaccagcaaccggtgcataaggaaatacgagatgagaccacaccacttcttccagtcaaggtggaggaggacgaggggtttcatgagttcaatggagcttcattctctggggcagttttcaatctgtcgaccaccatagttggggctggaattatggctcttccagcaagtatcaagatgctgggcatcatcccggggattctgttgatcatccttgtggcactgctcacagaggcatccatcgacatgcttgtaaggtgcagccaccagggcaagattacatcatatgggtggctgatgggcgaggttttcgggcagtgggggagaattgcgctgcaggcctccgtcatcataaacaatgttggcgtgctaattgtttacatgattatcattggtgatgtattatctggaacaacatcaggcgatgttcatcatcgtggtatattggagggctggtttggagctcatttgtggaattctcgtgccattgttcttcttgccacagctcttttggtgttcgctccgttggtgagctttaagcgcttggattcattaagatacacatctgcgctatcagttgccctggcagtagtttttgtcgtaattactgctgggattgccatcatcaaactcttcaatggaactgtagcgatgcccaaactttttccagaattagatggtcttaattctatctggaatctttttacagctgtccctgttcttgttacggcctatatctgccactataacgttcacagcattgacaatgaacttgaagacagaacacagatcaagccgattgtgcgaacatcgctgttcctgtgctccagtgtttacattgccacaagtttctttgcttatctcctcttcggtgaaggcacactggacgacgtgctcgccaactttgacgcaaatcttggcattccattcagttcagtcttcgatgacatagtgcgagtgagctatgcagcacatgtcatgcttgtctttcccattgtcttctttgccctccggctcaacttggatgggttgctcttccccacgtcaaggcacatctctcgtgacaacaagagattcgccatcatcaccgtctctctcctcgcagtaatttatcttgctgccattctcataccaagcatctgggacgcgttccagtttactggtgccacagctgctgtcctgattggttttatatttcctgccatggtcatacttagggattcttacggaatcgcgagcaagcgcgacaagattctggctgtaaccatgatcgtgcttgctgtcctgtcaaattctgtcgccctatacagtgacgcgatgaacatcttccgtaagaaggaagtggcctgatctcagatttcaaaagtagtcagtgctggatgaagaatggtctcgcaatgcaagactcgatggtacgaaggaaaacgatgcgcttggattccgtgaaggaacgatttctttgtcagcacctcagaatttggccacttgaaagaatctgatgcttgaagtttcctggttctgtgtacacaagtcggctcaatgtcagaattgagccgcttgaaatatatttagttatattctatgcggagagtaggtcttggaaacagccttttccacaataatgtacagttattatgccaatttctgagttcagttaaattttgtgaaatatggacatgggcgtcttgtctcgattaaaattgagaatggtatgattgcac

SEQ ID NO: 4278 - DNA, 703 bp, Zea mays
  Clone ID: 700352343_FLI
cgcattcgttccaactcctgagcactttctcctcgtccccgacaagccaatcgaagccgagatacggccatggactccaccggcaccggagcagggggtaaggggaagaagggagcggccgggcgcaaggtcggcgggccaaggaagaagtcggtgtcgaggtccgtgaaggccgggctccagttccccgtcggccgcatcgggcgctacttgaagaagggccgctacgcgcagcgtgtcggcaccggcgcccccgtctacctcgccgctgtcctcgaatacctcgccgctgaggttctggagctcgccggtaatgctgccagggacaacaagaagactcgcattattccgcgccacgtgcttctggcgatccggaacgacgaggagcttgggaagctgttgggcggcgtgactatcgctcacggcggtgtgctccccaatatcaaccctgttctgctgcccaagaagacggcggagaaggcgtccagtggcgggagcaaggaggcaaagtcgcccaagaaggccgccaagtcccctaagaaggcatagactgactgtccggagtgatctgatgtttagcagtaccttgttaccagtatgcggtgatgcgtaggctgcagatgggacgaatgtgcttgtatgtgtatgtgtcctgctgcaagttgtcctttgctatttagaatggaagaagaaatgccttgtt

SEQ ID NO: 4279 - DNA, 1197 bp, Zea mays
  Clone ID: 700352366_FLI
aatatttcttccccgtagaaacggtgtttttcaaacaataagttctgaagaacctcgtgaagatgtaaagtgtggtccagttgacagggtgggattttcaaattcatcagaaccaaatgcgagtgtccgcaatgagaattatgttcctagaatgcgcaaaccaggagacaactgctatatcgaagtttcaagagccgggagagcaaggtcaagtgtctctaattgggaagggagggatcagccccctagtcatgaagaaccaacaacaagcagttctacactggctcctaccggccatccatattcatctagaggaagcaatcaagcttctgaagctccaatcatagctagtgatgaagatgttctatctcttatcatggagcgacatgatctatttttaagctcaactaagtctcggctgatgaaattgcagattattcatcaaatgtgggaaagaaatgacatcaggggtgtgctctctgcgatggacaggatgggtgatcatgctgtctgtgctgatatggctagcgttctcatggagaaaagtgaaacaatcacactagatttgtgtacctctatcctgcctgtcgtcactgatcttctggagagcaaaattgacagacacttagtcgtcgcattggaattgttggtgaagcttgtaaggacttttggtccaatgatacattcaacagtatcgtcaggtccttgtgttggtgtagaccttgaggcagagcaaaggagggagcgctgtaacttgtgcttcatcgaattggagaaggccaaaaataagcttccatctctaacaagaagaaaaggggcggttgcaaatgctgcacaagaacttgctcttgtcttccaggaaatcatgagttgactgacgacacactagatatacacaattagatgggacatgcttcgacctctgatggcaacaagattggatatcagctgccatggagggtgctagctattcagtcttagcgacgtcatcaagctccaaggccacagcaccaacaaatgcattttgttgctgctgttcgtgccttttgtacacatgctaacacataatccatgtcatttgtgaagagaagctgccatggacagtgacttcatccacaatattatgtggatggcggcagctggagatgttaggccccgatcgaatggtgatcagcagatgagacttgcttgggcttt

SEQ ID NO: 4280 - DNA, 2418 bp, Zea mays
  Clone ID: 700352413_FLI
gcgagcgagggaacagcctccacggcgaggagagaatggggagaggagggatcggaggcgcggcggccatggccatggccatggagaccgccgatcctgcccgtgcattcgtgaaggacgtcaagcgaatcattatcaaggtgggcacggctgttgtcactggcatgaatggccgattggccatggggaggctcggttctctctgtgaacaggtgaagcaactgaattttcaagggtatgaggtgattctggtaacctcaggagctgttggtgttgggaggcagaggctccaataccgtaaacttatccatagcagcttcgcagatctgcaaaatcctcagatgaactttgatggaaaggcatgtgctgctgttggtcaaagtgtcctgatggcgatctatgacacattatttagccaacttgatgtaacgtcatctcaacttcttgtgacggatcgtgatttcaaggatccaagttttggggaccagctccgtgagactgttttttcactgttagatcttaaagtagtacccttatttaatgagaatgatgccatcagtacccggagacagccatatgaggattcatctggtatattctgggataatgacagtctagcagctctgttggcagcagaacttaatgctgatcttcttatcatgcttagtgatgtggaaggactctatagtggtccaccaagcgatcctcagtcaaagattatccacacatatgtcaatgaaaagcatgggaagctaattagttttggagagaagtctagtgttggaagaggtggcatgcaagctaaagtgtctgctgctgctaatgctgcatcaaaaggtgtacctgttgtcattgcaagtgggtttgcaacggatagcatcattacagttctcaaaggcgaaaagatcggtacacttttccacaacgaagcaaatttgtgggcatgttccaaggaagctacagcccgagagatggcagttgcggcaagagactgttcgaggcgtctacagaagttgtcatcagaggaacgcaaacagattttgctagatattgctgatgctctggaagcaaatgaggatgcaattaggtctgaaaatgatgccgatgttgaggcagcacaagttgctggttatgaaaagtcgttggttgctaggatgaccctaaagccaggaaagataacaaatcttgcaagatccattcgtaaaactgctgacatggaggaccctatttcccatacattgaaaagaacagaggttgctaaagatctggtttttgagaaagcatattgcccattgggtgttcttctcattatttttgagtctcgtcctgatgcattggtccagattgcatctctagcgatccgaagtggtaatggtctccttttgaaaggagggaaagaagttatgagatcaaatgcaatattacacaaggtcataactggagttattcccgatactgttggcaaaaagctcataggccttgtgactagcaaagaggaaattgctgatctactagcgcttgatgatgtaattgatcttgtcattccgagaggtagtaagtctctagtttcccaaatcaaagcaacaactaagattccagttttaggtcatgctgatggtatctgccatgtttacattgacaaatcagccgacatggatatggcaaaacggatagtattggatgctaagattgattatccagcagcatgtaatgcaatggaaacactacttgttcataaagatcttaacaagagtgagggacttgatgatctattagtggaacttgaaaaggaaggagtagttatttatggtggacctgttgcacatgacaagttgaaagtaccaaaggtagactcatttcgtcatgagtatagctcaatggcatgcacagtcgaatttgttgatgatgtgcagtcagctatcgatcacataaatcgttatggaagtgcacacacagactgcatcatcacaactgatagaagtgctgcagaggcctttctgcagcaagttgatagtgccgctgtgtttcataatgcaagcacaaggttttgtgatgggacgcgttttgggctaggtgctgaggttggcataagtacagagcgcatacatgcccgcggacctgttggagttgatggacttctaactactcgctgcattttgcgcggtagtggacaagtggtgaatggtgacaagggagtggtttacacccacaaggatcttcctttgcaatgaggcaaataacctccgttgtggtcgtaacgaatggctggactccccttttaagtacccttttcttttattccatgctacaaagtttggtgtcgtaacaagcagaatgcctatttagtaggcattgatgtaatcagaccattttgtcgtggtgttccttgtcgtataaaacatccgagacatctgtatt

SEQ ID NO: 4281 - DNA, 965 bp, Zea mays
  Clone ID: 700352425_FLI
cgttcattgcggcaggccggcagccaaatcgagatctcgcccgtgctgaatcccaccactctcgccgacccggccgcagcaagcgcagcgcatcgacaggagccgaagaaccgaagaggagatggcgtcggcgctgtcctccctgcgctacggcgacagcctctcggtggtgggcatctccgccgcgacggccgtgctctgcgaggccatgtcctggctcctcatctaccgcaccgccacctacaactccctccgcgcctccatcgagcgccactcccgcaagctagacgccatgaagtccggctccacctccgcctcctccggcaccgccgcctcctccgcgcagcccgcatcgtcgcgggctaagaagatggaccgcgtcgagaccagcctcaaggacgctgcgcgggagctctcgctcgccaagctcaagtcgggcgccgtcgtcgctgtcatgctcttcgtcgtcttcggcctgctcaactccctcttcgagggccgcaccgtcgccaagctgcccttcgcgcccatcccgctcgtccagcggatgagccaccgcggactgcccgggaacgatcccaccgactgctccatggttttcctctacttcctctgctccatgagcatccgaaccaacctgcagaaactgcttggcttcgcgccgccacgcgcggctgctgcagccggcggtggcctcttccccatgcccgatccgaaagttaattgaggctgatttccaagacgagtgaatccgaaccaaagatagcaatagtcgcccgggaaagactctgtgcgactgcaccgatatccgtacccaattcattttccacagctcaccggtttgttgttgcgcaccggtgattgcaaacctgaaggttggcttatttattgcattgactgaaacaacgaacatgaattacctgctgggaggcagagaaatgtgcagcctaattttttcggcctct

SEQ ID NO: 4282 - DNA, 705 bp, Zea mays
  Clone ID: 700352436_FLI
gcgaagccaaaacgcccattccccttcgccctcttcgaccctagcaagaaggcggcggcggagatggtgtactacgcgcttttggtgggcgcagagctggacggcctcaccaacctgcagcccagcggcggctgcgacgaccccagcttcccctactacctcaagtgcaagctttgtgggagagatggaacaattgtgatgattcctggtcaggggacgccacttactattgagcagagccagaaagaagagaagacttgtttgatggtgtttgactgtagaggttatgaacctgttgagttttcttttggagctggctggaaggctgagtctgtgcatgggactccttttgaaattgactgctctgaagatgaattttctgagtatgatgagaagggagaatgccctgttgagctaagcaagctgcagtcaacattcaaagtggtgaagaagcatgagaagggtggtaagataagatttgtctagatccagtgacttggagtctgtcgggtattggaatcggaggtgtataaatggtacatttgggctaaaaggttgtgcgtaatcagacgtcccttttctgtctattgattctgtggatgccgtgaaccatgtgaagctttcggtgacagtgtccacagaggcatttgccctggaccgattgctattgttctgtggtctgaggccatcggaaccgatcttttt

SEQ ID NO: 4283 - DNA, 2167 bp, Zea mays
  Clone ID: 700352459_FLI
ggagttgccatgatttttttttacttaccattctgcaatcatccttgcttccaaacacagcacgctaatacaggtgcgtacttgtgcaggactggtagagggaaggtttccttggcagccatcactctagatgattaccttccaatgcgaagcactgaagtgaagaaccggtaacttgtttatttctaaaagaatgctgacaatactatttcatctgtatttttggcagtatttttagccttatgccactcgacaagatgttagttttggtgaaatttgccatatacatccatctaatgagaataaatcgcttgcgtaccttatattgtactgatcagtcttttttgattatatattatccctcaaattctgaactttgaaaattaatacaagctgaaaaacattttagacagccatcagttgggagccaggagccagcttttccctcatccaaaatccttgtagaacagttgcaattgatccttgttgcttaggtaaagcaggttcaggatatagctagtgtgaaatcatttcatggagttttttgaacttgagatcaataagttgaagtctgaaacttgaaccatttactcgatagagtaacacaatctgctgttattttcattaagctaatcggtgaagcttgtgtaattatgttgaaacagcaattgtctatgtaagattacaaacactgcagctagaataatctaatcagaaaataatgtgaattgctttgtctagaaaagaatattactagggcttgtttgttttgatcttaaaccatgtggattgggtggtattgagtcggtttaaatccatagcaagtcaaaatacatctcaatcccatccaatccacatggaatgaaaataaccgaacaagttctaaatatatgcttcgttgaatggtaattctactgcaatttgagtctgttctgcttaatgaatgaacatgtacgttctttggcaactgcagttggtatttctctattcatggttttatagcttagtagtcaagtactcaagtgtatcttattcttagttttgtgcacaagtatttgaaggctgtgattcaagttatcttctgctttggtctcatcttcatcttgtctgagatgcaggacatcaacagatgacatcacaaggctgagactaatcacagcagttaaaaccccctatttgccagatgggaggttcgatctggaagcatatgattctctcataaacatgcagatagagggtggtgccgaaggcgtaatagttggaggaacaacaggagagggtcacctcatgagctgggacgaacatatcatgctcattgggcacacagtgaactgctttggctctagaatcaaagtgataggcaacacaggaagcaactcaaccagagaagccgtccacgcaacagaacagggatttgctgttggcatgcatgcggctctccacatcaatccttactacgggaagacctcagctgaaggaatgatctctcatttcgaggctgtcctcccgatgggtccgaccatcatctacaacgtgccatccaggagcgcccaggacatcccccctgaagttattctagcgatttctggctacacaaacatggcgggtgtcaaggaatgtgttgggcacgagagggttaagcactacgctgacaaaggcataacaatttggagcggtaacgacgacgagtgccacgattctaagtggaaacatggcgctactggggtcatttccgttaccagcaaccttgttcccgggctcatgcacagcctcatgtacaaaggcgagaacgccacgctgaacgagaagctgtcgcccctgatgaaatggctgttctgccagccaaatcctattgccctcaacactgctctggctcagctcggcgtggcaaggcctgtcttcagactgccgtacgttccgctccctcttgaaaagagggccgagttcgtccggattgttgagtcaattggacgggaaaatttcgtggggcagaaggaggcccaggttctagatgatgacgatttcgtgttgatcagtaggtactaggaaaatgagtttgccagtctatgtatcttggcgaataaactagtagtttgtaccttgcgttcagacttcgttctgttgttcatcagtcgttgggttcgtctatctatttattaattgccct

SEQ ID NO: 4284 - DNA, 829 bp, Zea mays
  Clone ID: 700352503_FLI
ggcgaacgccaagatgggtaatggcgcccagaggaacgctggcgccatgggtggcattggcatgctgggcctaagccatggcctgggagcgggcggcgctgctgctgctgctcctcctcctggcttccagcaaggctacgcaggcttcaaccacccgccctatgccgctgctgccggctatggaggaggtctacagcagcagcagcatcaccagcagcagagtaacagcctcatggcgagcatgcaggggtaccatcatcaccaataccctgccgcgacggccgccgtggtgaacaacttgaggggtttgaacggcaacatggtgatgatgcatcagccgcagccgcagccccagatgatgtaccactcgtctccccagatcagcagcccttacaccggctactacaacccttacaattactactaccaccacccccattccggcagcgctgggtacccagccagcaacggggatgtggagagcatgttcagtgacgagaacaccaagggctgtgttgtcatgtagggcggggcggggtgtgcagctacagtcctgtcaatctagaggttggtgatgggccatggtaatggtgatgcagtcctgtcctgctacctttctttctttcgtttctttttcattattttactgctcttatggttttcgcctgtatcaagagtgaatcatggtgttgacttagatgtgttgttgaaagtaggggcaacttgagaggggcgatcaaacagtgcaatgtacaataggagtgccttttaggctttttttactgcctagcgctttgccctgcctggcttgttatgatctctgtgtact

SEQ ID NO: 4285 - DNA, 1365 bp, Zea mays
  Clone ID: 700352535_FLI
ggtcgtggacgccatgggccgaggccgcaaccgcaagccccgcaacttcgccacgttccgcctctgcccgcgccccggggctgccgatgcctccgaacgcgtcttcgtacgcgtcgacgacaacccctactccgtccccgggttcgcagacgatgatggtctctcgtcctccaccgccgtcaggggagacggcggcgagcccgacccgtcctcctccacctcgaccgacgagggcgggtcccccctgcccgagcacgtccgccgagagatcatggagctcggcctccccgacgacggctacgactacctcgcccacctccgcgagctccgcccctccctctcctccaccggcggcgggggttcttcggccgtattcctccccagccgccgcctcgcacgctccggccttcccgtggacgtgaaggcgtacgacttcactagtaccccgcttggttccggggaggttgcggtggtcgcggctagtcgggctgaggaggctattgacctggatgtcaccaggctgcttgacgggagcgattcgacggccgttgagtcgggggatgaggatttggaggaggactttgttatccttgcgaatgagccagatgagaagcaggagagcgaggaagagaatgttgctggaagcaaggagaaagctctgcagctgcctggcgatcagtttgtttcgcttgctttcgaagaatatgcggacagtggagttggttgttgtgttcaagatgcaaagcatgaactgtcccaggaggttacagataaactgaaaccgcctcacagcgaaaccttcgatgctgataaaagatgcagggcacccacaccacaatatgttgctcaccggatactagagtcaaacgagcaaattgatgcgtcttctaatgccatctccgaacatgttcagtacgctgaaacatatgaagtcagcgaagaagaacaagcgattcttgctccagaaagtagcaaggggtctgcggttatgtactctactgccacggtttctggatcatatctcgatgttaaattgaagtttccaaaacattcccctggagaaacaagtatgaaaaaatccatcatcagaaaaggaatagagaagcttcctgcagggtattcacctcagaggaacactccgactggtgaaactaaacagggaccctacaaaggaacgagacaggaagggacagaaagctaggtaataaaactgatgcatgttaggtttctcatttcaactcttgaacattttagttcagtatatcaaacaatgttgctgcattgagataaaaaaaacacagtggctatactcctgttgatttatttatcaaacattttagttcagtatatcaaacattttagttc

SEQ ID NO: 4286 - DNA, 1186 bp, Zea mays
  Clone ID: 700352579_FLI
caccagtccaccgccaccccatccaatcccatccccacaaccgggtgccgccgccttctatggcggacttcggcgacgagctctttctcgacgtcggggacgatggtttcggagacctctcctacgtctccttctccgagtccatcgagttggatctcgcctgcccacgcgacgtcttttccgcggggtttgatcccgaaaccctaacccacatcccggggtccccaatctccttcgactccgaccccgacctccgccacctctctccctcgctgacctgctccccgcccttctggggctgcctcgatgacgccgctagcttcgagtgggaggagatcgcggacgctgccctcggcgtcggcggtggcgctggcggcgccggagggggaggacaaggactagaaggagacgccgatgccgacgccgacgtgttcgggttcctcgacgagcgggagatgctgggcgtgatggagggcatcgacagcggtgacgacgactcgatcttctccgatgagcctccgtttgacttcggcgatggcgacacggagcttgaaggcatcttccggagcggtgtcgggtgggagctgctcccggtgcctctggacgaggacgagttcgaggtgctgccggggcacgtcgtggaagtgggcggcgccccgccggcggcgcttgcagtggtggagcggctccaggtggtggccgtcagaggcgaggaggttgtgcaggagtgcgctgtttgcaaggaagggatggaacagggggagctcaccactgggctgccgtgtgggcatttctaccacggggcgtgcattggtccatggcttgccatccggaacacgtgcccggtgtgccggtatgagctgcctactgatgaccctgagtatgagaagcggaggacgaggcgccattctgctggtggttcaacaccacagttgggtgcaccgatgcaggtttgagctagggctgattggtgctatgtcttggatgcaattccatcattccacggaagttagaaacctcactcattgaattggcgctaggatgtttacatgccagtagaattatacttctatgatcttgattttttcaggatttagcttttgtgctcgagagttgaatggtaagaacaattatcttaacaatttgtacatacatcttgtttcaatcaaattcttccttgcttttc

SEQ ID NO: 4287 - DNA, 1009 bp, Zea mays
  Clone ID: 700352582_FLI
agctgataaaccacggtgttccggacgatgtgatggaggcgatgaaggccagcacccagtcattcttcgcgcttcctgcggaggccaagcagcagtaccgtcagcaggcaggacagctggaggggtacggccagctgttcgtcgtctccgaggaccagaagctggactgggccgacgtcctctacctcaacacgcagccgcccgagcaccggaacctcagcttctggcctgctggtgagagcttcaggcagacgctggacacctactccgccgccgtcaagcacgtcgccgaccgcctgctgggagccatgtacatgaacctgggcctcctgagcagcatggacatggacccggagcggggtgccgggatacagtcggtgaggatgaactactaccctccctgcgctgaagcggcggacaaggtcctgggcttctctccgcactccgactcggaccttctcaccctcgtcctccaggtcaaccagctccagggcctgcagatcaagaggccgcccgacggcggcggtgcctgggcctggcttcccgtcacgccgctgcagggcgccttcgtcgtcaacgtcggggacgtcctcgagatcttcaccaacgggaggtacaggagcgtcgagcaccgggctctagtcaacgcccacacggagcgcttgtccatcgcggcgttccactctcccagcatccatgccaccatagggccgctgccggagctcctcggggaccaggaggtgcccaagtataagacgctggaccaccaaagcttcattacgctcttcttctccgccaagctccagggcaagagcttcttggaacggatgaagaagctttcgtagagccaatcggacggaccggaaagttaagcaggccgacgtaaagtcggattacatgttatcggttcggccatagcaatatagcacgcatgtatgtccggattaatttggtgaccgacgagactagttttgtctaccaattcacttttacatcgatttttaaatat

SEQ ID NO: 4288 - DNA, 1637 bp, Zea mays
  Clone ID: 700352631_FLI
gcatgtcatgttcatcccaagcgctggcatgggccacctcatcccattcttccgcttcatcgcggctctcgctgggcagagcgtcgacatctctgtggtgactgtccttcctaccgtttctgccgccgaggaggactacttcaccagcctcttcgctgccctcccccgtgtccgccgcgtcgacctccacctcctgccgttcgacgcgtccaagctcccaagcaacgaccgcgacccgttcgttctccggtgggaggccctgcgccgctcagcgcacctcctgggcccgcttattgccggcgccgccccacgcgtctcggccgtcattacagacgtgaccctgacctcccacgtcatccccatcgccaaggagctcggcgtccagtgccacgtcctcttcccctccagcgccaccatgctctcgctccttgcttacacccctgtacacatcgacaagaaggccgagcaggggagtgacatcggcgacgtcgacatccccggtgtgtgtcgcataccgcagtcttgtctcccgcaggtgctgcttcacctcgacaaactcttcaccaagcagttcatcgccaacggccgcgagatcatcaacgctgacggctttctggtgaacacgttcgacgccttggagccggtggcgctcgctgccctgagagatggcaaggtcgtcccggggttcccaccggtgtacgccattggcccactcatgtcgcagcaacactcagttgacgaaggtgggaaggaagaaggatcgggctcccccgttgcctggcttgacgagcagccagcgcggtctgtggtgtacgtcgcgttcggcaaccgctgcgccgtgagccatgaccagatcagggagatcgccgccgggctggaggcgagcaactgtcggttcctttgggtgctcaagaccacaacggtggatagggacgacagcgccgtgctgacggaattgctcggcgaggggttcctggagcgagtgcagggtcgcggcctcgtgaccaaggcgtgggtggaccaggaggccctgctgaagcacccggccatggggctgtttctaagccacagcgggtggaactcggtgaccgaggcggctgccgccagcgtgccgctgctggcgtggccccgcggcggcgaccaccgcgtgaacgccaaggtagcggtgagcggtggggttggggtgtggatggagcactggagctgggacggggaggactggttggtgaccggggaggagatcgcgaagaaagtaaaagaggtcatgtccgacgaagcggtcagggcaaggacgacgaggaccgccgaggaagcggccaaggcagttgcagagggtggcaccagctaccggagcatggaggagtttatttccagcgtcaaagcaaccgtggcgtcttgattgcgtcgtggggctcctgatttccacaagtttgtgtcccctactcccctaccctaccttccactgatggggagtccggagttgtgacgtcgttgtcgtgtggctggttgcagtgtcaaccaaaacagttctcacacacgtgagttgttgggaggtaggtagcatgtactatcacgtacctaccccatcaagaatagtgcgtcatctgtcatcttgtgatgtcatcttgtaatgaaat

SEQ ID NO: 4289 - DNA, 832 bp, Zea mays
  Clone ID: 700352655_FLI
aatacacaacatctattgatatatggtcagctggatgtgttcttgctgagcttcttcttagtcaaccattatttcctggggaaagtgctgtggaccagctggttgagattatcaaggttttgggcaccccaacacgagaggaaattcgttgtatgaatcccaactatacagaattcaagtttcctcagataaaagcatgtccatggcacaagatcttccacaagagaatgcctccagaagcaatagatcttgtttcccgtcttcttcagtattcgccgaatctgcgatgtagtgcacttgaggcgtgtgctcattcattctttgacgaattacgagaatcacatgcaagactccctaacggacgcccatttcctccactattcaactttaagcaggaactagcaaacgcaccaccggagcttgtcagcaggctattaccagagcatgctcgacggcattcaggattcggttccttatttgggagtggaccgtagcccgtaggaaaatctcgttttaatgttgggctgctgtacgccgtcagagggcaatctgcatatcccaaatctaagttttagaacctgaccatcttgtcgaaaagttaccagccttagaaaaacccgaggtggcctcttgtgtccatgttctgccagtagcggcacataatgctggggggatggttaggtgtaattgttaagcacagagggtaactgactgagctaatgtattttcacgtttcagtctgtatcgaacttgtacctgtgtaccctgtaccaatcgcagctgatgtaatcatgtaaatgcttctaaactacttcaagttatcatgatggcc

SEQ ID NO: 4290 - DNA, 632 bp, Zea mays
  Clone ID: 700352657_FLI
catagcgtgtaactttttttccttcccatttttccgtttagttttttgctggctgtgtgtgagcattcgtgtagggtgttgtaggaaaactgagaatgaaggtggtattaacgtatccccgtggcgtgacgttatttagacaacgacccacggatggatcaaattttgcgtgtattggggccaaaacagttctgcttcaaggattgaagttggaaatttgaattgttccgtgtactgatggactttttgctggttaaaaaaaaatgaaaacggcaaaacggttctcttctcggggaaatgacgttagagacgcggatgacgtaaaacgaagtgtaactggaaaaactgtaaactaaaaagggtgacgcggggcttatgtgtgtcctgtaaacccggaatttaagtcgggggcgcgcggcgccggaaagacgaacaaacgtgttagtggcggttttctggtgggtaaaaaaaaaaaaagcactcccgttctgcgcggggtccgaaaaacgccccggcgcggcggcggcgccgaaaaaaaactaatacaaggtgcggggggcgggtaaggtcagcgcgtgtgcggtggcgcggaaaaaaatttctaattctatgttataactctcctctttact

SEQ ID NO: 4291 - DNA, 456 bp, Zea mays
  Clone ID: 700352693_FLI
gagcactgaagaaggctgcgcgaggccgaggcacgtcgtcctagaccatctctacatcgagaagggctggggcgcacatccgttggtggccctcagctacacccacaggttccgctccaagtacgtgacctgcgtcctgtacaaggccatcgagcggtagcctgaccattgctgtgttgtgggccggcaactatagctagatgtggtggacttagcatttcattcaggtttagaagtctctcctgcataattcgttcatctgctaaactaaagaggtgggtgcaaatccatgtgaatcttgttttttagctgctagagcttacatattgttattattattcgattgttttcttgggagataattgtaaactagtgactaacgtgcgcctagcgcgcgtagtttgcatgattttgtcaaagttgtgcgtataaaataagagagtattatatataagg

SEQ ID NO: 4292 - DNA, 1420 bp, Zea mays
  Clone ID: 700352695_FLI
cccacctcccggtccgctagcagatagcgggggccagagagatcgagatccggaggcgctagcgccacccatcagcgtctgcggcaatggcgggcacggtgacggtcccggggtcgtcgaaaccctccacgccgctgctcaaggacgagctcgacatcgtgatcccgacgatccgcaacctcgacttcctcgagatgtggaggcccttcttccagccctaccacctcatcatcgtgcaggacggcgacccgaccaagaccatcaaggtccccgagggcttcgactacgagctctacaaccgcaacgacatcaaccgcatcctcgggcccaaggcctcctgcatatccttcaaggactccgcctgccgctgcttcggctacatggtctccaagaagaagtacatctacaccatcgacgacgactgcttcgttgccaaggacccatcaggcaaggatatcaatgctcttgagcagcacatcaagaacctcctcagcccgtccacaccgttcttcttcaacaccctgtacgacccctaccgtgagggtgctgactttgtgcgtggataccccttcagcctcagggagggtgcccacactgctgtctcccacggcctgtggctgaacatccctgactatgatgcacccacccagctggtcaagcctaaggagaggaacgaaaggtacgttgatgctgtcatgacaatccccaagggaaccttgttccccatgtgcggcatgaaccttgccttcgacagggatctcattggccctgccatgtacttcggtctcatgggtgatggccagcccattggtcgctacgacgacatgtgggccggatggtgtgtgaaggtcatctgcgaccacttgagcctgggagtcaagactggcttgccatacatctggcacagcaaggctagcaaccccttcgttaacttgaagaaggaatacaagggcatcttctggcaggaggacatcatccccttcttccagaacgtgaccattcccaaggattgcgacaccgtccagaagtgctacatctacctctctggacaggtgaaggagaagcttggcaagatcgacccctactttgccaagctcggtgacgccatggtcacctggatcgaggcctgggatgagctgaacccggctggccccgcggctgggaaagacaaggccaagtagatgggagtccctgggggtgcattcacttccctgctgaagtgaaaaaaaagtatgattgggtccagcctaggctcccccatagatatagctctttttgagagggaagagggattaattcagcagcaggttctttttataaattctttgttgttatgaagcaggcggtacttttgtagttgatgaaggggatttgtcgccactgtcatttacataattcggataataatttatattgtgtg

SEQ ID NO: 4293 - DNA, 842 bp, Zea mays
  Clone ID: 700352703_FLI
ggagtagtgctaccgctgacaaggcgagtgtgggagcaggggaagcatcggcgcgagctgctggttcttttgaagactctgctcagctatcaagagtgacgaaggatcatacgcacatggtgaacggaagcccccgagaaatccaaagccatcagagttgcagtggaaggagtcgtatcaaggttcaaatgcatggaaatgacgtgtgcagagctgtggatttgggaaatctggatgggtacgagcagctgatgggtgaggttggagtgatgtttgagatcaaagaccttggctccaaagagaaagaggaatggaaggttactttcactaacgacgagaatgagacaatggaagtcggagctgttccttggcaggagttttgccagatggtgaggaagatcgtgatccattccattggagacaggggccatatggaggcttgcccttgcctggggcaggatgggaagagggactattagaagaagggattttttttttggctggggcaggcaggagatggttgctgctgaaacatgatggcgtagcttgtcgatgacgaagaaggcaacagattggttgctggcgtcagttcttccttgagaaaaaaattcagtggaaggaagaagtgatgtaacataggatttgcagaaaagatttgataatgcgtcttttagaagtttggtttggtttaaagatgacaagttaatgtgtgtctagtgatctgcctaaagccttagcgacgggcaacaagcaataacaaggatggatgatgaccttaccttgggtatgttagctgtgtaaatattatgtatgtatgtatgggacattaaattggttggcat

SEQ ID NO: 4294 - DNA, 1271 bp, Zea mays
  Clone ID: 700352804_FLI
gcactgcatcggtcgccagccgagccgagccgagccctgctctctcctccagctccccaaatcacactccgccatggccggcacgtgcgctcacgtcgagttcctccgcgcgcagccggcgtgggcgctggcgctggccgcagtgggcctgctcgtggccgtgcgcgccgccgcccgcttcgcgctctgggtctacgccgcgttcctccgcccgggcaagcccctgcgccgccgctacggcgcctgggccgtcgtgacgggcgccaccgacggcatcggccgcgccgtcgccttccgcctcgccgcgtccgggctcgggctcgtcctcgtcggccgcaaccaggagaagctggccgccgtcgccgccgagatcaaggccaggcaccccaaggtccccgaggtgcggacgttcgtgctcgacttcgccggcgaggggctggccgccggcgttgaggcgctcaaggactccatccggggcctcgacgtcggcgtgctcgtcaacaacgccggcgtgtcctacccgtacgcgcgctacttccacgaggtggacgaggagctgatgcgcaccctcatccgggtcaacgtcgagggcgtcacgcgtgtcacgcacgccgtgctgccggccatggtcgagaggaagcgcggcgccattgtcaacatcggctccggcgccgcctccgtcgtgccttccgatccgctctactccgtctacgccgctaccaaagcgtatgttgaccaattctcaagatgcctctatgttgagtacaagagcaagggtattgatgtgcaatgccaggtgcccttatacgtggcgacaaagatggcatccattaggaagtcttccttcatggtcccatctgctgacacctatgctcgtgctgccgttcgtcacattggatacgagcctaggtgcacaccatactggccacactctgtcgtgtggttcttgatctccattcttcccgagtcccttatcgacagcgtgcgcctgggcatgtgcattaagatccgcaagaaggggctggccaaggacgccaagaagaaggcgctgtgattgatgtttcagaatgcatattcagattcgcacatttcctcatcacctgtagtagacatgtgccttgttgtagtcactttattagctaccattgcctcctgagtctgttaagaatcgagaatgtcattgttccatccgcggttatgatgatgaaaaatacgattcttcagttcaaaatgtaacactaatacgagtaatgatgcatgaaattaacttg

SEQ ID NO: 4295 - DNA, 1421 bp, Zea mays
  Clone ID: 700352824_FLI
gatttacatacctgtgatgaattggtttctaatggtcatgtgcatcatcatcgtggcaacttttaggagtaccaatgatattgccaatgcatacggcattgctgaagttggcgtcatgatggttagcactgcactggtgactttggtgatgcttcttatatggcaaaccaacttgttccttgtgctatgcttccctattctttttggtgcagtagagtttgtttacttaactgccgttctgtcaaagatacaagaaggggggtggttgccgctggctttctcatcactgtttctctgcataatgtacacatggaactacggaagtgtactgaagtaccagagcgagatgcgcggcaagatatccctggacttcattcttgatctgggagccacacttggcaccgtaagagttccaggcattggactcgtgtacaacgagctggtccagggaatcccatcgatctttggccagctattagtcacacttccagcgatgcactctacaattgtctttgtttgcataaagtatgttcctgtcccttatgtccctcttgaagaaaggttcttgttccgaagggttgggcagaaggactaccacatgttccgcagtgttgcacgctatggttacaaggacgttaggaaagaagaccatggcttctttgagcaacttctggttgagagcctggaaaaatttctcaggagggaagcccaggaaattgcgctggaggcgagcacaatggaggcagagcgtgatgacatatctgttgtatccgaggtgcctcagactcctgcaggtgacggggacctgcaaactccactgctttctgaccagagatcaggcgataacaacaggatggccgccacagatggaagcgaccctgtcctcccctccagctccatgtctttagaagaagatcctggcttagagtacgagctgtctgctctgagagaagccatggcctctgggtttacgtatctcctagcacacggagatgtgagggcgaggaaggaatcagtcttcacgaagaagttcgtcatcaactatttctatgcgttcctcaggaggaactgcagggccggcactgcaaccctgaaggtcccccattcgaacatcatgcgtgttggtatgacgtacatggtctgactgggactctgctactgttgcgtcacaggactgtaccacgaatcttgtatggactggtgctgcaccagctcgtagtttaggggctgtactgtggtaccgattacattcattgctgcctctggccatctgcccggaatttgtcacagaaatgactgtatttgttcgatgtgtgattccttccgcctttggtcgtcatgtggtctgtatgatatatgtggatactgtatctgtatgaacaggtatttgtgcaaatgctccttgcatttgttgccccctc

SEQ ID NO: 4296 - DNA, 1388 bp, Zea mays
  Clone ID: 700352848_FLI
aagatggcgtgtatagacaatgcaatgagagccttgttccttttagcgctcttctgtgtcgtgcatggtgagaaggcaaagtcaaaggacaacgatgcaaaagcgtccgggcccggtgggtccttcgacatcaccaagttgggcgcctccggcaatggcaagacggatagcacgaaggctgtgcaggaggcgtgggcatcagcgtgcggcggcaccgggaagcagacgatcctcatccccaagggcgacttcctcgtcggaccactcaacttcacaggcccatgcaagggcgacgtgaccatccaggtgaatggcaatctgctggcgaccacggacctaagccagtacaaggatcatggtaattggatcgagattctacgcgtggacaaccttgtcatcaccggcaagggaaagctcgacgggcaggggccagccgtgtggagcaagaactcctgcgtcaagaagtacgactgcaagatccttcccaactcgctggtgatggacttcgtgaacaacggggaggtgtccgggatcacgctgctcaactccaagttcttccacatgaacatctacaagtgcaaggacatgctgatcaaggacgtcaatgtgacggcgcccggggacagccccaacacggacggcatccacatgggcgactcgtccggggtcaccatcaccaacaccgtcatcggcgtcggcgacgactgcatctccatcggccccgggacctccaaggtgaacatcaccggcgtgacctgcggccccggccacggcatcagcatcggcagcctagggcggtacaaggacgagaaggacgtcacggatatcaacgtcaaggactgcacgcttaagaagacggccaacggcgtccgcatcaaggcgtatgaggacgccgcctccgtgctcaccgcctccaagatccactatgagaatatcaagatggaggactcgggctaccccatcatcatcgacatgaagtactgccccaacaagttatgcaccgccaatggtgcctccaaggtcaccgtcaaggacgtcaccttcaagaacatcaccggcacctcctccaccccggaggccgtcaacctgctctgctctgccaagatcccatgcaccggcgtcaccatggacgacgtcaacatcaagtacagtggcaccaacaacaagaccatggccgtatgcaagaacgctaagggcagcgccaagggttgcctcaaggagctcgcatgcttctagaaccaccatcgacccatctctctagttatacaatgtgtttggttgttggatgctgagagattggttctcagctcagatgcaagctgcgcctagcctgtgtaggtttgtgctggtacattgagagctcttatttatttgctttgattgcaatt

SEQ ID NO: 4297 - DNA, 1356 bp, Zea mays
  Clone ID: 700352855_FLI
gcaagttgcactggctccagctgctgcacttccacatcggctccatgatcccgacgacggggaaagtgtacgacgcggtgagcgaggccgctggcatctactgcaacctggtgaacgagcacggcgccaagtggttggccacgctggactgcggcggcgggctcggggtcgactacgacgggacccgttcaggcgactccgacatgtcggtggcgtacgggatacaggagtacgcctccgccgtcgtgcaggcggtgcggctcaagtgcgactacaacggcgtcgcgcacccggtcgtgtgcaccgagagcgggcgcgccatggcgtcgcaccactccatgatcatcctcgagacgctctcggcgatcccggagccgcaggacgaggacacctccgagcagctgttgaacaggatccaggacctatcttacaagcagccgagagctccggttggcggcgccacggcggccgtttactctcacgccgcagacctcaagaagcacggcatcgagatgtacaagcttggcaagaagctcggcaagagggtcgtcgccgatgccaacaccgtctataactaccacatgaacctctccgtcttctcgctgttgcctgacttctggggcatagggcagctcttcccgatgatgccggtgagccgcctcaacgaggagccgactctcaagggcacgctggtggacatcacctgcgacagtgacgggaagatcgagaacttcatcagccgcgaaaacacattgccgctgcacctgttcgagccgagcctcggtggctactacgtggccgtactcgtctccggggcgtaccaggaggccattgctggcaagcacaacctgttcagtggcccaaccctcgttcgtgtcaatagtagcactacaaaagatggcggcttcgagattgaacgcgttgacctgggcccagctgcggatgagatcatcggcagcatgaggtacagcgtcgaggaagacattatcaccgtcatcgagaagaaagccaaggggacagaagaagaagaacgtgtgtgggcgtgggagatggtggagccactcatgaccaaagcgctcaccaccatgccctacctcaacgaatacaaggtccctgaacctgaacctgaacctgaacccatcccttgaacttctgcactgcagagtctccggatttggctgcgactgcgatcatatatacaataagaactgcctggttgatgatggataagcagataacgaaagcagcctacgtatgtatgtttcccttttttgagtttaccctgctcgcttgcatcttgttattgtacgtgttatccaataaataaaacaagcttcactggtgtgtttaattgct

SEQ ID NO: 4298 - DNA, 687 bp, Zea mays
  Clone ID: 700352882_FLI
agaaggatgagcagcagcagtcccgagggatagcactgatgcagggcatctgcgccgtggtgtaccgcaaggccgataacacgccctgccccatcaagcagcattcaataaggacgctctcaagagtttgaacatcacccatatcttgatcgttgcaaagtcactggatccagtatttccagctgaatttaattacaagaagatcgaagtacttgatatcccagacactgatctgttaaagcattctgatgaatgctttggtttcatagatgaagctataagctctggaggcaatgttttggtccattgctttgctgggcggtcaaggagaagcatcaaatgagcctcgaaagtgccttgtcactagttagaagtaaacgacctcaagtggctcctaatggggggtttatttcccagctggagaagtttcagaaatccttgcaagtggagcaggaatggagaatgcaacctgtgcagcactgataattatactagtgttataataggtgcagaaggcctcatatgtagtgaaggcgtatgcgttgtaagagcgtcttgaccgcgtattatgacatctggataacaagcgaggccttggcaaactttatgatgtaaacagcaagcaacgttgttcatccattgggatgcagtttacatgttgaataatattcactgcaatttctcttc

SEQ ID NO: 4299 - DNA, 1284 bp, Zea mays
  Clone ID: 700353002_FLI
ggaagtacaagttggaatgggtccaggaggtgagcttaggtatccgtcatacccaactgagaagctaaatcagccaggcagttcatctgaacttggggaatttcaatgttatgataagtttatgcaagcttcgttgagtgctcgtgcacagatttttgggttacaacagtggggcaatggcggttcaactggcacagatggttcacagcagaaccttgaagaaacgagtttttttcgcaccgatggaggctattggaatacaccttatggtcacttttttcttaagtggtattcaggaatgcttctcctccatggagagaggttatgcatgatagctgatgcaatcttctctggtactggtgtgaccatctcagggaaggttgctggaatacattggcactattatacttgttcacatccatctgaactgacatctggctactacaatactctattaagagatggctatcttcctatagctcaaatgtttgccaaatacaaagctacattgtgctgcagttgtttcgacctgagggacgcagaaagaacaaattctgagagcagtcccgaaggtactctccggcagcttgcaggtgctgctaaaatgtgcaaccttcctcttaatggtgagaattctgcgacaaggctggatgatgcatcactgaatcaagtgataagaagctcaaggctctactcaggctgtacttcaggaacatctttttcctttaactatgttaggatgaacaaaagcttgtttgagtttcacaattggaatcgatttacaaagtttgttaggcagatgtcagatgccaggacctttctagcaagactgtatgtcaggagagggcagcaatacttgtcttcaatgtcagttgtttgggtggttagtcgggcttgtgcatatacatgaaagttgtcaaaagctattgcggataatctcagccataaatggttccaccactgtggatggaaaaggtttgctcagtatatggctcatttttagttgccagaagggcaggcaggcttatatgctgaaggctgtactgatttcatgcatatgcatgtattagtttcatgcatatgtcattgctgaacaaaagtttatagttatttgttgtaaagtggcagactggcagtgttttgctgccaacaatattgaatcgcacgagggtcctgtttagccattttagaaataattagatggagcttcatgttttcccgttacaatatgaatgctttcaaactatatctgcctatgaaaatatgtatacttcctcttgtcac

SEQ ID NO: 4300 - DNA, 1845 bp, Zea mays
  Clone ID: 700353018_FLI
aagcaagtcagcctcaccctctcacaccaccgccactcactcagtgctccaccccaagaaccaagcagctcacccccatggcgtcctacgacaaggccttcgaatcctacaagaaggccctcaccaccgccgcgtccgtcgctgcgtccatgatgctggtgcgcagcgtcgtgaacgagttggtgccgcccgagttgcgcgatctggtcttctccggcttcggctacctgcgctcgcgcacgtcgtccgaccacaccatcatcgtcgagaagaagaacgacgggttcgctaacaactacgtctactgcgctgtgaagacttacctcgccacgcgcatgaacaccgacatccagcagcgcctgcgcgtcagcagcatggacgaggacgacaagatgatggtcagcatggatgagggcgacgagatgctcgatgtttatcaaggcacggagttcaagtggtgccttgtctgcaaagacaactcaaatgactccctcaacagcagccagaacgagtcccacttcttcgagctgaccttcaacaagaagcacaaggacaaagccctcagatcgtacctcccgttcattttggccacagccaaggccattaaagcccaggagagaaccctcatgatacacatgactgagtacggcaattggtccccgattgaactccaccacccatctacattcgacacgcttgccatggacaagaagctgaagcagtccatcatcgatgacctggacaggttcatgaagaggaaagattactacaggaagattggcaaggcatggaagcggggttaccttctgtatggtccacctgggactgggaagtcaagcctaatcgcagccatggccaaccatctcaggtttgacatatatgatctcgagctaactgcggtcacatccaactcagacctcaggaggcttcttgttaacatggacaaccgatccattctagtcattgaagatattgactgcaccatcgaactcaaacaacggcaggaggccgagggacatgatgagtcagattctacagaacaaaacaagggggaaggcaaggtaacgctgtctggactgctcaactttgttgatgggctgtggtcaacaagtggggaagaaaggatcatcgtcttcacaaccaattacaaggagcggcttgacccggcactgctgcggcctggaaggatggacatgcacatccacatggggtattgcaccccagagtctttccaaatccttgccaacaactaccactccatcgagtaccatgacacgtatccagagattgagaaactgatcaaggaggtgacggttacgcccgcagaggttgctgaggttctgatgaggaacgatgacactgatgttgtgctccatgatcttgtcgatttcctgaagtcaaaaatcaaggatgccaatgagatcaagactgaacacaaggaagcagacaaccagctagatgagaagaaaaatgacaaaaaataaaacccagtgcatttccttccaaaaaagaagatgaaagctaatggcggtttaagactgagcacaaggaagcaaataaccagctggatgaggagaaaggcaacgagatagtgagaaaaaaaaaacagtgcaattccttctagtagaggaaagaagatgaaagcaacacatcgtatttcatatagatagatcctacaggggatccattggcatatgtgagtgtttgcatattgttaacattatgtttttggtgatcaatgaggtgtaatggtacttgcagtgcatctgcagaattctgttagtgcttgtttaggagcatgtatgcagaactacagatatgtaaaatcccattacaacttacatg

SEQ ID NO: 4301 - DNA, 1370 bp, Zea mays
  Clone ID: 700353024_FLI
gggagaagtagatctgcatctgcgagagaaggcagcgggggtggtgatgatggagagccagccgctgcaggccccgacggccacggctccggcccccggatctgcggagccagccggagctccgccggccgtcacccccggcaaggagttcacgcgcacctgcaagggcctcgtcgtcgtgctcatcggaggatacgtgctgctccagctcctcccttcgtcactcaactacctcgccatcatcccctccaagacaatcccctatgtatggaccgtctttaccgctggttacatcgagcaagtcctcccaggggccattggcagttctcttggtcttctcttttgtggaaaggacattgaaccagcatggggccgcaaggaattcttgaagttcattattttgatcaactccatctgtggcattcttgcattttgctttgctattggactctactacgtcactggaaaggagagcttccttgtcacaccactttctggtttccacggttgccttgctggctttcttgtggccctgaagcaactcttaccaaaccttgagcttcctatgtgctttttctggaaaataaaggcaaagtggatgccattctttgttgtatgtttctcaagtatcatggccttcatcgtgcctgattccattaacttcctgccaactttggtgtccgggatgtacgttagctggctttacctgagatacttccaaaggaacccactgactggacttaagggtgatcccagtgatgacttctccttccccagtttattcccagctgccatgagaccagttacggaccctgtggccaacctgtttgataggctgttgtgtgcaaggtccaggactttggaagtcgccctcccgatatcagatcctaccaaggcttcaagaagaagggagcgcggcgagagggttcttgaggaaaggttggctgccgacaatgctggtgacacagaggcctcgcctcgtggccatggcaccgcggaagactgagaactttcttgtgaccatcagctcctcttttaggagccatggctttgctccctccagcgtttatagctctgcacttttgtcttctggagatggagttattcagttcacagcgaacgaataatacgatgttcttagtttcttttttttttcccgcttctttgtctgcgaggatttattggttaaattgtgtactagtcaattgttatggtacagcgaaaaagagagaagaggatgatggcattcgcagcgaggtgttgagattccgttgtagccatgcatttgcagccgattgtttggtactggtcaaagttctgtagtagtcataatactctgctcaaaatatagaaagaagaatggcttcgtc

SEQ ID NO: 4302 - DNA, 1784 bp, Zea mays
  Clone ID: 700353062_FLI
gcgtgcccttctcactgcacgccggtgagaattgagatcccagcaccgagacgacgacacaagtctcacctccatcctcctttactcctcatcccagatccccctctccgaaccccgccgcctgccgcagatccgagggtcatcggcagccatgatctcgtccagcaagctcaagtccgtcgacttctacaggaaaatacctagggatttgaccgaggcatcactatctggcgctggattatccattgtagcagcattagcaatggtttttttgtttggaatggagttgagcagttacttagcagtcaatactaccacatctgtgatcgttgataggagttcagatggggagtttttaaggatagatttcaatatgagctttcctgcgctttcatgtgaatttgcatcagttgatgttagtgacgtgctgggaacaaacagattgaacataacgaaaactgttcgaaagtattcaattgatcggaatttagtaccaactggatcagaattccaccctgggcctatccccattctcaataagcatggagatgatgtcgaagaggatcacgtggatggtgcattttcattgtcatctcgcaattttgatagcttttcacaccaatatcctgttttggttgtcaacttctatgctccctggtgttactggagcaatcgactgaaaccttcatgggagaagacagcaaaaataatgagggagagatatgaccctgaaatggatggtagaatccttctaggcaaggttgactgcactgaggaagttgaattgtgtaggagaaaccacatacaaggatacccatccattcgtgttttccgtaaagggtctgatataaaggagaatcagggtcaccatgatcatgaatcatactatggggaacgtgatactgagagtttagtcgcggcaatggaaacatatgttgcaaacatcccaaaagaggctcatgctttggaagacaaatccaataagactgttgatcctgcaaagcgccctgctccaatggccagtgggtgcagaatagaaggctttgtgcgtgtcaaaagggttccagggagtgttgttatatcagctcgatctggatctcactcgtttgatccatcccagataaatgtttcgcactatgtgacacagttctcatttggcaaaagactttccccaaggatgttgcatgaattcataagacttactccctatcttcgtggataccatgatagactagctggccagtcttatactgttaagcatggtgaggttaacgccaatgttactattgagcactacctacaagttgtaaagactgagcttgtaacacagaggtcctcaaaggaactgaaagtgcttgaggaatacgaatacacagcacacagcagcttggtgcacagcttctatgttcctgttgtgaaattccattttgagccttctcccatgcaggtcttggtaactgaagtcccgaaatccttctcccatttcatcacaaatgtctgcgctatcatcggtggggtcttcacggttgctggaatactggattccatctttcacaacacactcaggatggtgaagaagattgagctaggaaagaacatttaaatttcgacgccgctgcaagtttaggcggatgcactaggtagccattgttttgttataactaggtaatgactcatgaaaatcggtatatgaaagatggcgtgctgaattgacagttgaaattcggggtggtcatgaactcatcatataataactagggatctcactgtttcgctaaaccact

SEQ ID NO: 4303 - DNA, 1789 bp, Zea mays
  Clone ID: 700353089_FLI
cagaaaccacatcatagaggtactctcggcaaatgatctagactgtgacgatctgagctcaatctgtgaagcagacactatggttctcagcaattacatagaggagatcatcgtatcagctgtctcctaccacttgattcacaacaaggaccctgaatacaggaatggaaagctcatgctatcatctaaaagtttgtcccatggtctaagcattttccaaggtagccatggtgggaaagacactctgaagttggaagaaacgaaggatggtttgaaaggagctcttgggtctaagaaaactgagacacttccggttggcgaaggtccagtaccgctgccaaaaccagaagttccagacaatgagtttgaaaagcgtatcagaccagaggtcattccggcaagtgagataggagtgacattcgatgacatcggagccctggcagatatcaaagagtctctccaggagctggtcatgcttcctcttcgacggcccgatctcttcaaaggagggctcctgaagccgtgcagagggattctgctgtttgggccacctggaaccgggaagaccatgcttgccaaggctatagcgaacgacgccggcgccagcttcatcaacgtatccatgtccaccatcacatcgaaatggttcggggaggacgagaaaaatgtccgggcgctgttcagtttggccgccaaggtagctcccaccattatttttgtggacgaggtagacagcatgctggggcagcgcgctcgctacggcgagcatgaggcgatgcggaagatcaagaacgagttcatgagccactgggacggtctcttgtcaaaaacaggcgaaaaaatcctcgtcctcgccgcgacgaataggcctttcgaccttgatgaagccatcatcaggagattcgagcgcaggatcatggttgggcttccaactctggagagcagagagctgatcttgaggacgctgctttcaaaggagaaagttgatgaagatattgatttcaaggaacttgcggccatgacggaaggatacagcggcagtgatctcaagaatctctgtgtgactgctgcttaccgccctgttagggagctcctgaagatagaaagagagagggaactggagcgaagggaaaaggagtcaaaagacaaggcggcggcggcggagaattcagaagccccggagagtgagaagaaggagagctcagaaaccaaagaagctcggaagagcacgcagagtccagaaggcggcggcaaaggcgacgagggtccagacagcaaggcggagggcgagaaggaagcggccgttgttgaccttaggccactgacgatggaagacctgaggcaggcaaagaaccaggttgcagcgagcttcgccgccgagggtgccgtgatgaacgagctcaggcagtggaacgacctgtacggcgaaggggggtccaggaagaaacagcagctgacctacttcttgtagaggtgaagcatttggcaggtggtggagaggaacagagctgggcagacggtggacccatacttgatgaaccgagcatggtttcttcaagacgtgacgtgggcatgacgcatagtactagtctttgaggttccaggatccatgagatgagatgaggtcgatggtcaatttgtaggatcatgaactattattcttttacatgcatttgtacatgagcgctagactggttatgtatatctggattgattgaacagctcttgtgtttgagggtcattttagcttctcgtagactgctgtaattatatcatatatagtgagtat

SEQ ID NO: 4304 - DNA, 1586 bp, Zea mays
  Clone ID: 700353104_FLI
atggcagaagcggccggcggcggacccctgctccccgaggaactcattatctgggagatcctaacccgtctgccggcgaagcccctcctccgatgccgcgctgtctgcctctcctggtgccgccgactcacctccgacgccaaattcctcctcgcccaccaccgtcgccagccctcgctcccgctcctcactgaaggggacaggagcaccgaggagaggaggatcgacgccctggactaccgcaccggcgagcggcgccccatcgcgcggacaacaggccggaccgccgccaacggggacgacctgaacgtgctggcttcctgcgaaggcctcctcatcctcctcgccaacggcggcctccagatctgcaacccggcgacccgccagcgcgcgccactcactcttctccacggcgcctattgcatctccgcgctttatcctcacatcccgtccaggtcgtaccgtgtgctctgctgcttcgagagagccgaggacggccacgccgtgtaccacgtgcacaccgtcgggtcgcgcgagctcaggtgcgtcggagaacctcccgcgccgtgggcgtccggggatatggtaatggcgatgccgatgatggtgtaccttcacccgcacgtcgtggcagacagcaggatctactggcagccggtaaagctgcccgtcggcaacggcaaggtcaacaacatgctcgtgttcgacacaatgaccgagtccttccagcaactgctgtcgcccgtggagggcccctttcttgaactgtttcagatgaacagcggcgcccttggattgtaccactgccgcagcggcaaggttgatctttgggtgttacaggatcacgggagctggtcctggtcgatgaaccaccggatcaaattggacgtgatgtttttctccctgctgccggtgctggacccggaaggagatgtgctagtgctttctaaaagaggggaaacaggcatcctgtggcaacatctgcatcacatttctggtgtcaatggcagtttgctggccctgtatcaatggagcgcttatctgaagcttagcaggcataggctcaaagaaagtctagtccaccatgacttcttctcgatggaaggtaatgagggtggtgtggatgaaaaaccattgttcgatggcttgtcaactgtggcattgcttcgtgatgataattctgagccacattgagaaacaaaggtattactcaagctgtttcatctcatcaggatggagtcactcctgcctagtaataacagcactgcagattagtaataacctgaaactatacctcgagtctgatttttcccttttcacatgagtcataaacactgttatgactggtattttattttcccttttcacgtgagtcatgaacactgttattactggtattttattttccattttcacatgagtcatgaacactgttatgagtggtatgtatgtgcgctggaaaacgggctatggcggtgttggtctcaaattagttgccatttggttcacgaaatgtaacgtaaatggtaacgacaatataacaattttaaggaaggcaaacattttgcctagcctcaagcgcttct

SEQ ID NO: 4305 - DNA, 1307 bp, Zea mays
  Clone ID: 700353143_FLI
ctttaatcactcgaattcctctgccttttcaagatatggcaataaaaggatagaaccatcaggtgagattcagtttttcccttctccctgcgtcattgggcaagggcatgttaatggcaagaacccagttttccaacccgatggggtgttgctgcctcccaatgaacataatacaggtgagagtacaaggcaagctcgaatttctctggacagtaggacagagggtgctgccatcctgtgttccactagtgccagggaagatgctggtgcaaatagttcttcccatagaaaggacagtatgagccatccctcatatgggtttatacctgttccaattcctgttggtgccacgatgccgtaccattatggtgcgattctgcagcccgtatactacccacagagtcctcttatgcactgtgattcagctggaatcaacaaggcagcaatccagcatgcctctgggcaacctaattaccatgaagctcccggtaaaccatctcatgttcttattgaacacaaacagtcagaggaaaaccaccagttgcatcattcaagacaaattcttcgggaatcaggagaaccaattgacatggcgagagctcacgtggatcgtgctaaccagactgcaagctgcagccaaggtatctgtaaaggaagtggatgcacatgtagtggtgaagccgatatcaacgcaaacacaatggttgccctagagagtggcaacgagagtggaatccaaaatggtgacaggtctcgccgtgaagctgcgttgatgaagtttcgcatgaaaaggaaagatagatgcttcgagaaaaaagttaggtatcatagcaggaagaagctcgcagagcaaaggccaagagttaagggacaatttgtaagccaaaagctgaactcagctacaacaacagacgcagaagctgactcgtgaccggcgtcaagtcatcactgtaacttattcttcccttcccaccaggtgtgggcaatcggacttgtaagactgaaggctggcagaagttttttcccttccatggttagcctttctgcacaacgggtgaactcttgtgtcgggtgtttggtgccgttgtggccttatttttgtaaagtgcatcaaattgacaaatgttcagaggggaatgggttgggggtttaggaaaacggtgcagctgccagatttcgcctctgtacttagatgtttgtgggggtgagaaagcagagcatgtacagcttattcacccattttgttgccattacactagtagtgacttgtactatgacaacagtagacattgttgtacagccttacc

SEQ ID NO: 4306 - DNA, 1118 bp, Zea mays
  Clone ID: 700353167_FLI
gtggcggttgagctctcatgtcatgtcatgtcgtgtcacgccgcgcgcatgagcgagcggtgggcgccgacgatcgggctggcacaccacctgccttcctgacgcgtgccttccctcgtgctgactgctcgctcgctcaaacaactcgacagtgcagcggatttctcgagggactacgacggggcctgcctccagatgcgcatgtcctacagccccgccgcccacttcttcctcttcctcgtgcagtggacggactgcagcctagccggcgcgctcgggctgctcaggatcctaatctacaaggtttatgtagatgggagtaccaccatgtcgacgcacgagaggaaagcgagcatcagggagttttatgctgttatctttccctccctgatgcaactgcccaaggggatcagcgacgtggacgaccggaggcagaaggcggcgtgcacggagaggtaccggaggagggacgaggacgagggcaagaggccggtttcggaggccgacatcgaaagggaggaagagtgcggcatctgcatggagatgaacggcaaggtggtgctgcccagctgcagccatgccatgtgcatcaagtgctaccgccaatggcgatcaagatcgcaatcctgccccttctgtcgggacagcctgaaacgagtgaactccggggacctgtggatgctcaccgactgccgggacgtggtcgacatggcgacggtgacgagggagaacatcaggcgtctgttcatgtacgtcgagaagctgcccctcgtcgccccggacaacatcttctacgcctacgattctcatgtaaaatagctggagctagctgtagtgtagcagcacaccatctgtgctgtgctgtgctgtgctgtgttgtgttctgagagtgatgacgcatgatttatcgattattcatgcagaggggtagagggtgttcctcgtcctagctaggacgtggctaaacgcttggaccggggtgcggactctgacgacagacctttttcagtctatctaactgggtgtacagtctgctcaggtcctgtaaatataatgtctgtgcatatttatggcttcaaatgccccgttgtttttcagctggatatatttgtgtctcc

SEQ ID NO: 4307 - DNA, 976 bp, Zea mays
  Clone ID: 700353236_FLI
cgccgtctacggcctggactacgagggccacggccgctccgacgggctgcagggctacgtgccggatttcgacgcgctggtgctggactgcgacgagtacttcacctcggtggtggcggcggcggcgcagtcgcagtccaaggacgcccaccaacttccccggttcctgctcggggagtccatgggcggcgccgtggctctcctcctccaccgccggcgccccgagtactggagcggcgccgtgctggtggcgcccatgtgcaagatcgccgacgacatgcggcctcacccgctggtggtcaacatcctcagggccatgaccaccatcatcccgacgtggaagatcgtgcccagcaacgacgtcatcgacgcggcgtacaggagccaggagaagagggacgagatccgcagcaacccttactgctacaaggacaagccgcgactcaagaccgcctacgagctgctcaaagtcagcttggacctcgagcacaacctcctccaccaggtgtcgttgccgttcctgatcgtgcacggcggggcagacaaggtgacggacccgtcggtgagcgagctgctgtaccaatcggcggcgagccaggacaagacgctcaagttctatccgggcatgtggcacgccctcacctctggcgagtcgcccgacaacatccaagccgttttccaagacatcatcgcctggctcgaccacagatcacccgacacggaacaggaggagctggtgtcgtcggaggtggagcagaaggccaagcacgacgaccagcgccaccaggagcagctccaggacggcaacaaatagctagctgcttgcttgcctgctgctttcttctctttacagaacgaaccgtttcatttggtcatgcatggatacacatcatgtctcagtgatacgtaccgactaaattaaattattagatcgaccgcgcttacctagaaattaaacaatcagctgttcgacatc

SEQ ID NO: 4308 - DNA, 623 bp, Zea mays
  Clone ID: 700353242_FLI
aagccgtaaaataaatgtcatgtttatcatgagaataagcctcagctattctggtttacatggcaatgttaagtaagcaaaaatgaaatacataaggttatctttgtattgtccagtcaaggggaatcaatgtatattgcctccacactattgactggtgcgtggtaataaaacaacacgcgataacaaaaagggcaggaataaattccttgggacggatcatatcgatcttacggtggtgagtggtcatcatcctctataactccttgctcgctgaaccatatccaaaatctgagccaccccccgatgatttactccctccagaagcacctgcagcagcactgccacttcctcctacacttcctccggcgccgccaccaaatttgacgcctccgaagacaccagcacctatgttagctccaataccaccgtcggcgccaccggatcctccaccagaaacgcctgcatcggcaccggttccagtatagacgttgccacttcctcctgcatttcctcctacgccaccaccaactttggcacctccggagacaccagcacccacggtagcactggtacctgcactggcgccaccggatcctccacctgaaacacttgtacctgca

SEQ ID NO: 4309 - DNA, 1398 bp, Zea mays
  Clone ID: 700353248_FLI
gaggtcggagaccggcactgctggggagggcgatgaggagcagcggttgcgggctgctctgcgtcacctgcaggcggaggcgggggtgctggagcgcctggtgtacaagcaccggaaccagcaccgtggcgccgcctatttccaatacctcctcaaggtgaggagggacctcaagcttctgctcggcgccggcctcgcggaggtcctcaacgccgtgttcccagttctcgcatgccgcaagccggccaacacgatcctcgtccccaacaagcagactaagaagaaacctggtgcaaaccacagccatcaccagaggcttttgggtgtagcccgcttgttatcccagatgtctgaacctgttatgaaggcagcaattcagataacatttttacttgctagatcattcttcgttgatctttgcacggctgtgctttctttgcttgcacgagtaagggtcctgatccaacagatgttacttgatgttgtgtctatatacaataaggtcactgatcttactgaaaggaagcaggctgttaagattagcatcagtggagtgcaggctttcagagagtactacccctctatgaatgatgcatgtacagttctggagtgtgtatggataaaagataaattcgttttgcatgaaaaggttaaagatatctctcaggagacccaagttgagaatcagaagtgccgcgatcctgaatctacagtccagtatgaaacgcttgcactgattagtgaagatatgaaaatcctagaagaaacgaacttgccagacagacagacagatactgctctagcggagcaaccggataaaatgattcattgcaatgatgctggagattctcagaaggggaggcaactagaaaatgaaagcagtgctcgtttagttcctgacacccttagtactcggaagcacctgaagcccgagtctaggaagagagtagcatttgtagcagttggaaattcgaaagttacgggtgcagcctcagaaataaaatcatcagaggtgaacaagaagcaaaggctagacatgatttctccttccaacatacaatctggactgtacaacaaattgctggattgtgagtttgcagaaaaatccttactttagtatgttcagaatttaatacttcaatactttttcaactggaaaagcaatagataggaaagtgcgcttgtgcgaaagtatctcaaggtacggcaaatgtcagtgttctgaagctgaggccctttatcatttctgtttcaaatttctaaggatgatctgcaacattgttttgtagtgtttgtattagggagatgcccatcttcacatcaatgttcagaagttatgtgcgctatgagatttaaattatgagctgccagattgttttgtagagtttgtatttggtc

SEQ ID NO: 4310 - DNA, 485 bp, Zea mays
  Clone ID: 700353255_FLI
actgcccctactacaactgcgagcacaagtacgtgtccggggtgactctcaatgacattcacttcaagaacatcaagggcacggcgacgacgccggtggcggtgttgctccggtgcggtgtgccgtgcaggggtctggtgctgcaggacgtggaccttaggtacaaggggcagggtggtacatcggccaagtgcgagaacgccaaggccaagtaccttggctaccagtttcccaaaccctgcccctaggtgccggtgcttgtccggccgtattttagctcatctctgtccactctctggtgtccggtgaagtgggctttgattcttcggtcgtgttctctagacgttttttcttcttctcttctgggttttcctgtttgctttcttgattagctgaatttcgcggtataatgtcagttgcttgtatcagtgaatttgtgaataccagtcattgttgaatatatatatggggaataatgccttgat

SEQ ID NO: 4311 - DNA, 1231 bp, Zea mays
  Clone ID: 700353411_FLI
aggaagtcggatcgagaggataccagaggtactgcaaaagataagaaatatgttcgtgatgatgagaaggatcattctagggagaggggggctgggagggatgacaagtatggtgcttcaaaggtggcattgccggtctgggatgatgatagacatggaaggcctaatcggggtgactggaaatctgcttcttcaagggagcaaaggctggactgtggtgacagaagggattctacaagagtgaaaccaacagatcatgatgggagcaatgggggatcgggaaggtctttcaggcatggtcgttcaatgtctccagaagagcacaggcatcggggcaggcatgaatctcatccatcatcgagagtgtccagaagtgcagcacatatcgaggatattaactcgagaggaggtgaagcatcccggaatggagatcctgatgctttggcaacaatgaacgcaactgcagaagctcttgaagcaaaagaaaagcaaaagccatcgtttgaattgtctggaaagcttgctgaggagaccaacagagttgcaggtgtaaatctattatattcagaacccccagaggctcgaaagtcagagattagatggaggctctatgtatttaaagatggtgaaccactgaatgaaccactgtatgttcatcggatgacctgctacctttttggaagagaaaggaaagttgcagatgtccccacagatcatccctcctgcagcaagcaacatgcagttcttcaatacagacttgtggagaaggagcaactagatggcatgatgacaaagaaaataaggccttatctgatggatcttgatagtacaaatggaactttcatcaatggaaatcgcattgagcctcggcgatattatgagttatttgaaaaggacacaatcaagtttggcaatagtagccgggagtatgttttgctccacgaaaattcaacagaatgagttttgagaaaattcaacagaatgaggattgaaacaatcagccttttatgctgtagaagaaaaatacagcaaaaacatgaggttttgcatgttttaaaatttttagactggagattggccggcttgaacttctggtctgtgatttcttcacgtgttcaagtctataaggatattttgtgaaccaacatgtagtgctattgtaatgaaaagagctagctgcctgtagcagatagccctggggtattgtttgtattcaagcatgttttgcacc

SEQ ID NO: 4312 - DNA, 623 bp, Zea mays
  Clone ID: 700353539_FLI
gcgcactttcatcgccatcaagcccgacggcgtccaaagaggcctgatttctgagattgtgaaccgattcgagagaaaaggctacaagcttgttgccatcaagctgattgtcccatccaaaggattcgctgagaagcactaccatgatctcaaggaaaggcctttcttcaacgggttgtgtgacttcctcagctctggccctgtacttgcaatggtttgggaaggagagggtgtcatcaagtatgggagaaaactaattggtgccacagacccacagaaatctgaaccaggaaccatcaggggcgatcttggcgttgttgtgggaagaaacatcattcatggaagtgatggcccggagacagcaaaggatgagatcgccttgtggtttgaacccaaggagctggtctcttataccagcaatgcggagaagtgggtctatggggtgaattaaccagcgactaaatctcttgaggtttgcttttttcttttcagttttcacataattgccgacagaccaaggcaggatgtaataaagtagctaccgtcacctattacttttgagttggattgattgtggtgcagtaaggcacaaggaaaggaaggaatacaccgtgaaatttgtt

SEQ ID NO: 4313 - DNA, 1274 bp, Zea mays
  Clone ID: 700353590_FLI
gaagtaccagtcctgttcagagatgatgggtttcagctgccaacaccgttccgcctccctgcgcatcttcctcgtctccgtcgtcctcctgctcaccgctcctgcggggcgttgccattgctacaagcgcatcttcagcttcggcgactctatcatcgacacgggcaacttcgcgcgcagcggcccgataatggagtacccatttggcatgacctacttccaccaccctaccggccgcatcagcgacggccgtgtcctcgtcgatttctacgctcaagcgctccagctgccgctgataccaccaaatctgccggagaaggacacggggctattcccgacaggcgcaaacttcgctgtgtatggctccacggcgatgcccccggagtactaccgcaggtggaaccacgacgtgcgggcctgttacctgggcgtgcagatgggatggttcaaacaaatgctgcaacgaattgctccctgggatggcgccaagaggcagatcctgagcgagtctctcatcgtgctgggcgagatcggcggcaacgactacaacttttggttcgctgcccgtaggccccgcgagcaagccggccagttcatcccagacatcgtcgcgaccattggctctgctgcccaggagctcatcggcatgggcgcgaaggcgatcctgatcccgaacaacttccctatcggctgcgtaccgacatacctgagcgggtacaggagcggcaaccgcgcggactacgacgagcacgggtgcctccggtggttcaacgacttctcccagaggcacaaccgggcgctgcgcggcgaggtcgaccggctcagggcgcagcaccccggcgtgaagctcatctacgccgactactacggtgccgccatggagttcgtcaaggacccgcacaggttcggcatcggtgaccccctcacggcgtgctgcggtggcgatgaccagccgtaccacatcaacaggccgtgcaacagagcggccaggctctggggcaaaccgagcggcttcgccagctgggacggcatgcacatgactgagaaggcgtaccaagtcatctcccatggggtgctcaacgggccgttcgccgacccgccatttgctaaatggagctgctagctgttagttttggtggtaacggtgaaaggggattggtttgttctcttagctgagagctcacagcatcttcaatagactttttttaaattcatcgctctctaaatcatcatgtaaagaatcatttaaataaaaattactttctataccttct

SEQ ID NO: 4314 - DNA, 1199 bp, Zea mays
  Clone ID: 700353715_FLI
atttttctcaatttcaggttctgagtttgtggagatgtttgttggtgttggtgcttccagagtacgtgaccttttcaagaaggccaaggagaacgctccttgcatagtgtttgtcgatgaaattgatgctgttggaaggcaaagaggtacaggtattggtggtggaaatgatgaaagggagcagactctaaatcaactactaactgagatggatggttttgagggcaacaccggaattattgttattgctgccactaaccgagctgacatcttggattccgctttacttagacctgggcgctttgacagacaggtgtctgttgatgttcctgatgtacgtggaaggacagagattctaaaagtgcatggtggcaacaagaaatttgattctgatgtttctctcgatgtcatagcaatgagaacacctgggttcagtggagcagacttggcaaaccttctgaatgaagcagccattctggctggacggcgggggaggacagcaatttcttcaaaagagatagatgattctattgacagaattgtggctggtatggaagggactgtgatgacagacgggaagagcaaaagtcttgttgcttaccatgaagtcgggcatgcaatttgcggaactttgacacctggccatgatcctgtccaaaaggttaccttaatcccaaggggtcaagctcgtggtcttacatggtttatcccgatggatgacccaacactcatctccaggcagcaactttttgccagaattgttggcggccttggtggtagagctgctgaggaggtgatatttggagagcctgaggtgaccactggagctgctggtgacttgcagcaaattactggcttagccaagcagatggtggtaacgttcggtatgtctgaaattggtccatggtctctgatggagggtggggcacagagtggggacgtcatcatgcgaatgatggcaaggaactccatgtcagagaagcttgcggaggacattgattcggcagtgaagcagttgtcagatgaggcctacgagatcgcattgaggcacattagaaacaacagggaggccatcgacaaaatcgttgaggtgctcattgagaaggagacactggccggagacgagttccgggcgattctttctgagtttgtggagatccctgtagagaaccgggttcccccagccacaccggcggccg

SEQ ID NO: 4315 - DNA, 1084 bp, Zea mays
  Clone ID: 700357449_FLI
gaaaactctcccttgaaggtcatagattttggcttgtctgactttgtgaagccagatgaaagactaaacgacattgttggaagcgcatactatgttgctccagaggtcctccacagatcttatgcctacatcttgctctgtgggagtaggcctttctgggcgcgcacggagtcgggaatcttccgagctgtcttgaaggcggaaccgagttttgatgaggccccatggcccactctcacggctgaagctaaagattttgtaaaaaggcttcttaacaaggattaccgcaagagaatgacggctgcacaagctctcagtcatccatggatccgtaattctcaacaagtgaaggttcctttggatatgataatctataagctaatgagagcgtacatcagctcgtcttcgctgcggaagtctgctttgagggccctagccaagacgctgacgacggaccaactcttttatgtgagggagcagtttgaattgctgggcccgaacaagaatggttacatctcattgcaaaatctgaaatcggctctagcgaagaactccacggatgcaatgaaggactccagggttgtcgattttgttaacaccgtgtgcgctcttcagtacaggaaactggatttcgaagagttcgccgcttccgccatcagcgtctaccagatggaagccctggagacctgggagcagcacgcgaggcgcgcgtacgagctgttcgacaaggaaggaaaccggcccattgtgatcgaggaacttgcgtcggagctcggacttggcccgtcagtgcctctccacgttgtcctccaagactgggtcagacacgccgacgggaagctgagcttcctggggttcatcaagctcttgcacggggtctcgtcgcgctcgatcccaaaggcctagcattgtacaccatccatccatcgtcgttgttgttgtagttgtactgaagtaaagctgttgtgtagacgagtgtacagatgaggatagggaaaagaaatgaacatgatggaagactggaagggccgtaagatttgcggctgctgtttgtcaatgccaaattgccattgcctgcagctgc

SEQ ID NO: 4316 - DNA, 3204 bp, Zea mays
  Clone ID: 700377208_FLI
tgaggcctccatcatctatctcctctctcgtcgtgctggccgaccggcgacgacctatagctcctgccgcctcacgtcgaacgcgccatggccgccaactcaacagctaccaagcatgctttcaagcgtatattgacgagcctgattaagcctggcggtggtgaatacggcaagttcttcagccttccggcactaaatgatccaaggatcgataagcttccctactctatacgtgttctcctggaatcagctatccgccattgtgataacttccaagttacagagagtgatgtcgagaaaatcattgattgggagaacacatctcccaagctggctgagatacctttcaagccagcgagatgcattctaatggacaacactggagtcccagctgttgtagaccttgcagctatgcgtgatatgatgccaaagttgggttgtgatccctacaagatcaatccattgattcccgtggatgctgttattgaccatgcagtgcgagtggatgtagcagggacctatgatgcattggatagaaacgaggagttggagttccaacgcaacaaagaaaggtttgcttttcttaaatgggcatccaatgctttccacaacatgcaggttttccctcctggttcaggcactgtacaccaggtaaaccttgagtatcttgcccgagttgtcttcaacgaagatggcattctttacttcgacagcgtggttggcacagactcacacaccactatgattaatagtcttggagttgctggttggggagtaggcggtattgaagcagtcgttgcaatgcttggccagccaatgggcatggttttgcctggtgtggttggattcaagttgagtgggaagttacaggatggtgtcactactactgacattgttcttactatgacccaaatgctaaggaagcacggtgctattggcaaattcgttgaattctatggtgttggtgtgggcgagctatctttgcctgctagggccacaattgccaacatgtctccagaatatggagctaccatgggcttgttccctgtagaccaagtagcattggactatctcaaattgacaggccgaagcgatgaaactgtgtcgatgattgaagcatacctgcgagctaacaaaatgtttgtggacaagcatgagcctgagacggaacgagttttctcttcatatctggagctggaccttagtgaggtggagccttgcgtttcaggccccaaaaggcctcatgatcgtgtccctttgaaggaaatgaagtcagactggcatgcttgcctggataacgaagttggtttcaagggctatgcggtgccaaaggaacagcaaggcaaagttgtgaaattcgacttccatgtaaggccagctgaaatcaagcatggcagtgttgttcttgcagcaatatgtagctccacaaacacatcaaatcccagcgtcatgattggtgctggccttgtggcaaagaaagcctgcgaattgggccttgaggtgaagccatgggtaaagacaagccttacccctggatctgtggttgctaccgagtacttgaaacatagtggccttcaagattatctgaaccagcaagggttccatgtcgctgcgcatggctgcgccacttgtgtgggcaactctggtgacctggatggatctgtatccgctgctatcacagaaaatgatatcgttgctgctgcggtgctgtcggccaaccgaaacttcgaggggcgtgtgaaccctctcactcgggctaactaccttgcctcgccgcctctggttgttgcctatgctcttgccggcactgttgacattggttttgaggaagagcccattggagttggaaagggtggcaaggaaattttcttgagggacatatggccttcaaaccaagagatcgatgaggttgtggagtccagcgtgcagactcacttgttcaagaaagtgtacgactccatcatggaacgtaaccctaggtggaaccagctgccggttccaaaggaggcactgtacccatgggacgacaggtccacctacatccgcaagcccacttacctggagggcatgtccatgacgccgcctggcccgcccacggtgacggaggcctactgcctgctcaaccttggagacagcatcaccacggaccacatctcctactcggggaagatccccgagggcacacctgcggccaagtatctgctcgagtatggtgtggagcccaagaacttcagctcctatggtggccgccgcgggaacaatgaggtggtgatgaggggagcgtttgccaatatgaggatcgtgaataagcttcttaatggcgaggctggtccctggacgatccatgttcctaccggggagaagctctacgtttacgacgcggcaatgaaatacaagtcggaaggtcatgacatggtcatcatcgctggctccgagtacggcagtggcagctctcgtgactctgctgccaagggaccaatgctactgggtgtcaagtcggtgattgcaaagagcttcgagcggatccaccggagcaacttggtggggatggggatcattcctctctgctttcaagcaggagaggatgccgattcactcggcctcaccggacgtgagcgctacaccatccacctccctaccagcaccgccgagatcagtcctggtcaggacgtgaccgtcacgacccacgacggaagatcattcacttgcactcttcgcttggacacacagcttgaggtcacatacttcaaccatggaggcatccttccctacatggtccgcaacctggcggcacaaatgaaataagttgaagtttattggtgggaataaattaaaaggtactcaatgccacgtatttggcgcatgtatgtaaataagtggcacattctaatcttcaattgtattattcgctctggcattgaggtgggtcatagctgcattatactttctccgcaggacatgagcatggattttgttttagcaacagattatttgtactcttgattctttggttccatgctctcttcggccatctccatgtcaatttgctttgcaaacaatataatatcagcgtgccgtgcccttgtagatttccaaatggttatatgcatatgtactattgaaattgtcattttagtttgcaaacaataccaacgtgcctttgtagatttcaaaatggatatatatgttgtattcaaatttgct

SEQ ID NO: 4317 - DNA, 1492 bp, Zea mays
  Clone ID: 700377505_FLI
gcaacaaacaactcccaaggtccaaagcccacccgtactcatccgcgatccccaaccatggccgtcggcgacgtggagacggcggcgccgctgctgcccccgccggcctctgccctggcggacgagccctccgcgggcccgcccccagacgaccggctcggcatcggctacctcatcttcttcaccctgggcgccggcttcctgctcccctggaacgccttcatcaccgccgtcgactacttcgacttcctctacccgggggcccccgtcgaccgcgtgttctccatatcctacatggtctccgccttactgcccctgctcgtcatcgtgctcttcttccccaagtccagcgcccccatccgcatcaacacggggctcactctcttcacgctcacgctcgtgctcgtgcccgcaatggacctcatctacgtcaaggggagggccgggctgtacggagcgttcgatgtgactgtcgccgccacggctctgtgcggggtcgccgacgcgctcgtgcagggaggcgtcatcggcttcgctggggagctgcccgaacggtacatgcaggccgtcgtcgccggaaccgccgcctcaggagtgcttgtctcggcattgagagtcttcaccaaggcactgtacccacaggacgcgaacgggctaaggcaaagcgcgatcctctacttcgtggccggcatagtcctcatggtcatctgcatcgtgtgctacaacgtggcggacaggctcccggtcgtgatatactacaagaacatgaagaagagggcgcagaaagcggaggtcggcggtggcatgacgggccccgcgtggaggtcgacgctgtggagcatcgtcgggaccgtgaagtggtacgggatcggagtggcgctcatctacgccgtcacgctctccatcttcccagggtacatcacggaggacgtgcactccgaggcgctcggggactggtaccccatcatcctcatcaccgcctacaacgtgttcgacctcgtcggcaaggccctgcccgctgtctacctcctccagaatggcagcgccgccatcgcggggtcctttgcgaggctcctgttctacccgctcttctacggctgcctgcacgggccgagctttttccgcaccgagatccccgtcaccgtgctgacgtgcctcctggggctcactaacgggtacctgacctccgtcctcatgatcctcgcgcccaaggctgttcccatccaccactcggagactgccgggatcgtcatcgtgctgttcctcgttgttggccttgtcattggttccattgtggcttggttctgggtcatctgataccggggtacgttctctgtcacgtcgatgtatcatagcaccatgctcgtgttcttttgtgttcgatttgccacgcaatgacaacttgttagtgtatactgtaacccaggtgaaaagatttccgaaatgtgtaatttgcaactcttggaattggatttgaaggtgacctaatgtc

SEQ ID NO: 4318 - DNA, 1464 bp, Zea mays
  Clone ID: 700377511_FLI
cggcgaagaaggtgctcatgctctgcggcgactacatggaggactacgaggtcatggtcccgttccaagcgctgcaagcgtatggggtgtccgtggacgccgtctgccctagcaagaaggccggcgacatctgccgcaccgccgtccatcagctgaccggtcaccagacatactctgagacaaaaggccataatttcacactgaatgcttcatttgatgagattactgctagtgaatatgatggattggtaattcctggagggcgtgcaccagaataccttgcgatggatgaaaaggtgcttgacctagtcagaatgttctctggtgctaagaagcctattgcatcagtttgtcatggacagttgattttagcggcagcaagagtagtcgagaaccgtacctgcacagcatttccggctgttaaaccagttttggttgctgctggtgccaagtgggaagagcctgacacaatggcaaaatgcactgttgatggcaatctcatcacagcagcgacttataattctcatcccgaattcatcagcctatttgtcaaagcactcggaggttcagtggcaggctcagataagagaatactgttcctatgtggggactacatggaggattatgaggtcatggtcccattccaggctctccaagctcttggctgccatgtcgatgccgtttgccccgacaagggagctggggagacgtgcccgacagccattcatgatttcgaaggtgaccagacctacagcgagaagcctggccacgattttactctgacagcgtcgtttggaagtgtggatgcttcgagctacgacgcgcttgtggttcctggcggacgggctccagagtacctggctctgaacgataaggtcatcagcttggtgaaggccttcgcggagagcggaaagccaatcgcgtcgatctgccacggccagcagatattatccgctgccggagtcctcaaggggaagaagtgcaccgcatacccagccgtgaagctgaacgtgttgctcggtggcgggacctggctggagcctgacccgatccaccgctgcttcaccgatggcaaccttgtgaccggcgcagcctggccaggccacccagagttggtgtcccagctcatggcgttgctcggcgtcaaggtttccttctgaagtccaaactgaaagggcaaggcagaaagagctctggctcaacctggggaggggcgtgatagcatagctttggatttccagatagaagagaacagactcaaaacgacaccttatagcgatcgctgcacttaatccttgttccatgcgcagcaagcctcaggcttattacccttgtttgtcagcgttgtgtaaaaactgtaacccggatgctgtttcttcttcttcttcttggttccttcttttttctgagtcgtcctttgtggattcaaataataaataaagtcttgtatactgctgtttgttg

SEQ ID NO: 4319 - DNA, 2522 bp, Zea mays
  Clone ID: 700377845_FLI
ggaaaaaaaagagataacgcacggccgcccgcagtgcttgaaaccagcccgctcctccattccaacgtctccacccactgctcccaatggcgacgccgttcccgctggaggccgacgagggggaggcgcgggagctcctctacgaggcgtacaacgagctgcacgcgctggcgtccgagctgggcggcgcggcggcggcgccggcggtcgtggtcgtcggccaccagacggacggcaagagcgcgctggtcgaggcgctcatggggttccagttcaaccacgtcggcggtggcaccaagacgcggcgccccgtcgcgctccacctccgcttcaacccgcgctgcgacgagccccagtgccgcctcctctctgcaaccggcgatgccgaagagcatgacgaagccggggttgccgcccgccccatgccgctcgccgacatccaggcatatattgaagctgaaaacttgaggttggagaatgacccttgccaattttcagagaaggaaatcataattaaggtagaatacaagcattcccccaatctcaccattattgacactccaggcctcatccttccagctcctggccgtaaaaacagagttttgcagagccaggcttctgctgttgagagccttgttcgtgctaaaatccagcataaagagaccattatactgtgccttgaagattgtagtgattggagtaatgcaactacacggagagtagtgatgcaggtcgatcctgatcttgcaaggactgttctagtctccacaaaactggacacaaaaataccacaatttgcccgtccctctgatgttgaagtgtttcttcacccaccaaattgtgtgctagatgtttccttattgggagattctccctttttcacatcagtaccttctggtagagttggctcttgccatgaagctgtgttcaggtcaaatggagagtttaagaaggccatcttatcaagagagttggaagatattgcatctattgaagacaagttaggaaggtcacttacaaccatggagaaagatagaattggagtgggtaacttaagattatatttggaagagttgctgcagaagaggtacattaagagtgttccattaatcattccacttcttgagaagcaacatcgaaatacaacaagtaaattgcgtgaaatcagtcatgaactcagtgatctggatgaaaccaaactgaaggagaaagctcagctattccatgacacatttttgaccaagttatctttgctattgaaaggcatggtggtggcacctcctgataaatttggagaaactttagtcaacgagaggattaatggaggaacatttactggaagtgagaatttccagctcccgaacaagatgatgccaaatggtggcatgcgtctttatggtggtgcacaataccatcgggcaatggctgaatttcgtctggtagttggtagtaccaggtgccctccaataactagggatgaaattgtcaatgcttgtggtgttgaggatattcatgatggtacaaactactccaggactgcttgtgtaattgccgtggcaaaagcacgtgacacgtttgagccattccttgatcagttgggttttaggcttttgtacatactgaagaggctgatcccaatctctgtttatctgttggagaaagatggtgagcactttagtagccatgaagtgctcataaggcgtgtccaggaagcattcaagaggtttgttgaatccactgagcaatcatgtcgtcaaaggtgtatggaagatttggagagtaccactcgttatgtcacttggtcccttcacaacaagaaccgtgctggattgagacatttcctcgattcatttgttgcaccggagcaactatcagtaaatacattgaacgagcggttttctgggttgaatgataacaaacaggataaggcaaagggtgactcgaagtcaaaccattctccagacacaaattcgtccactgctatgccagagacaaggctggttgacctattggatagcacactctggaacagacgcctggttccctcatctgaaaggcttgtttatgcgctggttcaccagatttttcatggaatcaaagagcattttcttgtcaccactgaactgaagttcaattgctttctcctcatgccgattgttgacaaactaccagcacttctaagacaagaccttgagtcagctttcgaagaggaacttgatagcatctttgatgtcactcagctgcgccagtcacttgggcagaagaagcgcgagctggagatcgaactgaagcggatcaagcgcttaaaggaaaagtttggagagataaataagaagctcaattctcttcaggttaggcagtaggccaggctcaaaatttagcagtagcttggtagtctaggactccaggtagagtgtttcaatgctgtaataaaataattggtcatctagagtgacttcttgttgtatcctatcagttgtaaatatgaagtattcctatgtcttaacgtatgttgttgctac

SEQ ID NO: 4320 - DNA, 1812 bp, Zea mays
  Clone ID: 700377865_FLI
taggaggacgagggagggatccagcgagcggagcggagcggacgccaccctcgcgcgcacacctacgcgcaggcgcatacaccaacgacgccgaccccttccagggagggagggagggaaccacacaaccggacccgacccgacgccccgaggcgagggcgagggcgagggcgagcggtcagccggccggggcggggaccaggggggatcccctcggcggcgtcggcgtcggcggccatgggcgcggcctccccggcgatgtgggccgggctggtcctggtggtgttattggccgcatcgggccccgcgtcggcggggctgccaaggttcgccgaggcgcccgagtacaggaacggggacgggtgcccagccccggtgacgggcgcgggggtctgcgacccgggcctggtgcacatcgccatgacgctcgacgcgcactacctcaggggctccatggcggccatctactcgctgctcaagcacgcctcctgcccggagtccatcttcttccacttcctcgccgcggagggcggcggcgcgccggccgtggccgagctccgggccgccgtggccgcctccttcccgtccctgcgcttcgagatctacccgttccgcgccgacgcggtcgccgggctcatctccgcgtccgtgcgcgccgcgctcgaggcgccgctcaactacgcgcgcaaccacctcgccgacctgctcccgcgctgcgtgccgcgcgcgatatacctcgactccgacgtgctcgccgtcgacgacgtgcggcgcctctgggagacgcgcctgcccgccgccgcggtcgtcgccgcgcccgagtactgccacgccaacttctcccgctacttcaccgaggccttctgggacgaccccgtcctcggcgccagggtctttgccggccgccgccgcgcgccctgctacttcaacaccggcgtcatggtcatcgacctccggaggtggcgcgttggcaactaccgccagcgcatcgagcgctggatggagatgcagaaggagaaaagaatctacgagcttggctccttgccccccttcctgctcgtcttcgccggcgagatagaggccgtcgaccaccggtggaaccagcacggcctgggcggcgacaacgtcttcggcagctgccgccctctccataacgggcccgtcagcctgatgcactggtccgggaagggcaagccatgggaccgtctcgacgccggcaagccttgccccctcgaccacacctggaagtcgtacgacctctacattggcgagaatgattcttcaccagcatcagggccgtcccggtcagccttgtcatcgttggtggcatggtagaagttcatatacacaataattctttgatctcgggtgcccgtggttcttggccggtaatggaattgccttgcgatgcattcccactgccggctgccgccacagctgctgccgcaagccagctgccgccttcggctgtacaggacagtgaggggaggggcggtatacagattgcagcaggagcagcagcagcagcaagggggtgaagacagtgaatagcgggggggagcaaattcttgttcgttttgcactatgattgagattgattcattaggctctggtttggaggctgtgactatcatgggatggaaggaattacttgattggtggtgtacaattcttggataggacaaaggtttcggttttttggtgtattagttcagaattgtttcatttacatgtctattcagtacactcgtgtaatacggattaaattgatttgaaacaaattgagtgcatcctggtcgtgtacctgtgctg

SEQ ID NO: 4321 - DNA, 1181 bp, Zea mays
  Clone ID: 700379870_FLI
atttaccatccacaatcttgagtttggagcgcatcacattggcaaggcaatggcacattgtgacaaagctacaactgtatccgatacatactcgaaggaagtggccggacatggagctattgcacctcactactataaattccatggaattcgaaatggaattgatcctgatatttgggatccatatactgacaaatttattccggtccattatacatcagagaatgttgttgagggcaagagtgctgcaaaaaaggcattgcagcagatgcttggattacagcaaactgatacccctgttgttggaatcatcactcgtctaacagttcagaagggaatccaccttatcaaacatgcaatgcatcgagctcttgaacgcaatggacaggtggttttactgggttctgcaccagatcctcgcatacaaagtgactttacaaatttggccagtaagctgcatggtgaataccatggccgagtgaagctatgtctaacctatgacgagccactgtcacatttgatatatgctggcgcagacttcattctcgttccttccatcttcgaaccttgtggtctaacacagcttattgctatgcgctatggatccatcccagttgttcggaaaactggaggcctgtacgacaccgtttttgatgtcgacaatgataaggatcgggctcaagcacaaggtctcgagccaaatggattcagtttcgaaggagctgatagcagtggtgtggattatgctctcgacagagccataaccacattttatgatgcacgcgactggttcaattccctttgcaagagggtaatggagcaagattggtcatggaacagacctgccctagactacatggagttgtaccattctgctcgcaaaagctgatagcttttaccactagggaaatcaggctcgttttgcccaggttagaagcatctcagcctcaggccttgtgcaaattcatttgtgcactgggaagaaaagagtaccgactggccttgagcatgcccgccgtctaaggatgcaacacacaccgtgtatagttagagaatgctactcgtcgtacgtttcatgcatgtgttttgtgtatacacctcatgtagcttgcaaaacaacagtacgacgtatcccggccgtctaccatgcctgagggcgtatataggctataggcttatgc

SEQ ID NO: 4322 - DNA, 288 bp, Zea mays
  Clone ID: 700379903_FLI
gttattggtcgcaggggtagagaatctgacatggatatggaaattgtgattgaggaatgatgatgtttctgcaaaaatgacgcactaatatattgttgtgcttataatctgatacacctaagtaatgcattacattttgtaaacaggccaagcagtgcaagttccggactaaggatactccggagtttgcattaccttcctggtttgcttgtgatgaattggaattcgcctaaaactcttttagtcattagagttggaagtgaagaaactcccacccgtaacttgtgt

SEQ ID NO: 4323 - DNA, 688 bp, Zea mays
  Clone ID: 700379928_FLI
gattcttcctcttccccacacctaaaagatccgaatctagggacgaccgggttcctccaccccaggattctcgtggcgacctcgcaacaaccttgctcttcgcatcttttcagttgccgaatctctctcgccttctctgcttcaggctatagtcagtctgttcttggtgataggtttagtcacagtaactcttctactatcgtttgcttgctcctccgatttgcgccgagaagcaaccgctatagttttcagcggtttcttttgttccacttgatgttgctttcgcttaaagggcggttccttcctccatttgcctgccaatccacttttgacgagacagatatttattggatctagttccggaagaagataagattttcctcacagattatcctttttgctttgctctattctctttgattttgtcagctttgcgcccccaattttcaaccggagcaagacgacccgagcattctttgatttctttcccccacaacggccatgtcgctgagccgattctcgaagtggatatggccggggagcagagccagaaaccgtagaggccgcgaccgcgagccaccggcgtggagcagcacggccgtgacgaaaggcctcttcccggactccccgtccgggtttcgggagccagacgccggcgtcgggcgcacgggcacgatcagccggcgcg

SEQ ID NO: 4324 - DNA, 1640 bp, Zea mays
  Clone ID: 700380047_FLI
cgaataaagagcagcagcgcaagaggtcggtagagcgagaagaaggcaatggcggccgagagcttccttttcacctcggagtccgtgaacgaggggcaccccgacaagctgtgcgaccaggtgtcggacgccgtgcttgacgcatgcctcgcgcaggaccccgacagcaaggtggcctgcgagacctgcaccaagaccaacatggtgatggtgttcggcgagatcacgaccaaggcgaccgtggactacgagaagatcgtgcgcgacacctgccgcgagatcgggttcacctccgacgacgtgggcctcgacgccgaccgctgcaaggtgctggtgaacatcgagcagcagtcccccgacatcgcgcagggcgtgcacgggcacttcacgaagcggcccgaggagatcggcgcgggcgaccagggccacatgttcgggtacgccaccgacgagacccccgagctgatgccgctgagccacgtgctggccaccaagctgggcgcgcgcctcaccgaggtgcgcaagaacggcacctgcgcctggctgaggcccgacggcaagacccaggtgacggtggagtacgtgaacgagggcggcgccatggtgcccgtccgcgtgcacaccgtgctcatctccacccagcacgacgagaccgtcaccaacgacgagatcgccgccgacctcaaggagcacgtcatcaagcccgtgatccctgagaagtacctcgacgagaagaccatcttccacctcaacccgtccgggcgcttcgtcatcggcgggccccacggtgacgccggcctcaccggccgcaagatcatcatcgacacgtacggcggctggggagcccacggcggtggcgccttctccggcaaggaccccaccaaggtggaccgcagcggcgcctacgtggccaggcaggccgccaagagcatcgtggccagcggcctcgcccgccgctgcctcgtgcaggtgtcgtacgccatcggcgtgccggagcccctgtccgtgttcgtcaactcgtacggcaccggcacgatccccgacaaggagatcctcaagatcgtgaaggagaacttcgacttcaggcccgggatgatcagcatcaacctcgacctgaagaagggcggcaacaggttcatcaagaccgccgcctacggccacttcggccgtgacgacgccgacttcacctgggaggtggtgaagcccctcaagttcgacaaggcatcggcttaaggttgggagtgtcactgtggacatgaggactaccttcctctggctctgctgttacctgcaagcattgctgctgctggatgtgtgtgtttgatcagtgactggctgctgctccatagaagatgaacggagagaaggatgatgaagggctttggcaatcgccgctgcaactgcaacccatgccatgccggcttagtgattgggtataatttggcttggcagcagccagcattattatgtgctgatctgttatcttttactagtttggtcgtccgatatctttctttctttttccccccttttcgactctgtactgaaactgctgagagattcgcagtattgttgtatcgtattcatatgctactgttactctggtgcccctctctctctctctgctgagagttttctcc

SEQ ID NO: 4325 - DNA, 1095 bp, Zea mays
  Clone ID: 700381593_FLI
gctccaggggagacaatgttgaacttgggatcgaaaaccgacaagagactcactgccttccatcctgaaatcgaggagctcatctacagcgacgtcgagaactccgagcacaagttcgtgctgaaggacaagaagaagccgatcatcttctcgatggcgcgtctcgaccgcgtgaagaacatgacaggcctggtcgagatgtacggcaagaacgcgcgcctgagggagctggcgaacctcgtgatcgttgccggtgaccacggcaaggagtccaaggacagggaggagcaggcggagttcaagaagatgtacagcctcatcgacgagtacaagttgaagggccatatccggtggatctcggcgcagatgaaccgcgtccgcaacggggagctgtaccgctacatttgcgatacgaagggcgcattcgtgcagcctgcgttctacgaagcgttcggcctgactgtgatcgagtccatgacgtgcggtctgccaacgatcgcgacctgccatggtggccctgctgagatcatcgtggacggggtatctggcctgcacattgacccttaccacagcgacaaggccgcggatatcctggtcaacttctttgacaaatgcaaggcagatccgagctactgggacaagatctcacagggcggcctgcagagaatctatgagaagtacacctggaagctctactccgagaggctgatgaccctgaccggcgtgtacgggttctggaagtacgtgagcaacctggagaggcgcgagacccgccgctacatcgagatgttctacgccctgaagtaccgtagcctggcaagccaggttccgctgtccttcgattagtacggggaaagaagaagaagaagaagcccaggccggagaaccatcgcctgcatttcgatctgtttcaccgcaattcgcattgttagtcgtgtattggagttatgtgtacttggtttccaagaactttggttccttctcgttttttttccttgtttgagcgtttttgggcagcgctggcctggttcctagtatggtgggaattggctgcaccttttgcttcgaataaaaatgcctgctcgttcacctgtc

SEQ ID NO: 4326 - DNA, 1195 bp, Zea mays
  Clone ID: 700381594_FLI
cggcggcttaaaccctagttctcactcccatcgccgcttcagctccgccgcagcagatggagttctggggtctcgaggtcaagcctggttccactgttaagtgtgagcctggatatggctttgtgctgcacctttcccaggctgctcttggggaatcgaagaagagtgataatgccttgatgtatgtcaaaattgatgatcagaaacttgccattggaaccctctctgttgacaagaacccacacatacaatttgatctggttttcgataaagagtttgagctgtcgcacacatcaaaaactaccagcgtcttcttcactggctacaaggttgagcagccattcgaggaagatgaaatggatcttgattctgaagatgaagacgaggagcgggatgttccagtagtcaaggaaaatggcaaagctgatgggaagaaacagaaaagtcaagaaaaggcagttgctgcaccttcaaaatcaagtccggattccaagaagagcaaggatgacgatgattctgatgaggacgagactgatgattctgatgaggatgagacggacgattctgatgagggtttatcttctgaagaaggcgatgatgattcaagtgatgaagatgataccagtgacgatgaggaggaagacactccaactcctaagaagcctgaggtaggcaagaagagagctgctgaaagttccgtgctgaaaactcctctatctgataagaaagcaaaggttgccacaccgtcatctcagaagacaggtggcaagaagggcgccgccgtccatgtggcaactccacacccagcaaaaggcaagaccattgtaaacaatgacaaatcggtcaagtctccaaaatctgcgccaaaatctggtgtcccttgcaaatcgtgcagcaagtcattcatcagtgagacggcacttcaggctcactcgaaggcgaagcatgggggcaagtgagtcgcaggtccaatagagtcaacaacaaatgcgaaacatgggagaggagggtaagcgagagtctcgaaagagtgtcggtggaagtaggcctaaccttattttgtttagagacgggctatgcgttcgatgtagcaaaacaaggctgtggtttatggtcttcaatatttgggttgtgtatttcgatttttttctgaacgtgtctcggattgttgtgctgcgaattggttgtttctgtc

SEQ ID NO: 4327 - DNA, 593 bp, Zea mays
  Clone ID: 700381918_FLI
cccgtttctcccttctctgggctcggagaatcggagatggcgtccagcgcctctcggttcatcaagtgcgtcacggtcggcgacggtgccgtgggcaagacatgtatgctcatctgctacaccagcaacaagttccccactgattacatacccacggtgttcgacaatttcagtgcaaatgtcgttgtggatggcaccacggtgaatttgggcctgtgggataccgcagggcaggaagattacaaccgactgaggcctctaagctaccgtggtgcagatgttttcgtgcttgcattctcacttgtgagtcgagctagctatgagaatatcatgaagaagtggataccggagcttcagcattatgcacgtggggtgcctgttgtgttggtaggcacaaaatttgatcttcgtgaagacaagcactacttgatggaccatcctgggttggtgcctgttaccacagcacaaggggaggaacttcgtagacaaattggtgctatgtattacatcgaatgcagttcgaagacacagcagaatgtcaaagctgtgttcgatgctgccatcaaggttgtaatccagcctccaactaaact

SEQ ID NO: 4328 - DNA, 1729 bp, Zea mays
  Clone ID: 700383114_FLI
cgtcttcaaccagctcgaccatccgctccttttcacctggaacgggatgcagcacaggaagaactcgtggatggacgggatgccaggcacgcagtgccccatcgcgcccaacaccaacttcacgtacaagtggcagcccaaggaccagatcggcagcttcttctacttcccgtccatcggcatgcagcgggcggcgggcgggtacggcgccatcagcgtggtgagccgcctcctcatcccggtccccttcgaccagccgccgccggagagcgaccacgcggtgctcatcggcgactggtacaccaaggaccacgaggtgctggcgcgccagctcgacgccggcaagagcgtgggccgccccgcgggcgtgctcatcaacggcaagggaggcaaggacctggaggccgccgcgcccatgctcaccttcgaggcgggcaagacgtaccgcctccgcgtgtgcaacaccgggatcaaggcgtcgctcaacttccgcatccagggccacgacatgaagctcgtggagctggagggctcacataccctgcaggacgtgtacgactcgctggacgtgcacgtcggccactgcctctccgtgctggtcgacgccgaccaggcgcccggcgactactacatggtggcctccacgcggttcatccacgacgccaagtccgcctccgccgtcatccgctacgccggctccagcggcgccccgccggcgcccaacatgaccgagccaccggccggctgggcctggtccatcaaccaggccaggtcgttccgctggaacctgacggccagcgccgcgcgccccaacccgcagggctcctaccactacggccagatcaacatcacccgcaccatcaaggtcatggtctcccgcggccacatcgacggcaagctccgctacggcttcaacggcatctcccacagggacaccgagacccccctcaagctcgccgagtacttcaacgtcaccgacggggtgttcagctacaaccagatgggcgacgtgccccccgccgttaacgggccactccatgtcatccccaacgtcatcaccgccgagttccggaccttcatcgagatcgtcttcgagaaccccgagaagagcatagactccctccacctcgacggctacgccttcttcggcgtcgggatggggcctgggacgtggtcgccggagatgaggaagacgtacaacctactggacacggtgagccggcacacgatccaggtgtacccgcggtcatggacggcgatcatgctgacattcgacaacgcgggcatgtggagcgtccggtccaacgtctgggagcggtactacctcggggagcagttctacatcagcgtcatctcgccggcgcggtcgctgcgcgacgagtacaacatgcccgacaacgccctccgctgcggcaaggtcgtggggctgccgctgccgccatcctacgcccccgcgcgctaaagacgacgaaggcgccgttttcacctcgtgttctgaccatccagtctaactaatccattcctgtgctgctcggcgaaataaaatcatcaaaaagaacaaagacgaaggaagcctagggaagggagaagggacgttgggtgggggtgagccaaatgagaacgcacggatatatctattgatgtaatcttgagatgccctctcaaatcactgtaatggggtttaaaaaacaatcattgtaatgggagttatatatacttttatcttaac

SEQ ID NO: 4329 - DNA, 927 bp, Zea mays
  Clone ID: 700353723_FLI
cgcccaccagggccgaggtcgcggacgtctccgaagccgtccgccagcgcgccgacgccctgatgctttccggcgagtcggcaatggggaggtacccggacaaggctctcagcgttctgaggagcgtcagcctgaggatcgagaagtggtggagggaggagaagcggcacgaggcgctggagctccggagcgtctcgtcctccttctccgacaagatatcggaggagatctgcaactcagcagctaaaatggctaatggcctgggagtggacgccgtctttgtgttcaccaagaccgggcacatggcctccctgctctcgcggtgccgccccgactgcccggtcttcgccttcacgacgtcgacgtccgtcaggaggcggctgaacctgcagtggggcctgatccccttccgcctcgccttctcggacgacatggagagcaacctgaaccgcaccttctccctgctcaaggccaggggcatgatccagtctggggacctcgtgatcgccctctcggacatgctgcagtccatccaggtgatgaacgtaccctgaggtagaagagccttacctttacctccatgccgcacggtcccgtatcggaaggaacacgcgtgttatcggcaccttggaaggacggtttcttccttccctgcgcctaaatcgctgccctttgttttcgctgtatcagatgctgctatgctatgctaggctctagtctggcccagggaactgtggcaataatctgtggctttcaggctggtgttagaactcttgtactacttgtaggcttaggtgatttttatcgtgcaagtagttggtttgatgtttttgtgtggtataaaagcgactcaagctatgggcctaggcctctttggtataccttttttttctgaagagtttttttagagaatctggattcgttgat

SEQ ID NO: 4330 - DNA, 1119 bp, Zea mays
  Clone ID: 700353759_FLI
ccagcaggcttaacggacggacggacgtcatgggaaactcctcatctcgcggccgatcagagccgaggcagggcgagcagaggaccatgaagtggagcgtcgatgggttcgcctcactcctggacaagggcgacggatggacctactccagagtgttcgagctcatgggctacaactggtacctgaagctgaacccgagggacaagaagagcggtgacgacggcacggagtacgtctccctcgtgcttcagctggatgacctctcggtgaagccggatactgtcgtgaaggcctccttcaagctgctgatctacgaccaggcgtatggaaagcacagcgagcatcaagttcggcacagtttccagaccgcaagcacgagctcgggagcctcgtgcatggtttccctcgaaaagctgaaggaacggccgtctaagttcatcgtcaacaacagctgcaccttcggtgtcgagttcatcaaagtcaaggcttccaaagtgagcacgacgtctgaaacgctgtttgtgcggaagccgagcgtcttcgacgaggccaggacctacacctgggacatcgaggacttcttcgcgctcaagaactccggccactcgccggagttcgaagtcggaggacacaaatggagtatcggtgtctatacgtccagcgatgggaaccacctcaccttggacctgtgcatgaagaacacagatggtgtccagcatgacggctctgcaaacctggtagaattcagcttggccatcaaacaccaggagggcggcaatcactggaaagcaacaggccggagccagtttacaagcaacgctcgttgctggggatggacgaagttcatctcgctggaggatttcaaggactcctcgaatggctatctcgtcaaaaacaagtgctgcattgaagctgaggttgcactcgttggttcctcaaagatgaagtagtgtgtcctctgtccttgtctatatatgtgtgtgtgggctgaatgactgaatcacacgatagatgtgcagaggtttggacgtgcgtgtgacgtgtcttgtgttgtgtgttcgttttgttcgtgctgaagacactaaaagtgtgcatgccaaataaggttcgatcggcgcc

SEQ ID NO: 4331 - DNA, 1266 bp, Zea mays
  Clone ID: 700353802_FLI
accgagccgcttcttgtggaagttgaccaaatctatcaccttgcttgccctgcttcaccaatcttctacaagcacaaccctgttaagaccatcaagacaaatgttattggtaccctgaacatgctaggacttgcaaagagagttggagctaggtcagtgttcatcatgccattgattcttccagcgcctcatgtgaaaaactcaattacagaatttatttttgaattgcaggattttgttgacatcaacctctgaagtttatggtgatccacttgagcatcctcaaactgaggcctactggggcaatgttaacccgattggtgttaggagttgttatgatgagggtaagcgtgtagcagagacgctgatgttcgactatcacaggcagcatggcattgaaatccggattgccaggattttcaacacctatgggcctaggatgaacattgatgatggccgtgttgttagcaacttcattgctcaggctgtgcggtaatgctttgttgaatgtctttattttctcctcagctactgcagatagattggcggctaatcttttcacaatctttagcggtgagcccctgactgtccagaggccaggaacacagactaggagtttctgctatgttgccgatatggtttgtcttccactgcattctcaattggtttgttgttggtcagaagactgtcagtgcactatatcaactatgccattcattgcaggttgatggtcttattaagctgatgaatggaaacaagactggaccgattaacttggggaacccaggtgaattcaccatgctggaacttgctgagaatgtgaaggagttgatcaacccagatgtgacagtgacgatgaccgagaacactcctgatgatccccgccagaggaagccggacatcacaaaggcgaaggaagttctgggatgggagcccaagatcgtcctgcgggacggcttggtgctcatggaggatgatttccgggagcgcctgaccgtgcccaagaaaaccaaggcctgaattgccctgaagttggggaagaatatccacacgggggagcatactcatagtcgggctcgtcattatttgtggccacatttcattacggaatttgagttccaataaacttaatattcctttgtcgttcaccttgaaggattgtattgttagaattttcatacagggctggccgttcgagtctctgcctacgcagatcttgtggtacttgtgtttgtagccaatgtgtgagtaaaagtcgattatagc

SEQ ID NO: 4332 - DNA, 521 bp, Zea mays
  Clone ID: 700353843_FLI
acgtcgatgagcggtgggtgagcagacagaggaaaggccgcacatctgacgccgtgcttagctgccccgcctgtttcactaccctgtgcttggattgccagaggcatgagaagtacgtaaaccagtaccgtgcgatgttcgttcgcaactgcaagatcaagactgaccaggtcctgcgagagggcaagagcaagaggaagaaacgcagaggaggaagtgctggtgatccagctgctgcatctgaaggcgaaagcaaggggcagtcctaccaccccgtctgctgcgaggtctgctcaaccgaggttggagtgttggacgaggacgaggtgtaccacttctttaacgtgatccctagcaactcctgaatgccgtctgtaggagtagtacgttcgtagtcgtagaccccaccaccgtatacgcaagcttctgcgctacgccgtccgtctcttatcgctgatcagcctgtacatcgggtatgtatctttacggatgttttgtttctgcagcatgatgcggtttcg

SEQ ID NO: 4333 - DNA, 552 bp, Zea mays
  Clone ID: 700353926_FLI
tggattgttgttccagctacctttatcagtgctgcatcgctattctgcatcgaggaagtgggtgttctaatcgaagagccgttccccatgctagctcttgatgccctgtgcaagcagctccacgacggtattaaggatgtgatggagatgcagaactcggttcactcgcgactagttgccaagactgctacggaccacaggggcagtaggcgcgagaacaatggttggcctagctccaaaagagaaggagccaagattgattgagcacgcaaggtcggtcgggtcgttgtgaatttatttgaagatagcattgcaagcaatctgtggcaaccagatatccatgaacgaactggagaacttgtggaccccatttcctcctgcaatggtatgtacctgtcctatgtaaaatgcactcgctactgcttggatagctactaaagccgggagcgagcctgggattgggattgggattggtgtagggaggagttgcatcagcacgttggtgtacatgtggcgatgagtagagcagatttattatgtgttgtaaataat

SEQ ID NO: 4334 - DNA, 2311 bp, Zea mays
  Clone ID: 700353950_FLI
catggacgcatcggcggaggtggaccacctcgccgccgagaggtcggccgcgcgcttcgacgtcgaggcgatgaaggttgcatgggctggctcgcgacacgccgtcgaagtcggcgaccgcatggcccgactcgtcgcgtccgaccctgtcttccgcaaggataacaggaccatgctctccaggaaggacttgtttaaggacactctaagaaaggcagcccatgcatggaagcgtattgtcgaactacgtctcacagaggaggaagcaggtatgctgaggctatatgtcgatcagcctggttatgttgatctgcattggggcatgtttgttcctgctataaaaggtcaaggtactgaggagcagcagaaaaagtggttaccaatggcttacaagttccaaataattgggtgctatgctcagactgaactcggtcatggctcaaacgttcagggccttgaaacaactgccacatttgatccaaagactgatgagtttgtcatccacagtccaactctgacctccagcaaatggtggcctggtggcttggggaaagcttccactcatgcagtggtgtatgctcggctgataactgaaggaaaggactatggtatacatggtttcattgtgcaactgcgaagcttagaggatcactcccctcttcctggtgttactctgggtgatattggtggaaaatttggcagtggtgcatataacagtatggacaatggtgttctgcgatttgaccatgtgcgcataccaagggatcaaatgttgatgaggctttcacaagttacaagggaggggaaatatgttcattcagatgtcccaaagcagctgctttatgggacaatggtttttgttcgccagacaatagtcgcagatgcttctaaggctttgtcccgtgctgtttgcattgctgtacgatacagcgccatccgaaagcagtttggctctcaagatggtggacctgagactaaggtccttgattacaagactcaacaaagcagactctttccgttgctggcttcagcatatgcatttagatttgtgggtgactggctgaagtggctatacatggatgtcactcagaaactggaagctaaagactactcaacactgcaagaagcccatgcctgtactgctggtttgaaggctgtgacaacatctgcaacagctgatgccattgaagaatgtagaaagctctgtggcggacatggttacctgaacagcagtgggcttcctgaattgtttgctgtctatgttcctgcttgcacttatgaaggagacaatattgttctgcttttgcaggttgcaaggattctaatgaagaccgtatctcaattgacatctggaaagcaacctgttggtacaatggcttacatgggcaatgtacaatatctgatgcaatgcaaatgtgctgttaacacagccgaagattggcttaaccctgttgccatacaagaggcgtttgaagcccgggctctcaggatggcagtaaactgtgcccagaacataggccaagcagcaaaccaagaagaaggtttctatgagcggtcccctgatttgctagaggctgcagtagctcacatccagttggtcattgtaaccaagttcattgcgaaggtacagcaggacattcctggacctggagtgaaggaacagctccagaacctttgcaatgtctatgccctctacattctccacaagcacctgggcgacttcctggcaaccgggtgcatcacacccaagcagggagcgctggcaaacgagcagctgggcaagctttacgcacaggtgcgtccaaatgctgttgcgctggtggatgccttcaactacacagaccactacctggggtctgtgctggggcggtacgatgggaatgtgtacccagcgctgtacgaggaggcgtggaaggaccctctgaacgagacggtggtgcccgaggggtaccacgagtacctccgccccttgctcaagcagcagctcaagctctccaggctctagtctgatcggctaccccccctggaattctccatggcggctgccttctcagagaatctcacgcgacctccgaatgaaagtgatgtaagctactaacgattcttgttagagccaggaaagaggctctccagccaattataaatttattcctcaagctctgaggatcaagttcaagctgtggattatataggaagcacgtttaataattaataaagagggagaggatgagcatctctctgttgctgctcaagtgttgtgcgcagtgcgagtagtagaatgaatatatacgagtgcgtgtattgtatggtg

SEQ ID NO: 4335 - DNA, 539 bp, Zea mays
  Clone ID: 700353959_FLI
aagggcaccgtggtggtgacggccaccaacgaggccccgccgccggtgagcgggcagaagggcgagcactttgacctcaccataccggcgttcctcaagatcgccgaggagaaggccggcatcgtgcccatcacctaccgcaaggtggcgtgcgagaggaaaggcggcatccggtacacgatcacagggaaccagcactacagcgaggtgaaggtgaccaacgtgggcggcgccggggacgtggtggcgctgtgggtgaagggcaacaagcgcgtcaagtggacgccgatgaagcgcagctggggccagctctggaccacggaggtcgacctcaccggcgagtcgctgacgttccgcgtcatgaccgccgaccaccgcaaggctacctcctggcacgtcacgccccgcgactggcagttcggcaaaacgtaccaggccaccaagaacttctagggtcggatcggggagctgagccgcgcccttctttattcgtgtgattaacatattgtttattccatgattaacatattgttatattg

SEQ ID NO: 4336 - DNA, 508 bp, Zea mays
  Clone ID: 700354259_FLI
cgacgagaagctactgtccgtgttccgcgagggtgtgaagtacggagctggaatcggtccaggtgtctacgacatccactcgcccaggatcccctccaccgaggagatcgcggaccgcgtcaacaagatgctcgccgtgctcgacaccaacatcctctgggtgaaccctgactgcggtctcaagacacgcaagtacacggaggtgaagcctgccctgaccaacatggtctccgccaccaagctcatccgcacccagctcggcagcgcgaaatgagtcagatttggtagatccatggtttgttgaacacaaaagccagcagggtcatttgtttcgaataatttgggtccttactcctgttccatggcgttaggttagcctcattggtgttggtggggtacggcgttacgtgtccgtgttctaagtttggagtgtgtgtttctcttttttgttggggtttgtgtgctttggttatataaacagaaatggagtacgcagtcttcgaatcgc

SEQ ID NO: 4337 - DNA, 1476 bp, Zea mays
  Clone ID: 700354261_FLI
gaaaagctctgacgtgaacatcactaggcatgcctgtctctatgagaccgcccctgcttatttgactgatcagccgcggtttcttaactctgccattcggggcacaactaggctcaggccacatgagcttcttaaactgctaaaggaaattgagaaggatattggccgcactggcggaataaggtacggcccaagacctatcgatctagacatacttctttatggtaactcccagatccatagtgagactctaattgtgccacatgagcgcatccatgagaggtcatttgttttagcacctcttgttgaccttctaggtgcatctagtgacaacggtatcgaaacaagttggcactctctctcaaagtgtagtggaggtttctttgagttatggaataaccttgggggtgaatctataattggaacagaaagcattaaaagggtattacctgttggggatcgtttgttggattggtgtgagaggactcttgtcatgggggtccttaatttgacaccagacagctttagtgatggaggtaagtttctagaagtgggagctgccatttctcaggctaagtcattaatctcagaaggtgcagatatcattgatattggtgctcaatctaccaggccctttgcaaaaagattatctccaaatgaggagcttgagaggttggttcctgttctggatgagattacaaaaatccctgagatggagggcaagttactctcagtggatacattctatgcagaagttgccagtgaagctgtgaaaagaggagctcacatgatcaacgatgtatccagtggacagcttgatccaataattcttaaagtggcagctgaacttggagttccatatgttgcaatgcacatgaggggagatccgtcaactatgcaaagcgaacaaaatgttcactatgataatgtctgcaaggaagttgctttggagctatacacacaggtgagagaagcagagttatctgggattccattgtggaggctggttcttgatcctggcattggcttctccaagaaatctgaacataaccttgaagtaattatgggattggaatccattaggagggagatgggtaaaatgagtataggtgcttcacatgtgccaatattactgggaccttcaaggaaaagctttttgggtgaaatatgcaatcgtgccaatccagttgagagagatgttgctactgttgcagccgtgacagctgggattttgaatggtgctaacattgtaagagtccataatgctggatatggtgtagacgccgcaaaggtttgtgatgcattgcgtaagcgtaagggaagttgcagaaactgaactatcgctccagttttatacaagaaaaaagtgatgtcgaaaaatgtgatttgtgaagtatcgttgttgtaatgaaccagagataatgctttttcttgtgtcaccaaggaataaagtcaagaagctgctactcaagttgc

SEQ ID NO: 4338 - DNA, 848 bp, Zea mays
  Clone ID: 700354277_FLI
gcggcaggagctctgggcagcgtgcgcacgtggggtacctagctcgctctgctagcctaccatggctgatcaccaccggggtgcgacgggaggtggcgggggctacggcgacctccagcgcgggggcggcatgcacggcgaggcgcagcagcagcagaagcagggcgccatgatgacggcgctcaaggccgcgacggccgcgaccttcggcgggtcgatgctggtgctgtccgggctgatcctggccggcaccgtgatcgcgctcacggtggccacccccgtgctggtgatcttcagcccggtgctggtgccggccgccatcgcgctggcgctcatggcggccgggttcgtcacctccggcggcctcggcgtcgctgcgctgtccgtgttctcctggatgtacaagtacctgacgggcaagcacccgccgggcgccgaccagctggaccacgccaaggcgaggctggcgtccaaggcccgcgacatcaaggatgcagcacagcaccgcatcgaccaggcgcaggggtcttgagagaagaaccacactcgagcggaccgcgcgcgcgacctccttgaaccactgccggcgcggcggcatatggcccttaaaggcggtggctgctgctacgtacgctgccgtagagtctcggtcgccgcgatagctctagctagtcgtttatgtgttgtgctttgtgtgtgcatgcttgtgtctgggggcatgcagtgcagtgcagtactatatgctgtatgcgtctctctttgatcggagaggcggatgtacagcatgctcgatatgtctagtttggatgtcatgtttatgatgaggaataaaatgcagtgttcaggtg

SEQ ID NO: 4339 - DNA, 3187 bp, Zea mays
  Clone ID: 700354316_FLI
cgaagttccatcgccctacctcacgatcccgcctggcctgagcccagcaacgctgctggagtcaccagtcttcgtttctaattccatggtatgtgctcttctctaggttatgatagggtgtggacgcgttaccagaatcagtattgctttcgtctatggatgctaaactggcagttcaagaatgcttgctttaataagcttttgacctctccagggagttcgtgaaagctctacttcagttccatgatgatcagttctgccttgttttgtagcatccagtctcttctttccaaacaggcttctgtttgttttctcaaaagcagaaaaatagtatcgtaccattcaaatatttcaaagttttcttgaaagcaggaatatgatgatcaatctctgttctttccatagttatgtggcaatgtatgcccccacacttcaggtccaaacttcccccttatgtactacttggaactccaatataatagctgttaatgttgtcaaagctgcataggaatttcatgtgtttgctctcttcatattcatatctgtattttgaatcatcatgttatttcatatgtaaattaactaaggaggtatcaactaggacaattattttaataaactccgatactgaagctatttcgtacctgacagcaatgttttttgtttccttgcaattcttcagggccaggcctcgccaaccacggggacgctattcatgtttggtagcacaaatgacaatgatcctattagatttggaggtggtcctccttcagttggagatggccctaatgcttttcctttcaagcccttagatctgaaatcctcacactacactgctgaagcaatgaaggttagcaacatttgaatagttcataggttattcctgcgacgcttgcgtggtaatgattgaaggtaacatttgaatacttcataggttattcatgataacatttgcttgtgcgctaatggtaaaaggatctcttaacttagaaagtattcgtataaacgtgcagtttgcagtgatgtttgtttctgaaattttgccccgagtctagatgagaaatcggttaaatccaaatggttttgctctgtaagtcttttatctgttgcactacctgtaacagactagtttgtctttttggaatggttgaggcttgaagcacatttgtctattctctgagtgttagtgacacaaagtggctgttttgctgcatattgttcatactaattggagaaagaccagagaccagctagtgttagatagtttagaagttcaataaaaataattctcactggcaactaaacaacaggttagtcttccttgagttccaactaaacatataagaacatcgttctaattgtacatttcaaaatgtcaatgaacatttttttttctattcatgatccaataccttttgataccatttccttacgagttagttcataattgctccgtcaggaacaaaatacgaagtcttctgtcaagactgaaaccaagattctgacagtacaagaggctagtttgctgagccaactgaaccagctgaatcacaattcgcagatcattattgatagtggcggtcctcatgaccccaagctcagccgtcctgcatctggcgccggtgcaggcaatgaacacatatcacccccggatcacggacagacagctgaggaaagtgatgcgagggaagactacccggcaatggctactaccacgccagcagaggacgggtacagctggaggaagtacggacagaagcaggtgaagcacagcgagtacccgcgtagctacttcaagtgcacgcatcccaactgcctggtgaagaagaaggtcgagcgctcgcacgaggggcacatcacggagatcatctacaagggcgcgcacaaccacccgaagcccacgcagagccgccgtccaggcgtccagcccgtgcacccgtttggcgacagtgcgcaggcggacgcagccgacaacctggggtcacaggcaaacgcagtggacgccaaccagccgaggcgtgcgggtgttcaggatggcatggacgcgacgtcgtcgccctcagttcccattgagcgctgtgactcgccggcctcgatgcaggtcgactcggcagcccggtttggatcccccgagggcgcggatgtgacgtctgtgtccgacgaggtgggcggggacgacagggtgactcgtggcagtatgtctcagggcggtgccgacgcggagggtgacgagctggaatgtaaacgaaggaagctggagtcgtacgccatcgatatgagcaccgcgtcgagagctgttcgcgagcctcgcgtggtgatccagacgacgagcgaggtggacatcctagatgacggctaccgctggcgcaagtacggccagaaggtcgtcaagggcaacccgaatccaaggagctactacaagtgcacgtacccgggctgcgtggtgcggaagcacgtggagcgcgcgtcgcacgacctcaagtccgtgatcaccacgtacgagggcaggcacaaccacgaggtccccgccgccaggaacagcggccacccgggcaccgcggcggcgacaggcgcgggtggcccgcgcaggctggagcacccgtcgctgcgcgacggcctgatggggcacttgggcggctgcggcgtgccgttcggcctgccgccgcctagggatccgctggcgccgatgggcaattacccgacgtatgcctcctccattccccttggcggcgccggccccacgtcactgccgagcctgccggtgccggcggggaccctcagcgccgtcgatgggctgaagctcccgatgctggcgccgtcgtccctgcagcagcacccgctgctgaggcaccggcaggcgatgcaggccgctggcctcgtggcgcccaaggacgacgtgaaggtcgagggcaacgttgccggcggcgctgccccgtcggtgtaccagcagatgatgtgcagcgggctgcggttgcgccagcagatgtagatacataaataaatgtggagaggattagtgattctcaagttattagtttcttaccagtcgtattaggatgagttcgtgataattgttataacgtgggaacaaacacccgttgctttctgtttttttttcacccttccacttcatttttagctcagcaactatttatttatttactgcccctcttcattgaggtttggt

SEQ ID NO: 4340 - DNA, 1399 bp, Zea mays
  Clone ID: 700354473_FLI
gccgcggctgctcttagtcgtcgtcgcgatcttcgtgtcgatatctgccgtcgcggcagccgtcataaacgtcaagaactacggggcccatggcaatggtgtcaatgacgacaccaagccactgatggcggcgtggaaggcagcgtgcggatcagccggcgcggcgacgatggtggtgccgccggggacgtactacatcggcccagtgcagttccacggcccctgcaaggcctccaccttgaccttccagctgcaggggacgctcaaggccgccacggacctgaaacggttcggcaacgactggattgagttcgggtgggtgaacgggctcaccgtcgccggtggcgtcattgacggccagggcgccgcctcgtggcctttcaacaagtgtcccattcgcaaggactgcaaagtgctgccaacaagcgtgttgttcgtgaacaaccagaacacggtggtgcgcgacgtcacgtccgtgaaccccaagttcttccacatggcgctgctgtcggtgaagaacatccggatgagcgggctcaagatcagcgcgccctccaacagccccaacacggatggcatccacatcgagcgcagcagcgggatatccatcatggacacgcacatcagcacgggcgacgactgcatctccatcggccagggcaacgacaacgtggacgtggcccgcgtgcagtgcggcccaggccacggcatgagcgtcggcagcttgggtcgctactccggcgagggagacgtcacacgggtgcacgtccgcgacatgaccttcacgggcaccatgaacggcgttcgcatcaagacatgggagaactccccttccaagagcaacgccgcgcacatggtcttcgagaacatggtcatgagggacgtgcagaaccccattatcatcgatcagaagtactgcccctactacaactgcgagcacaagtacgtgtccggggtgactctcaatgacattcacttcaagaacatcaagggcacggcgacgacgccggtggcggtgttgctccggtgcggtgtgccgtgcaggggtctggtgctgcaggacgtggaccttaggtacaaggggcagggtggtacatcggccaagtgcgagaacgccaaggccaagtaccttggctaccagtttcccaaaccctgcccctaggtgccggtgcttgtccggccgtattttagctcatctctgtccactctctggtgtccggtgaagtgggctttgattcttcggtcgtgttctctagacgttttttcttcttctcttctgggttttcctgtttgctttcttgattagctgaatttcgcggtataatgtcagttgcttgtatcagtgaatttgtgaataccagtcattgttgaatatatatatggggaataatgccttgat

SEQ ID NO: 4341 - DNA, 1295 bp, Zea mays
  Clone ID: 700354479_FLI
atcgacttcggcctctccgtgttcttcaagcctggagatcggttcaccgaagtggttggcagcgggtgttacatggctccagaggttctcaagagaagctatgggccagagatagacgtgtggagcgctggtgtcatcctgcacatccttctctgcgggttccctccgttttggggaggctccgatgagaaaattgcacagtcgatactccgtggggtaattaacttacagaaggatccatggcccaaggtctcccagagcgcaaaggatcttgtcacgaggatgcttgacccagatccttgtacacggttgacggcaaagcaagtccttgagcacccttggctcaagaatgctgataaggcttcaaatgtgtcactcggagaggttgttcggtcgaggctgaagcagttgtcgtctatgaacaagcttaagaagaaggcacttggagtcgtcgccatgaatttaccgatggaagagattggcaaattcaaagagatgttccatacaatggacaaaaacaaggacggtagtttgtcacttgaagagctgaaggagggtttccggataaacgatcatcctgttccagaggaagagataaagatgttgttacaagcgggcgatatacatggaactgacacattagattgtgaggaatttgtgacagtcttgcttcacattaaaaagatgagtaatgacgagtatctacctaaagctttcgagttcttcgacaaagacgggaatggttttattgaaatgtccgagttaatggagactctaagtgatggtgaactaaagcctgatgagcaattggttaacgacattattcaagaggttgacaaggataaggatggtcgcatcagttacccagagtttgaattgatgatgaaaagtggatcggactggaggaacgcctctagacgttactcaacagagaatttcagcagcctcagtcaaaaactgtgcaaagatactttatgaaacaagaaagtagtttccaagcagcaattactgactgaagtaccacaccctcaacctcaactaaacagcatcaaagacaacgcaaaagcaggattactggatctggtggaaataagggttgaaggagatcacatataccagttgcatgcttgacaaacttcgtcaactagcaagccctctggcattgtcctttgctctggaagtaaaatttactattccaatagaatacatgacttagacatagacagatgtaaaggatgccccagcatccatgcaatccactaaccaaaatttggcattttactactgtcaaatat

SEQ ID NO: 4342 - DNA, 855 bp, Zea mays
  Clone ID: 700354483_FLI
gatcgggattgtgggcgagtgcgtgcgttcgtgcagccacagacaggcgtccgggcaccatgtctttcaccggcacgcaggacaagtgcacggcgtgcgacaagaccgtccacttcatcgacctcctcacggccgacggcgccatctaccataagacatgcttcaagtgcagccactgcaaaggggtcctctcgatgtgcagctactcctccatggacggtgtgctgtactgcaagacccacttcgagcagctcttcaaggagaccgggagcttctccaagaacttcacgccaggtggcaagtcatcagacaagggtgaactgacaagggccccaagcaagctgtcgtctgcattttctggtacccaggataagtgcgcagcatgccagaaaacagtgtacccgctggagaagttaactctggaaggcgagtcctaccacaagagctgcttcaagtgctcgcacggcggctgcatcctgaccacctcctcttatgccgcgctcaacggcgtcttgtactgcaagatccacttcgcgcagctgttcatggagaaggggagctacaaccacatgaacaagaagagcccgtcccaggaggttctgccggacgtggctgacgaggagcaaccgccggaaccagcgccaccgcaagatgagaaagaagaggacaactaggatcggagcgaccaacaaccacccatgcatatatatcacgcagactgaagtctacacgtttgccatatttctttacgacgacgacgcttctttattccctcctcccttttttttcctcttaatctctctgtgaacccggtttatcatcacgctgcaatcaagtgtgccagatgccttcgtt

SEQ ID NO: 4343 - DNA, 1053 bp, Zea mays
  Clone ID: 700354490_FLI
actaaagaaaatggcccttagggttattgctgagagtttatctgaggaagaaatcgcggggttaaaagaaatgttcaaaatgattgacagtgacaacagtggtcatatcacattggaggaactaaaaactggcttgcagagagttggtgctaatttgatggattcggaaatcaatgctctaatggaagctgcagatatcgacaacagtggcacaattgattacggggagttcattgctgcaactttgcatataaacaaagttgaaaaggaggataagctctttgctgctttctcatactttgacaaagacggcagtggttacataactcaagatgagctccaaaaggcatgtgaggagtttggtttaggggatacccgacttgaggacattattggggacatcgatcaggacaatgatggacgaatcgactacaacgagttcgttgcaatgatgcagaagggagataatcctctggggagaaaggggcatcaaagtaatgctagttttggtcttggagatgcacttaagcttcggtaaaataggagcagatgtttaccttcataacgaagttagcattcagagactaagaaaaattgaccaagcaacaactccaaaaccgtgtcccatgcctgtactctggtctccaagcttcaatggtgccctatcaaaattcggggggtcgctgaagcaacctaggagcgtgaacttttgccggaaagcatcgacctcataaaattaacagtagggtcctcatgctcaacatggcatcttttgatttccctcctttctagttcatacgtagtggcaatgaaaccttgaggccaccgtgtaatttaagtaagcatgagaataggtgagattgcttttttctgccccctttattcttccattgtgaatcgacgacaggaagagagtgaaccatcctacgtctgcattccaagactcatgtttcagttatgttcatccgtgttggataggtgtagttcttagtgcctgtaagaatataatattgtattttaggagtctgactagtgaaacaattcttttgtgtt

SEQ ID NO: 4344 - DNA, 903 bp, Zea mays
  Clone ID: 700354555_FLI
ctcctcgccccagcgacgcggcctcccgtagaccgagcaaggcaacccaccactgagaggcacgcagaggagcaggaagccggagaccaagatgtcgtcggtgttcagcggcgatgagacggcccccttcttcggtttcctcggcgccgccgccgccctcgtcttctcatgcatgggcgcagcgtacgggaccgcgaagagcggcgtcggcgtggcgtcgatgggtgtgatgcggccggagctcgtcatgaagtccatcgtgcccgtggtcatggctggtgtgctcggtatctacgggctcatcatcgccgtcatcatcagcactgggatcaaccccaaggccaagccctactacctttttgatggctacgctcacctttcgtccgggcttgcctgtggccttgctgggcttgcagctggcatggccatcggcattgttggtgatgctggagtcagggcgaatgcacaacagccgaagctttttgtgggcatgatcctcatcctcattttcgcagaagcgcttgctctgtacggtctcattgttggaattatcctttcatcccgtgctggtcaatcccgagcagattaagtgcactaccattctgcgattaccgtactgtttattatgctattctaagagaattgaaactctatgcccttgtctagtttattcttgttaccatgtattaatgaaacaatttgtagctgaaggaaggtgacacttccagccatgttggttttggcggtgttaagcagaggttatttattgggttaaggttggagggatgtgggttaagattggatggatgctcctgggctaagtggatttaatttttatccttggtgaataatgaacacggaggtgtagccaaataataacgtgatatatatatttctttgccc

SEQ ID NO: 4345 - DNA, 1958 bp, Zea mays
  Clone ID: 700354580_FLI
cgcctcggccgcctcggatccggaccgagcgccggccatggcgctcgccttcgacgagttcgggcgccccttcatcatcctgcgggagcaggagaagaagacgcgcctgcgggggctcgacgcgcagaaggccaacatcggcgcgggcaaggccgtcgcgcggatcctccgcacctcgctcggccccaagggcgcggacaagatgctccagtcccccgacggcgacgtcatcatcacaaatgatggggcgaccatcctggagcagatggatgttgacaaccagatcgcaaagctgatggtggagctgtcccgtagtcaagactacgaaatcggggatggtaccaccggtgtggtagtcatggcaggggcgctccttgagcaggccgagaagcttttagaacgtggtattcaccccattagggttgctgaaggctatgagatggcatcaaaggtagcttttgatcacctagaacgaatctccgaaaagtttgagttcagtgcagacaacattgagcccctggttcagacatgcatgacaactctatcctcaaagattgttaaccgttgcaagcgggcattggcagagattgctgtcaaagcagtacttgcggttgcagatttggagaggaaggatgttaacttggatttaattaaagtagaaggcaaggttggtgggaagctggaggacaccgagcttgtatatggaattattgttgacaaagatatgagccatccacaaatgccaaagagaattgaggatgctaagattgccatcctgacatgcccatttgagccaccgaagcctaagaccaagcataaggttgacattgatactgtcgagaaattccagacactgcgtgagcaagagcagaaatacttcgatgaaatggttcagaagtgcaaagatgctggtgcaaccctggttatttgtcagtggggttttgatgatgaagccaatcatttgttgatgcatagaaatctgccagctgtcagatgggttggtggtgttgaattggaattgattgccattgcaacaggaggacgaattgttccgagattccaagagttgagtcctgaaaagcttgggaaggctggattagtcagagagaaatcattcggaacaacaaaggacaggatgctttacattgagcagtgtgccaattccagagctgtaactatcttcattcgtggtggaaataaaatgatgattgaggagaccaagcgcagtcttcatgatgctctttgtgtggcaaggaatctgatccggaacaactcaatcgtgtacggcggtggctcagcagagatatcttgctcaattgctgtcgaaactgctgcagatcggcaccctggagttgagcagtacgctatcaggtcattcgctgatgcattagatgctgttccactagccttggctgaaaacagtggtttgtcgccaattgataccttgaccgcggtaaaagctcagcaagttaaggagagcaacccccactgcggcatagactgcaacgatgtaggcaccaacgacatgaaagagcagaacgtctttgagaccctgattggcaagcagcagcagatcctgctggccactcaggtggtgaagatgatcctgaagatcgacgacgtcatctcaccgtccgagtactgatgaagcctgaaggaaggaggaaaaaaagagaggaacaggtggctatgctggatgagagtttagtaggcagcattgctgatgtgttgattggtttactccttgttcaggcgtgctccttgtatcttatgagctgcctagcacctttttgtgtgagggattgtttgtattgcacgatattgcatcgaggaatacgtatggacgtgttgtcaagaccctaggcaattctcttcagggctgtgagatggttggggtactgatacttttagctgaagctgtcctttttgttttatgaatgctgcaatagtttggcgcc

SEQ ID NO: 4346 - DNA, 759 bp, Zea mays
  Clone ID: 700354617_FLI
attgggattgagatctggacaatgcaggatggcatcctgtttgacaatatcttgattgctgacgatgagaaggttgccacctccattctggagaagacctggaagcccaagtatgatgttgagaaggaaaaggagaaggctgaggaggaggctgctgctggtgcagatggtctttctgagttccagaagaagatttttgacgtcctgtacaagattgctgatgttccgttcttggcaccctacaaaaccaagatcattgatgttatcgagaagggagagaagcagcccaacatcactattggcattctggtctccgttgtcgtcgtgttcgttaccgttctcttcaagatcctgtttggaggcaagaagccggtggcacctgtgaaacctgcagctgaggcgaagaagcccaaggccacagtgaccgacggtgctggaagcagtggcgacaaggatgagaaagaggacgaaaaggaggagacagcaggcccacgtcggaggacccgaagggagacatagagacctatttttgatgtgtttggatgttctggcgcctgcttattttgaggactcttaatatttctgagtgtataataggaacttgtgtcacctctgcggcttccctgctgcttatttgtttttacatggttagaccaggaaccttcacgagctgtagaatttagttcttgttggtcatttgtgtgtgtgcctgacgggtataatcccttgttcaatcagatagaggtgatgttttttttt

SEQ ID NO: 4347 - DNA, 652 bp, Zea mays
  Clone ID: 700354642_FLI
gtcaagcctgttcgaggtggaccaagagcagaaggccagcaactcgcggttcatgacccagaaaccggcgtcggcgatagtgtcaaagctggagcagatcgctgagacagagcgcttcatggtgaagaaacaggacgggctggtgaagctgcaggggtccaagcaagggaggaaggggcagctcgcgatcgacgccgagatcttcgaggtgacaccggcctttcacgtcgtcgaggtgaagaagtcggcaggcgacacgctggagtatgagatgttctgcagcaagggcctaagaccttcactcagcgacatctgctggagcagccgatctgaggagaacatggctccttcagtggttcagccatcacaattggagccatcctcttagaccgtctccgacagtttactcacccctcttagtcgattgttatttaagtgcagtctcttcggagatgcaattacagtccatcctctctttcttttcccctttctcaaagagctaggaccttgctcgactgagcatcaggctgtagggctctttgtgatcatcttttgccagttttcttcttgtagcagaagttgttgggcatggaactcctgttcctttcaccgaatagaagcataatgatcagcactgtgaaacattttttcc

SEQ ID NO: 4348 - DNA, 1688 bp, Zea mays
  Clone ID: 700354663_FLI
accgatccgtcatggcgactgctgcgccattgttgctcttccacggtctcctcctcctcctctccctggcgctcggcgcccatggcgtgaacgtgaagcccggggagcaccacatcctcaacaggcagagcttccccccggggttcgtcttcggcacggcgtcgtcggcgtaccaggtggaggggaacacgcacaggtacgggcgcgggccctgcatctgggacaccttcctcaagtatccaggcactactcctgataacgcgaccgcggacgtgacagtcgacgagtacaatcgctacatggatgatgtggacaatatggtccgggttggcttcgacgcgtaccgcttctcgatctcatggtcgcgtattttccccagtgggattgggagggttaacaaggatggtgtggactattaccacaggctcatcaactacttgctggcgaaccatattactccctacgtggttctctaccactacgaccttcctcaggtgctgcaggaccagtacaatggctggttgagccccaggatcctgggtgatttcacagctttcgccgacttctgcttcaagacgtacggcgaccgggtgaagaactggttcaccatcaacgagccgaggatgatggcccagcatggctacggcgacggcttcttcccccccgccagatgcaccggctgccagttcggcggcaactccgccaccgagccgtacatcgccggccaccacctcctcctcgcgcacgctgccgctgtcaagctgtaccgcagcaagtacaaggttcgtcaggccggcaagatcggcatcctgctggacttcgtgtggtacgagccgctgaccaagtccgtggaggacgagtacgcggcgcaccgggctcggatgttcacccttggctggttcctgcaccccatcacctacggccactacccggagacgatgcagaagatcgtcatggggaggctgcccaacttcaccttcgagcagtctgccatggtcaaaggctcagcggactacgtcgccatcaaccactacaccacgtactacgccagcaacttcgtcaacgccacagagaccaactaccgcaacgattggaatgcaaagatttcgtatgagcgagatggtgtgcccattggcaaaagggcgtactcggactggctttacgtcgttccatgggggctctacaaggctctgatttggaccaaggagaagttcaacagccctgtgatgctcatcggagagaacggaattgaccagcctggaaatgagaccttgccgttcgctctgtacgacaagttcaggatagactacttcgagaagtacctgtacgagctccagtgcgccatacgcgacggtgcaaacgtcttcggctacttcgcgtggtcgctgctggacaacttcgagtggcggctcggcttcacctccaagtttgggatcgtgtacgtggaccggaacacgttcgtccggtaccccaaggactcagctcgctggttcaggaaggtcatcaagaacgagaactgaatgatcgatcggccggtccattattaaggaacgaactccatgcgtttctttttagctaggggtatagtagtgcgtgtagggggtgcatcgatcagtttggtcatttcaataaaatgcttgtagttgttgttttggacttcgaataataaaaatactacttcccttctc

SEQ ID NO: 4349 - DNA, 1303 bp, Zea mays
  Clone ID: 700354687_FLI
ctcgcctttccttccccgccaatccatccgctcttctcagcggcgagaagaagagatggggagcaacgccgccggcaagcctcctcctcctcctgctgctgctgtgtcgtgggagttccacgcgacggggcctcgcaacttgaccagccccggctggagggacctcatccgctccagctggagagatccaagctacagaaggatcgcagtgtcgtgcttcgtgcaggccgcgtatctgctggagctggacaggcaggagggcagagccggtgaagccgcgctcgctcccaactggtggaagcccttcaagtacaagctggtgcgcccgctcatcgactccagagacgggtccatctacggggcgcttctagaatgggaccagctcgccgccctcgctgacctgatagtggccaagcctcagggcgctcccaaggtggtcctcgcgctcaggggcaccatgctgaggcagctgaccgtggtgagggacctggaagacgaccttcggctgtttgccctggagagcctgagggggtccgtcaggttcacaggcgcgctggaggtgctcaagtcggcgatccacaggcacggcagcgccaacgtgtgcgttgccggccactccctgggcgccggctttgcgctgcaggtcggcagggccttggccaaggatggaaccttcgtggagtgccatctgttcaacccaccgtcggtgtcactcggcacgggcctcaggaaaatccaggagaaggccagcagtgtcctcaagcggtatatcagtagaagcggcggcggtggcagcagctcctcgtcaaatgtttccccaggaccaggagaggagctacaagccgccgccgctcgagatggagttggagaagaagtgatgagcagggaggtcaaaagatgggtgccaaacctgtacgtgaacagctgcgactacatctgctgcttctacgctgaccgtagcggcgtcgctaccgtcaccgaggagaagcgttccggaatgcattccaagctgtacgtgatcgccaaaggaccgagcaagttcctggaggctcacgggctgcagcagtggtggtccgatgattctgagctccacttggccgtgcacgacagcaaactcatgtataggcaccttaagtccctctatgtcgaacagtagtagagaaggcattagtacttgtttctcagaatgcctagttcttcttctctagtacagccagacaagaaaacatgtaaaccgtcagctgattaagagctccaactcttgcaactcgtctaagcatatcttcttctcttctccgtacgc

SEQ ID NO: 4350 - DNA, 1251 bp, Zea mays
  Clone ID: 700354721_FLI
atcggacccttctgaagagtttcttatgagctgcgctccgaacattgctgcaattgtgcaggctaactctaaagttgatgacgaagtgtctaaataccttcacattactccagtgggttctgatgactttgatttcgataatcttgagccagaggagaaagaatttgaaaatcagaatatctcagagaagggcctatcagatgcttaccaaaatgtcttaaataggcttgcccagctacagaaacttgggaaggttggtaaaggtactgacaggaggaagcgattgaaaggaggactggagctggagccatgcatggacacagtgaataatggttggagaaaggacatgctgcttgaggatgtggtggatattgacgttggctatgatgcacctccaccatcgtttactgctggtttggagttgcagaagcagaggagagcacgtattgaagctgctaagcagcgaattgatgcaactaggaaggctcctgctgctccagctgcaaaagcaaataactcagaagacgttgtaagaaaaaaattgaccatgaagaatcgagggggaaagaagaaggatgatatcgatcatatccttcccagtgacaatatgacaggttgttcaggtgctaggaaaaagagacgaagaggttcctgtgacagtattgattgggaagattgcattattgagctcctgctactgcatggtgcaaatgaagctgagattgaacaaggccagtacagaagattgttggagttgcatgtattcagtgcagtaagtggggagaattgaaaaatggtatgtcaaagatggaaggcccttttggcaatgtgagttcttctactggtggctcacaatactttgcggaactgtaccagtacttacaaagatgatatacaaaagaacatatcctatgtaatcaatcatattagtgcaaccgtgcaatcaagtgatctggtgtatccgatcaaaatccaacggtagcagcaaaaaagccaaaccctgcaatattcttgacggtctatgagatgttaggagcgaaactgaaacctgaagaatatgtgcatattggtgaggacagtaggaaccacttattgggagctagggatgctggttgcgataccttgtttttgagactgatgtttctccttcgaggaggtttattatttgaggcaattccatatttgacactaaaaaagtttatgattattttcttggcctttgaaatataaaccttttttatttgacactgt

SEQ ID NO: 4351 - DNA, 2679 bp, Zea mays
  Clone ID: 700354762_FLI
cacccgcaaagccaacgcctccacgctccacggcgactccggctcctccacggctccagctccaggccccagctcaccctccccctcccctcgaggcggaccgcccccacgtcaccggcgatcgaatcggcggccgtagcctcgcgcttccggcgtcggagagtgcgcccgtccggcggaggagatggcgctgcggcacctcgtcacgggccagaacaactgcgtgccggatggcgcctcgtcgtccaaccccctcaacgccctcgccaacgccttcctcggccagtcctccaaggcgcagtcaataaaggaacttcctggttctgttaatgtcccatctacatctgactttagcgtgtctgctcctttgtcaaacatccctggttcagaaaataagttcaaacaagaccagcgacctcttgcacggggtgctgactttattcgaggtggtcctgctaatgattggattgagtcttttcggcctccgagggttcctcaacttggtgtagaagcacaatttccagattttgagcaaatttataacaatgcagggacaacctttcagccgccattggatggtccaccacaaagagtgttgtccggtgtcttgcattcctttctcacaagtggcccagctggtgtgccatttcaaccacttccggtaccagctgctcttggtttatctgaaagcgacaaacaatgcattcgtgatcgtagctgcataatggcacgacatattttttctgaccaaccagaagaatatatacagagtcaggtcaatactttgctgcattcgcttgatattgacaaccgtatgagaggacctatgcatgggcaatacccagaactacaggagtactggaagcagtcccaaagttctacgcgtcctgccccaatgcataatgctgctgataaatggattactgagtttggcaagcaaaataataatccagaaaattgggcgaactctttcgaacaacaatatggccccaatgggtgggcctctgagtttgaacagcatcagtctcagatggccatgcgccagatgggaggagcgaacatggccaacctggctgctatggagcaatcccgagtgcttgcacaaactttagcaagtaataatgatcccaagtttcagaattctaagttcttccagtttgtttcaaagatgagccgaggtgaacttattatagaagataatcaagtaaaagaaggttcagcatcccaatccagtggctgggctgatgaatttcaaacaccgtacattgctaatgcaaactcatgggcagatcagtttgcacatgaagagctttcacaaggggcggataagtgggttagcgagttctctagtcaacctaatcatggtgcactaaatgagaactgggttgatgagttctcgaaattaaatgttactgacgaatgggcagaggaattcagtggaggtggttttggcgaaagctctgctgatccatgggtagatgagttccaagaacacttgtcatctttcaaacaaagtccgggcgcctctcgaggggtttatgttttttctgagaacaacccgtatgttggtcaccctaatccaatgcaggaaggacaggagctcttccgcaagggcctcttaagtgaagctgttcttgctttagaggctgaagttttgaagaatcctgataacgcagaaggttggaggttgttaggcgtaacacatgcagaaaatgatgatgaccaacaggccattgcagcaatgatgcgtgcgttggaagctaatccaacaaaccttgaagttcttcttgctcttggtgttagtcacacaaatgaattggagcagggggaagcattaaggtatctttataggtggcttcagaatcaaccaaaatatggtggccttgtccctctgcagtcaactgattcaccttatggtcctgatgttgttagattgtttaatgaagctgctcagatgtcacctgaagatgcagatgttcatatagttctgggagtcttatacaacctatcaagagagtatgataaagctatagcttcatttaagacagcactacagctcaaaccacaggactattcactctggaacaagcttggtgcaacccaagcaaacagcatccagagtgctgatgcaatattggcgtatcagcaggctctggacttgaaacccaactacgtgcgtgcatgggcgaatatgggaatcagctatgccaaccagggtttgtatgaggattccattcgatactatgtaagggcagttgcaatgaacccaaaagctgacaatgcctggcagtacctgaggatctctcttagcaatgcttcgcgagcggacatgattgctgcatgcgacgcccgcaaccttgacgctcttcagaaagagtttcctctgtgagccctccggtccaaggcattagagcttccatggaaggaagcagcacactagcaagccgagtgactgcacctgtggtcatggaaatggaattggaaaccagtagcgttttgtatttgcctgttgattcttatatttatttttaggaagtgggggaatgtgtagcaactaggaagcgagggaacaacatccagttgatgtgaagcattcatggcacagtaggcaatagtggcaaaggggtactatacatacacacttacgggacgcacaacataaataaagaatggttgatt

SEQ ID NO: 4352 - DNA, 1601 bp, Zea mays
  Clone ID: 700354793_FLI
attttcttctcctgcggtccttccttcgcttccccgttcttccagaatcctgtcgagacctgaatccaccctcacccagcggtccccatggcctccggcgaaggtgtagttgatcagctgtacgaggcggctggcggcgaggcagtggccaagatagagggggaggccaaggtggaggcggaggccaagatgacggaggagccggtgctgtacctcgacctgacgagctaccagctgcacgatctaagcgaggtggagatcccacccacgctggaggaggtcgacctcaccgccaaccgcctctcttctgttgatcctcgcatcggccaactcccccatctccgcaagctctcattccgccagaacctcctcgacgatgacgccgtcgcgccactcacgtcctgggaggctattgccgggttgaaggagttcgtccttagagataacaaacttacaaggattcctgatgctggcatattcaaggatcttctggtgttcgatgtatctttcaatgagatatcttctttgactggtctgtccaaggtttccatcaaattgaaggaactttatgtttcaaaaaatgaagttgcaaagatggaagagcttgaacatttccatgcgctggaaattcttgaacttggtagcaacagattacgggtaatggaaaatcttgaaaccttgacaaatctacaagaactgtggttgggaagaaatcgaattcgagctgtcaacttgtgtggtttgaagctaattaagaaaataagtttgcaaagcaacagactgacttcaatgcatgggtttcaggaatgtgctgcattagaggagttatacctcagccataatggaatccaaaagatggaaggcctctctactttgcataacctccgcattttggatgtttcagctaacaagctaacgactatagaaaatatcgaaaccttaaccaggctggaggacctgtggttgaatgacaaccaaataccatctctagagggtatagagacagctttggctggttcgcgggagaagttgacgacaatctatctcgaacgaaatccctgtgcaaaaactccagattactcgtcgacgttgaggaaaatatttccaaatctcgaacaaattgattcagatatcatagcatgataactagctaatccttgcccagatactaaggcaaagaaggctttggggttccccggagaagtcattaacagcaatcaacttgtgaggcgaacaatagacagtaatttgatccttaaagtcttcattgccaactctgctcgtgttgtggaagacattggttcggagtttgtagccttgagccgttacgggcttaatatagtgattggtaaccaaataattagaggtgtacgaggattgtcacaggatccatatccgtgttactagttttaagatgtttcatttcagttctctagattagtgttgatttttttttctctccaaatgaggctaggaacagccagcagttcatttctgtaagttgaatgcagacatctctgtgttgcatatcaacttgcaaggatgtgtcagcctgttgagaacccgaaattatcttttatttgaattttatttattactcc

SEQ ID NO: 4353 - DNA, 2028 bp, Zea mays
  Clone ID: 700354848_FLI
caatcccaaccctactcccttgcctccccctaatgacatcgcctggcggcgtcttctccgccgcgctcgtcgccgaggacttcccttgggtggacatggaggaggagatggggatggccccggacatgtaccgcgaggtgttcgacctcgcgcagcgcgggacacgagcctttcgcgaccgcctcttcgacgaggcaatatcctgttacactaaagctcaaaatttgagaccagatccaattatccttggcaatcgaagtttgactttctgccggttaagtcaactgttgagggagagatcagcagctgactctgaatatcagcccttgaatggccttgatcctacaactcatgcagagttagctctgaaggatgcagagaagatattatctatcaacagtaattctcctagaccatatattctcaaggcatatgcgctatttctgatggagcattaccatgaggcacgtgagacccttcttgctggtcttcaagttgatcccctcagtcatgtcttgcaaacctgtctgaatgatctggataggaatacaaatattgcagctggggcaaggcgtgcaaggttagctaggattgatgattttgagtgcacattatgctttaagctattgtatgaacctgtcactacaccatgtggccattcattttgtcgctcttgtctacatcagtcaatggatcatggtaataagtgccccatgtgtcggacagtattatttatcggtccaagaacatgccctataagtgtaacattaagcaacataattcagagaaatttcccagaagaatatgctgagaggaggtcagaacatgagactatgacatatgctggtgttgatttgatgcctctctttgtcatggatgttgtacttccatcccaaaagatggcactgaacatatttgaacctcgctacagactgatggtacggagaataatggaagggaaccatcggatgggaatggttgctattgattcggcaacgggtactgtagcagattgtggctgtgaggtggaaatttcagagtgtgaaccacttccagatgggcgcttttatttagaggtggaaggcacacgtcggtttcgtatcgtgcgatcatgggatcaagatggatatagagttgctgaagttgaatggttgaaagatatacctctgccagaaggttcacaagggagaagagaactaatggaactggccaatggagcttcagagctggccagggcatatatcagacatgctagagataccgtacggactgcaaggcgaacaagacatctggatcttgagggcatgcctgggccacaggacccggaaaaatttagtttctggctagccaacttgataagtttgaggccctcggatagattagatacgttacgccttcgcgacactagggagagaatttctagtagcatcagtttgctccgtgattccgaacaaggctgccgtgtacaatgacggaaacagtacaagaatcgtttccacagaccaattcgttcgtctaggagtatatcgatttggagctactccgtgattccgaacaaggctgccgtgtacaatgacggaaacagtacaagaatcgtttccacgtaccaattcgttcgtctaggagtatatcgatttggagctactccgtgattccgaacaaggctgccgtatacaatgacggaaacagtacaagaatcgtttccacagaccaattcgttcgtctaggagtatatcgatttggagctagggatgtaatatgattcagaaaatatccgtccagatccatactcgaagatggtgaatactggttcggatggaattttcggatatccggacttttttcggataacggatacaaatacggatattttattcggatatcgaattcgaatacaatatgtctgatatctgtcggatatcgaatatccggatattttcttggataaatcttctcggatatccggatagctgtgtgtattttgttgatttttttagaaagaaattaataatacacaaatatccttag

SEQ ID NO: 4354 - DNA, 557 bp, Zea mays
  Clone ID: 700354852_FLI
gtgggatcccagccaccgccgctagaagaagagctcggcgattcccaggtcccgcgagaatatgccgaagcagatccatgagattaaggacttcctcctcaccgcgaggaggaaggatgcccgctcagtgaagatcaagaggagtaaggatgttgtcaagttcaaggtgcgctgctccaagtacttgtacacgctctgcgtcttcgatgctgagaaggcaaacaagttgaagcaatctcttcccccaggtttgaccgtcgaggaggtctgattggatacatggcaacgccgagttgaactacccaagcttctttatcagtagcagagcatgctactctatgtacttttggaacctaagctattagacctgtcagtgttggatgtctggatcttgcatttttggagaaataccaatttacctcgttcaaggatgcaagtatatttcttgtttaactgcacattactttatatttatgcctgtttcatacctttcctctacaaacatagttactagatttttgtgcttttatatgttatgccatttgcggggatgcttt

SEQ ID NO: 4355 - DNA, 429 bp, Zea mays
  Clone ID: 700354856_FLI
aacaaatccatcaaatccctcaattgaacttagtcctgagttcaagaaggttgggagcttccttggtcgcttcaagtcgatacctagcattgttgagcttgacagcttgaaggtttccggtgatgtttggttcggttctggaattgtattgaaggggaaagtgaccatcactgcaaaacctggcgtcaagctagaaatcccagacggagcagtgattgggaataaggatatcagtggccctgaggacctttagataagaatcagcgaatcagcaaggaggctcacttcgccaagtggcggatcatttttcgtgtttttttcctgtatattcaaacaggttccatgatattatggagaatattaattgccagtcataatccagacaattttacatgtattttactttgagggaaatgttttacacacttc

SEQ ID NO: 4356 - DNA, 1511 bp, Zea mays
  Clone ID: 700354866_FLI
catcgatcacgacaagatggcgtgcacaaacaatgcgatgagagccttgttcctcctggtcctcttctgcatcgtgcatggtgagaaggaagagtcaaagggcatcgatgcgaaagcgtccgggcctggtgggtccttcgacatcaccaagttgggcgcctccggcaatggcaagacagacagcacgaaggctgtgcaggaggcatgggcatcggcgtgcggcggcactgggaagcagacaatcctcatacccaagggtgacttccttgtcggacaactcaacttcacaggcccttgcaagggcgacgtgaccatccaggtggatggcaatctgctggcgaccacggacctaagccagtacaaggaccatggtaattggatcgagattctacgcgtggataacctggtcatcaccggcaagggaaaccttgacgggcagggcccagccgtgtggagcaagaactcctgcaccaagaagtacgactgcaagatccttcccaactcgctggtgatggacttcgtgaacaacggggaggtgtccggggtcacgctgctcaactccaagttcttccacatgaacatgtaccggtgcaaggacatgctaatcaaggacgtgaccgtgacggcgcccggggacagccccaacacggatggcatccacatgggcgactcatccgggatcacgatcaccaacaccgtcattggcgtcggcgacgactgcatctccatcggccccgggacctctaaggtgaacatcaccggcgtgacctgcggccctggccacggcatcagcatcggcagcctagggcggtacaaggacgagaaggacgtcacggacatcaacgtcaaggattgcactcttaagaagacgatgttcggcgtccgcatcaaggcgtacgaggacgccgcctccgtgctcaccgtctccaagatccactacgagaatatcaagatggaggactcagccaaccccatcttcatcgacatgaagtactgccccaacaagttgtgtactgccaacggcgcctccaaggtcaccgtcaaggatgtcaccttcaagaacatcaccggcacctcctccaccccggaggccgttagcctgctctgcactgccaaggtcccatgcaccggcgtcaccatggatgacgtcaacgtcgagtatagcggcaccaacaacaagaccatggctatatgcacgaacgccaagggcagcaccaagggttgcctcaaggagcttgcatgcttctagaccctccgtcgactgacccatctctctagttataatttttctctcgtccttgcattgcccattagatgctatccattggtaacgcacaacagtaaaacgacagacatccgacagctatattatgttcgacggtgtaacaccctgaatttgagggtataaaatttattctccaaataccaaccaaattcaggggttacctcttgtctctctctctctcttttccttttgattaaaagtaagtgaattaggcgagggtttattt

SEQ ID NO: 4357 - DNA, 1020 bp, Zea mays
  Clone ID: 700354870_FLI
ggcaatgagaggggtcaagcatcttcttgttcggaaaactgttccaaatgggttggtatttgttggggagcttccatttggacgaaatggcgggtttagtcctaaaatggatcacctggtgtgttttcttcctggtacccttgctcttggtgcaactaaaggtatcaccaagagaaaagctcttgagactaatttgttaactgatgaagatatagaaaatctgcagcttgctgaagatcttgccaaaacatgtgttgagatgtacttcgtgacctctaccggccttgctcctgaaatagcttatttccacattgagggtgatacagaaggggggcctgatggtgggaataaaagctccaaatatatcaatgatatcgtaataaaaccacttgaccgtcacaatcttctacgcccagagactgtggaatcactatttgttttgtatagaatcacagaggattccaagtatagggagtggggttggcagatctttcaggcttttgagaagtacacaaaagttgattctggtggttacacatcattggatgatgtcacaagcctacctccttccacgagagataaaatggaaactttctttcttggagaaacattgaagtatttgtatttactgtttgatgaaaacaatacccttcccctagataagtatgtgttcaatacagaggcccatcctcttccagttatgcggtctgcagaacaggcttcacattctgtgtagtttcccaagtttatagctgttgtaccatggtgagaagtacagatctgtgacaaatatacttgacaacatagttggaggaacgagaaattgagaatcccttgcatgactgttcttggaggcaagctcatggttctggaatctccatgcctgatttgaggatttgggggttttacttgtatttactggaaggccatacaacctttgtactctgtactgtctgtagtctgtaatacctaacttcaaattttgaaatcggctagcagttataccaagatttttatctt

SEQ ID NO: 4358 - DNA, 1180 bp, Zea mays
  Clone ID: 700354918_FLI
gcaaggggagcaacatcgccatccagctggatggcaacctgctgggatcaaacgacctggacaagtacacggcgagctggatcgaattgtctcacgttaacaacatcgggatcaccggctcgggcacgctggacggccaggggaccgccgtttatagcaagagcaagaccgacaacgtgaaggcgatgcccaacacactggtgctgtttcacgtgatcaacgccactgtcgccggaatcaaactactcaactccaagttcttccacatcaacatcgacaactcagagagcatcaccgtgaaggacgtgaacatcaccgcgcccgccgacgttgagaacacggacggcgtccacgtcggaggctcctccaagatcagcatcctcaactcgaccatcggcaccggcgacgactgcgtctcgattgggcccgggtgcaacggcgtcttggtggacagcatcacctgcggccccgggcagggcatcagcgtcggctgcctaggccgctacaaggacgagaaggacgtgagcgacatcacggtgcggaactgcgtgctcaagaacaccaccaacggcgtgcgcatcaagtcgtacgtggacgccgagtccgtgctgacggcctcccatctcaccttcgagaacatcaggatggaggaggtggccaaccccatcgtcatcgaccagtacttctgcccgcagaaggtatgccctggcaagcggagcaactcctcgcatgtctccgtcaaggacgtcacgttccgcaacatcaccggcacgtcgtccacgcccgaggccatcagcctgctctgctcggagacgcagccatgcagcggcgtctccctcatcgatgtcaacgtggagtacgccggcaagaacaacaaaaccatggccgtctgcagcaacgccaagggcaccgccaagggaagcatcgaggcactggcttgcctggtctgatgatgaccttccttttgcatgcatgcatggtatctcatccttgatgatgatctagctcactagttctttttaatttccgcttcattcgcttttccaaattcgattgtgtttcagccaagttgtttagcgggacatctcttgtctgatcttcctgctaaatagagttggactcctatatatagaggccttccggcacatataatatacgtcggaccaatattattgtgatc

SEQ ID NO: 4359 - DNA, 858 bp, Zea mays
  Clone ID: 700354921_FLI
ggccatggcggagccgcaccccttctcccccctgcctcgcgcgcggcggccgagatggtgctgagcgcctgagcctgccctcctacgggctcactggcacgctctccacggccatcggtaacctcacgttcctgcgtatgctaaacctgagctccaattgattccgcggggaggtcccagcgaccatcgttcgccttgcgcatctgcaggcgctagaccttagctacaacgccttctctgaattccagagctgcgattcccgaggccatggagcagcagacaatatcaattgccaaagctgccattacaatagtactcattttagggacttcagttcttgcagctgtcaatccaattgcaggatgctatgacgctcttaagatcactctgtcgaccaatccaaggaaggcacctgaagcttagggaggacacctcacaagtcacagctgcccgtgttgcatctgtgtgattttgtaatttgaatgagcaaatctatctggcgtcagtgcggggttgggtttcctagagggaggaacatcgtgggatgcaggtcccaaggaacaccagatattttgaggcagaccgtggcgaggtgcccaagggcagcgcctagatcttcttctggatggtcaagttctggaacgataatgtggcagaggagatgccctggtcttcgtacgtatatgttacttactcccactctcaacatagcagtagtaagtgcttgtttctgatgaatgtatcaatcaatgctatgcgccactgtaaaatattcttctcaaacattaacatttgatctgatgtataatgtaatgtggcatgtcctccatatcagagttctccatgcttatttttgat

SEQ ID NO: 4360 - DNA, 1927 bp, Zea mays
  Clone ID: 700354935_FLI
tccacaaacactaattggcgatcctggaagaataaggcaaatcattacaaatcttgttggaaactctataaaattcacagagaagggtcatatctacttgacggttcatgtcgttgaagagattatgcattgtctggaggttgagacgggaactcagtatacaaataccttaagtggctacccagtggcgaacaggaagcgcagttgggaaaactttcgactttttagtagggaactgaactcatccgagatgccttttgcacccattgcatcagactcaataagcttgatgatatcagttgaagatacgggtgctggaatcccgttcgatgctcaatcccgtgtcttcacccctttcatgcaagtaggtccatccatcgctcgcatacacgggggcactggcattggattaagcatcagcaaatgcttggttggcctcatgaagggagagatcggatttgcaagtaaaccccaagttggttctactttcaccttcactgcagtgcttacgagagtccattccagtagaaatgagaataaatcatcagaatttaaagagatcaatgcattggtggtagatcatagaccggtccgtgccaaggttactaagtatcatttgcagagactgggagttcagactgaattgacaactgacctagatcagtatatttctaaaaataattgtggatcacagattgcaaagcttgtgctcattgacaaagaaacctggctgaaagaatcccactccatgcctcttttggttactaaattgaggaacaaagatcagccagactctacaaagttatttcttttggagaaccctaaaagttctgtcaagagcaattcacatatattcagggaatataacttgaatgtaattatgaagccacttcgtgcaagcatgcttcaggtttcgctacaaagagcattgggtgggatagataaactgcattgcaggaatggagtagtcggaaattcaacactgggcagccttcttcacaagaagcgaatcatagtggttgatgataatattgtaaatctcaaggttgctgcaggcgctctaaagaaatatggcgcggaagtaacttgtgctgacagtgggaaggaagcaatcacactgctgaaacctcctcacaattttgatgcttgtttcatggacatacagatgcctgaaatggatggatttgaagccacaaaaaggattagagtgatggaaagagatctaaatgagcaaatagaatgtggagaagccccaccagaatgcgtaggggttcggcagtggcgaactccaatattagccatgacagcagatgttatccaggcgacacatgaacaatgcttgaaatctgaaatggatggttatgtttccaagccattcgagggcgagcaattgtacagagaagtagctcgctttttcctaaatcaagaccaagttcagtaggtaggcttatatggagtgtaaaatagtggaggatatcggggttcacccatcgaggctgaaagaattctgtcagagatcccatgttcttgagagtggaaaacactttaggctggagatggaaccacccatgttcggttccttggtacatctgaccaaactgcaaaactaaatgtgcaatgtcttgaaatcaaggtgcatgtggagctatttactcgacaatctgaagtcaaggcgtgtgaaaaaaaagcccagctgcattcactaaccgcagatgtcctctgccactataatatagagtagggagagaaattttccttccccggaaggtaccggctgtacatattaggtattggttgtttgtgcaggcatttgttggcattttgttgtgcatcgtcttcggtctgtattgtttgggtcgaagctgtaaaatgtaaatggcattttcaaagatggaagttttgtttgacaaatacatcggtcgtcatc

SEQ ID NO: 4361 - DNA, 1456 bp, Zea mays
  Clone ID: 700355025_FLI
ctagcttattacctgccatctggacttatattttgtagttagcaaggccgagcattccttgccccaacagtacattcacgcgttcaaagacggacaatttacgacatctccagtgtctcattctggggcttgattgtctgcacgactgccatttcttatttccttttgtttacatcagctagcttattacctgccatctggacttatattttgtagttagcaaggtaacccactgcacaacccgctgctccgcctcgagcgcatgtgctgagagtggctcggcgtcatcttcgagtgggagggggtcatcgttgaggatgatgccgaattggaaaggcaggcgtggttgaccctggcacaggaggagggcaagtcgctgcctccctcttttgtgttgcggagagtcgaagggatgaagaacgagcaggcgatttctgaggttctctgctggtctcgggatccctccgagcttagaagttttatcacagtattgcgagtcatggagtagagatgatgctcaaaggcagtacattgtagaacttggtataccagaagaatggatgcatgaagctctggctctttatcacgaatactatggagataaacagggcgcactggagaatttgattcagtgtggcaactggaagaaagctcatactattttcgtgacttctgttgctcattctatgtttctgtcatctaaccatcaggaggtctggaggatcacaagtgccttggagaaccacaagtatgaaattgctgactgggaccttggtgccggaatatacatagacttctacgttctgaagaactcaatgcaagaaagaaatgccatggatgattcgggttcactcgaggagatgagtgaatcatgcagaagtttctttggccgattaaacgagtcgttgttagtctggggaagcaaattacctgttgagtcaagggcatgctactcgaagatggtagaggagctatgcgcgcttctggtggacaccccaagcgagacgctgaacctacccatggggtgtcttctaatgatgctcaacgctccagttccggacgagagcaggtcgtcgtacctgcaggacgcactctccgtcttcaccgaaatcctttgcagcgatccgtagcacaagggtccacggtgttgccataatctgggtgaagggaagtgaagcctacaggcaacacgccgaagagtttgtacgtctcatgtttggtacttgtagaaaaaattaggaatgtataactatgacctgatgttgctccggtgaatttgtaactccgtctgaagacatgtgtcgggattttcgttgtatgtgagtaccaggtcttgtgaaacgttgacttgcgagctgtaccaatagggagtgatttcctgggcttcatttcctgtgtatccgtgtgtgtgtttgtgtgattattacagggaagggcagcgtcacggtgaatttgt

SEQ ID NO: 4362 - DNA, 1684 bp, Zea mays
  Clone ID: 700355048_FLI
agagggtcatcgagtcccttgggctgcagccggtccgggactccctggtggggacggtggagcagcgcggcatctccggcgggcagcggaagagggtcaacgtcggcctggagatggtgatggagccgtcggtgctgatcctggacgagccgacgtctggactggacagcgcatcctcgctgctcctgctccgcgccctccgccgcgaggctctcgagggcgtcaacatctccatggtggtccaccagcccagctacaccctgtacaggatgttcgacgacctgatcctactggccaaggggggcatgacggtgtaccacgggccggtgaagaaggtggaggagtacttcacagggctgggcatcgtggtgccggagcgcgtgaacccgccggactactacatcgacatcctggagggcatcgtgaagccgagcctgagctcgggaggcagcgtcaaggacctgcccatcaggtggatggtgcacaacggctacgacgtgccgcgggacatgctgcagagctcgtcggaatcggagtccacgtccaggggcgacgcgggacacgctccggacgagccgtcgtccgtggtctcgctgctctggggcaacctcagggacatcctcgggcagaagaaggacgagtacgactacaacaagacgtcggaggacctgtccaagcgcaagactccaggcatactcaggcagtacagatacttcctaggaaggtgcggcaagcagaggctccgtgacgccaggatacagggagtggactacctgatcctctgtctcgccggcatatgcctgggaacgctggccaaagtgagcgacgagacgttcggggcgctggggtacacctacaccgtcatcgctgtctctctgctgtgcaagatcggagccctgcgttccttcacgctggacaagataaactactggagggagcgagcctccgggatgagctcgctggcctacttcctgtccaaggacagcatcgaccacttcaacacggtggtgaagcccatcgtctacctctccatgttctacttcttcaacaacccgcggtcctccatctgggagaactacatcgtcctcctcgcgctcgtctactgcgtcaccggcatcggatacaccttcgcagtcttcttccagccaggttccgcgcagctgtggtcggccttgcttccggtggttttgactctgatagccactcagcagaaggacactatccttgccgacctgtgctacaccaagtgggctctggaagccttcgtcattgccaacgctcagaactattccggcgtgtggctcataacccggtgtggctcgctggtcaggagcggctacgacatcgagcacgaggctctctgtatagcggtcctcatcgccaacggggtactcttccgctgtgtagccttcttctgcatggtcaccttccagaagaactgagagagggaggtcaaggaaaacacacccgtgaactttctatgccctcgtagcagctctgtttttgttaatttcagtgcaataggattgtagactagagcccctcttggtaaggtatgtcagtatgtgtagatgaggacagattcttcaatagcagggatgccctaaattacagaggcggtttcttgcctaacaccaatgtaaatttgatatgcagattcagtgtatgtatgggtacgatgact

SEQ ID NO: 4363 - DNA, 397 bp, Zea mays
  Clone ID: 700355329_FLI
cagcagtggagtagactatgatgatgagattggagagccagaggaggctccgcgtggatatcgtggcagagggaggggccgtggagggcgtggatcttttgcagttggaaggggctatggtggtgataattatgcgatggaagaagctggtagatatgatgatgatggatataacgcaccacctatgcaacgatatgaaggtggcagaggaaggggcagagggcgtggacgcggtcgtgggcggggaaggcaaggccatggacctcctccgcagcagtagattggttggcacatcacctttgggatgtcataacctccatttctttccataagataaatgttaccgtccattatattttttatctggttattaggttcatgttgaaaaaaaaaaagg

SEQ ID NO: 4364 - DNA, 892 bp, Zea mays
  Clone ID: 700355402_FLI
ctcaaggcggccatggccatcaacgccgacgtcatcgcggagatggagatccccgaggagtatatcgagtccctgccgaagaacggaaggtccattcttggagactccatgtacaagatcataaccgacgacgtcttcgaccccaacgagctcctgcagtccgtggacctgtcgacggagcacaagatcgtggacctcaaggaccggatcgaggcctccgtcgtcatctggcaccggaagatcagcaacaagctctcgtggggccccgccggcgtcagcctggagaagcgggaggagttcgaggagcgggcgcagaccgccctgctcatcctcaagcacaggttccccggcatccctcagtcggcgctcgacatcagcaagatccagtacaacacggacgtcgggtacgccatcctggagagctactccaggaccctcgagagcctagccttcgcggttctgtctcggatcgaggacgtcctccacgccgacgccgtcgcctgcgaccccaagcgcaccaagtccaggaggcggcctagcctagagtgtgacgccgccgccgaagccgaagccgaagccgagacggcgcaccacagcggttccgtgcactggcaggaccatcaggatgccgaggacgacggcggcgagaagcatccggacggcaacggtaggaagctgaagaagctccacagggtggcgaccaagaagtttctccacacgcagaagatcgacggtgtggccggcgggctcaagagcttcgcacacaggtagcgtttttgcgtgcgtgcgtgcgtgcaatggtgccatactgtttggaaacgaagaacgtgtgtaaatagttccaagtttatttatatgcaaaaataggaccacggggtgcgggtcttgcccg

SEQ ID NO: 4365 - DNA, 1742 bp, Zea mays
  Clone ID: 700355426_FLI
gcaagactctcggaattggctcattcgggaaggtgaaaattgcggagcatatcagcactggacacaaggtggcaatcaagattctcaaccgccgtaaaatcagaggcatggagatggaagagaaagttaaaagagagattaagatattgaggttatttatgcatccacatattatccgcctctatgaggttatagacacaccggctgatatttatgttgttatggagtatgttaagtgtggggaattatttgattacattgttgagaaaggtaggctgcaggaggaagaggctcgccgtttcttccaacagattatatccggtgttgaatattgccatagaaacatggtggtgcatcgtgatctaaagccagaaaacctcctattggattcaaaatgcaatgttaagattgcagattttggcttaagtaatgttatgcgggatggtcattttctgaagacaagttgtggtagcccaaattatgctgctcctgaggtgatatctggtaaactatatgctggacctgaagttgatgtgtggagctgtggggttattctttatgctcttttatgtggtactctgccatttgatgacgagaacataccaaacctttttaagaaaataaagggtggaatatatacccttcccagccatttgtctggtgcagcaagggatttgattccaagaatgctagttgtcgatcctatgaagcggatcaccattcgtgaaattcgcgaacatgattggttcaaaattcttctcccgcgctatttgactgtgcctcctccagatagtgcgcaacaagtcaaaaaggttgatgaggaaactctccgtgaggttttaggtatgggatatgacaagaacctgttggtggaatcaatccaaaaaaggctgcaaaatgaggcaactgttgcatattacttactcttggacaataggctccgtacaaccagtggctatcttggagctgaatgtcaagaagctatggactcctcattctcaaacatcgcatcatatgaaacaccaagttcagcacgtgggaatagacagcaaatatttatggagtctccagttggcttgagaccacatcttccagctgagaggaaatgggctcttggtcttcagtctcgagcacatccaaaagaaataatgtctgaagtgctgaaagctctgcaagaattaaatgtttactggaaaaagataggtcactataacatgaagtgcagatggagtcctggctttcctgctcaaattcataacaatcataacttcagtgcagggtccattgaaactgatagcctgagtgagaggttaagtttaattaagtttgaaattcagctgtacaaaacaagagacgagaaatacctcctcgatttgcaaagagtcagtgggccacagctcctctttctggacttgtgcgcggcctttctaactcaactgagagttctttgatttctggtgtcagctttccatcagttgcattccttgcgtttcactagaggaatgtctaaatcgctcacaaagctgtaaatagtaatctccagtagattggattttctggagtatgtagatggtaggcatgagaagatgttatgcctggcggcgatcttctgaaccagactgtgtggagtaacttatctcctaattctttacggctggccagctgccggtgaattagatcagtgcttttgctggcataatgtctatctacattaataatttcagctattacaacggttaatt

SEQ ID NO: 4366 - DNA, 1231 bp, Zea mays
  Clone ID: 700355511_FLI
cgcacctgagcgtgcaggagctggcggcgtcgctgggcgcgctaccgccggagttcgtgcggtctgagcaggaccagccgggcgcgaccacgtaccgcggggccgccgtgccggacgcgccggtgatcgacatatcggagcccgggttcggcgcgcgcatggccgcagccgccagggagtgggggctgttccaggtggtgaaccacggcgtgccctcagcggcggtggcggagctccagcgcgtcgggcgggccttcttcgcgcttccgacggaggagaaggagcgctacgccatggacccggcgtccggcaagatcgagggctacggcaccaagctgcagagggacctcgagggcaagaagacgtggaacgacttcttcttccacgtcgtcgcgccgccggagaaggtggaccacgccgtctggccccggagcctcgccgggtacagggaggccaacgaggagtactgccgccacatgcagcgcctgacgcgcgagctgttcgagcacctctcgctggggctggggctccacgggggcgccatggcggaggcgttcggcggagacggcctggtgttcctgcagaagatcaacttctacccgccgtgcccgcagccggagctcacgctcggcgtcgcgccgcacaccgacatgagcacgctcaccgtcctcgtgcccaacgaggtgcaggggctccaggtcttcaaagatggtcaatggtacgaggccaagtacgtgcccgacgcactcatcgtccatatcggcgatcagatcgagattttcagcaacggggcatacaaggcggtgctgcaccgtacgacggtgaacaaggagaagacgcggatgtcatggccgatgttcgtggagccgccgggggagctcgtcgtcgggccgcaccccaagctggtcacggaggagagcccggccaagtacaaggccaagaagtacaaggactaccagcactgcaagatcaacaagctccccatgtaattatgtagctcgggttctactgtcgtgtgcacccgcttctgtaatttcagtctaccatatttaagtcacataaccgttattccagtcgcatgcatggccacagaattggcttgtgggctctttcgtctggtttgggccattgcgggctgcttatctactctctttcccgaccgtgtttatttgttgttgttgtaagggcactaatacatgttaaagaataacgggtcttttgtccgtatatt

SEQ ID NO: 4367 - DNA, 733 bp, Zea mays
  Clone ID: 700355634_FLI
cggttgcggtggcagccatggtggcggtggcggcggcgctgcctctgctcgcgtgtggcggttacgcggagtgctacgactactgcttcaaggactgcatctccaaggacaagtccatgagagactactgcagctacgcctgcgacaagacctgcgcgcccgacgcccgaccgcggctgcgagaccagtgccgccctgccgaggcctctgcgcgcaggcggcggtgctggcgttgtcgggcggccagggccagcggagtcaccggaccacccattccacgagaggcaggacgctcacggaccggcggcggcgtcgcccgaccatccattccacgtgaagcagaagcaggacgctctcggcccggcggcggcggcgtcgcctggccacccgttccacaagatgcacggcgcggtcaagccggcaggggagccggatccaggatacgtcgtgtatccggcatggggccccgccgtccactaatcgtcgttcgacggcgacgacgctccgccgccaacgacggcgagtgccacatgcctatgctctcgtgtgggccccgtacgttattgagcgctactagtactagggaaagtgtacgtgtgatgtgtgtcactcagtgtcgattgatcaatgatgctcattttcgagcagacccaggaatgctgagtgcagagagcagagcgttgttctagaaagtgaaccgaggaataaagtggacagaaatgttggctggttc

SEQ ID NO: 4368 - DNA, 946 bp, Zea mays
  Clone ID: 700355649_FLI
tagggttttgctgctctccgaccccgagctccgaaggccgcagcatcaggcgcggcccccctcgcgtgtgaccgagatggcgctgccgaatcaggggaccgttgattaccccagcttcaagctcgtcatcgtcggcgatggtggaactggtaaaactacatttgtgaagaggcatctcactggagagtttgagaagaaatatgaaccaaccattggtgtggaagttcatccgttggatttcaccactaactgtggtaagatcaggttctactgctgggataccgcagggcaagagaagtttggtggcctcagggatggatactatatccatggccagtgtgcgatcatcatgtttgatgtaacctcaaggcttacttacaagaatgttcctacgtggcatagggacctgtgcagggtctgtgaaaacatccccattgtcctctgcggtaataaggttgatgtgaagaacaggcaggtcaaagccaagcaggttactttccacaggaagaagaatctgcagtactatgaaatttctgccaagagcaactacaactttgagaaacctttcctgtacctcgcaaggaagctggctggtgatccgaaccttcactttgttgaagctgttgctcttaagcctccggaagttaccatcgacatggctatgcagcagcagcatgaagctgagcttgctgcagcagctgcacaacctcttcctgatgacgatgatgatctgattgagtagaaaggatcatgagtcttgaacttgagcaggagttgtgccttgcgtgttttaagttgttctagggtgaactcttgagttctcattgtctggatcatctttttctccttggatgtgttgcatcttttgagtgtggaaatggatggtactcctcgccatgaatttgctggctactttatacattgctttgtaactctgtttgatgat

SEQ ID NO: 4369 - DNA, 976 bp, Zea mays
  Clone ID: 700355666_FLI
gcagaggctgcttcggacgaggcagcagtgcatggttagccaggttgctggtttgtaccctgtgagagtcttccatgatcttccaagacatgcagaaaacccctgtgccgatactaatggggagcatgtgacacttccagaggaaaacagaacattttcaggtggagatggaacacatttacccaccattatcaaatctccagaagcacgtggctggacattttttggttgggacattatgaagcataaaatgaagcaaaaaagttacaggaacaaggtgctacagaggtccgcagctgttctgggatatgcagcacatgcagtcttgctcatagcttgctatcttgatgttcccctccgatatcccttgcgctttggagggtcccgatcttatgtgagtgatcgcttgccttcagctgatacagcatcatcggctgctttagcaagtaccaggaacaccgaatcagaactaacagaataccctcttttcctggaatgccaagacgatgactccactagtgcctcctatgccatttatttattgcacaaggatacggagcagcttctgaactatgttggagctgagagctgtggaaggcacgtgtttggtaacctacgagaacttcttaggatcgtgcagtctgataagtttgtgtacagatgatggttccaatccatgtggttttggagtgcttatgctgtagatgtattatagagatgtaagtaggtgtttttcttttctcttcctattctttcgtgtgattcattccctctttccctgcgctaggttttttatatgtgcaggaaataggcaattatgtttttctagagaaatgaaatgtactcacacgtatggcttcttgcatatcttattcgagaaaaaagatggtccaatcgaaagtcctacaaccactgggtctgtctccttgacaagcaagtgtttgatatttagattatccaataagtcacattttgc

SEQ ID NO: 4370 - DNA, 1027 bp, Zea mays
  Clone ID: 700355680_FLI
accggccacctcaccaactcccctacaagccgccgggcaagtgccgccgggccgaacgaccgaagcatccacttccaaagtgttttgtttgttgtccgcctggcgcctgcccccataactactctgccaccaatccggggaggaatcaacctagcggtaagcggacatggcggcggcgaagatagcgccgtcgatgctctcgtcggactttgccaacctcgcttcggaggctgagcgcatggtccgcctaggcgccgactggctacatatggacatcatggatgggcacttcgttcctaacctgactattggggctccggtgatccagagcttgaggaaacataccaaagcatatttggactgccatcttatggtcacaaagccttcagattacgtagaaccatttggaaaggctggcgcttctggattcacattccatatagaagttgctagagacaactggcaagatctcatccaaagcattaaatcaaagggtatgcggcctggtgtatcattgaggccaggtactccagtggaggaagtttttcccctggtggaagcagaaaatccggtagaattggttcttgtgatgacagtcgagcctggttttggtggtcagaaatttatgccagaaatgatggataaggtgcgcacactgagaaagaagtacccttcccttgacatagaggttgatggtggtctaggtccttcaaccatagacgtggccgcatctgctggggccaattgcatcgtcgctggaagctctatatttggcgctgcggacccaggagccatcatatctgtgctgaggaagagcgtcgagggctctcagaacaaaaactgattttggtgtttctgctgtaaagtactccctccgtttttttattcgtcgcgttttagttcaaacatgaactagcggacgactgatattcgagaatggagggattacttcgaccctgcacgtcagatgagctgatcctcacattgcaccggaactgttcggcgagaataaaatttgatgttagac

SEQ ID NO: 4371 - DNA, 883 bp, Zea mays
  Clone ID: 700355690_FLI
gtcaagctgacaaatgatcaagaacttctcttcagaaacatccaaaggaatgaataccataacctcttcaacttcatcagcggtaagcatttgaaaattctgaatcttggagatggacaaggtagaactagtggtgttactgctgttcttcagagcactgatgatgattctgttgatccacatctggagcggataaaaaatcaggccggtaatgaggaaagtgatgaagaggatgaagattttgtggcagacaaggatgatagtggatctccaaccgatgattctgatgcagaaggctctgatgctagtatgagtggaggagaaaaggagaaaccttccaagaaggaagctagtagctcaaagccgcctgtgaagaagaagcagaagagtgggccagatgaaggttctcaaaaaaagaagccaaagaagaagaaagatcccaatgcccctaagagagctatagctccattcatgtacttctcaaaggctgagcgagctaatatcaagagcagcaatcctgaactggcgaccacagagattgcaaagaagctcggagaaaggtggcaaaagatgacagcggaggagaggcagccatatgtggagcagtctcaggtcgacaagcaacgctatgcagaagagtctgcagcctaccgtggtgcagccgctcagcagggctctggtgctggatcggaatgaaggtttaatcgtctcgacagttaacttgcaaggctggatgattgagtcgtcagaataaagctggaatacccaaaaacctaagctgaatgtcatcgtttgacctgttgggttgttccggaattcaaccaggattcattctagttcatcaatgcttatattaattaggcaagcaatttggtctggaatc

SEQ ID NO: 4372 - DNA, 1147 bp, Zea mays
  Clone ID: 700355692_FLI
ctccacttggtgctgcgcctcaggggaggcatgcacatcttcgtgaagaccctgaccggcaagactatcacccttgaggtggagtcttcagacaccatcgacaacgtcaaggccaagatccaggacaaggagggcatcccaccggaccagcagcgtttgatcttcgctggcaagcagctggaggatggccgcacccttgcggattacaacatccagaaggagagcaccctccacctggtgctccgtctcaggggtggcatgcagatctttgtgaagacactcactggcaagacaatcacccttgaggtggagtcttcggataccattgacaatgtcaaggccaagatccaggacaaggagggcatcccaccggaccagcagcgcctcatcttcgccggcaagcagctggaggatggccgcaccctggcggattacaacatccagaaggagagcactctccacctggtgctccgcctcaggggtggcatgcagatttttgtgaagacattgactggcaagactatcaccttggaggtggagagctctgacaccattgacaatgtgaaggccaagatccaggacaaggagggcattcccccagaccagcagcgtctgatctttgcgggcaagcagctggaggatggccgcactctcgcggactacaacatccagaaggagagcacccttcaccttgttctccgcctcaggggtggtatgcagatctttgtgaagaccctgactggaaaaaccataaccctggaggttgagagctcggacaccatcgacaatgtgaaggcgaagatccaggacaaggagggcatccccccggaccagcagcgtctgatcttcgccggcaaacagctggaggatggccgcaccctagcagactacaacatccaaaaggagagcaccctccaccttgtgctccgtctccgtggtggtcagtaagtcatgggtcgtttaagctgccgatgtgcctgcgtcgtctggtgccctctccatatggaggttgtcgaagtatctgctgttcgtgtcagtgttggtttaataatggaccggttgtgttgtgtgtgcgtactacccagaactatgacaaatcatgaataagtttgttgtttgaaattaaagcctgtgctcattatgtttt

SEQ ID NO: 4373 - DNA, 2853 bp, Zea mays
  Clone ID: 700355693_FLI
agctgcacacaaggatataaaagacaaggaaaaaatgattcaagacttgaggcagtcactggatgtccagaggaaggagctgaatgactgcagagctgaaatcacagccctgaagatgtacatcgaagggactcaatcaatcaaacaattgtttgttggaactagtgatggtgtaaagtcgcattcctttgctaattctgtgggagcatcatcattgaataatgaagatgaagattcaaaaggatctgaagccataacaaataagctagcatcagcagtaaatattactgatgatacgcagaaagatcgccaagttctagaaagtagcgctgaaggttcctcagtttcagaaactccagtgtctttcacagctgttgagaatgacagctatggtacatcaaaagaagataaatctgtgtcaaatatctcatcgaataatgtatgttttcagagtaatctgcatggagcttccatgactggtaaaagccaggggagttcagatggcatatccatgtatttatctattgagaaactagagagcccaagtaaacaaaaatcttcagataagattgctttggagactataaagatagtttcagatgcacttccaaagattgttccttatgtgctcataaaccatcgtgaggaacttcttccattgatcatatgtgctatagaaaagcatccagatagcgatgtacgggattccttgactcatacattgtttaacctgataaaacggcctgatggagaacagagacgcatcataatggatgcttgtgtagaattagcaaagagcgttggtgagatgaggacagaaactgagttacttccacaatgttgggagcagataaaccaccaatatgaggagcgcagattgcttgttgctcagtcgtgcggtgaacttgccgtttatgtccgtccagagatacgagattccctcattttatccattgtgcaacaacttgtcgaagatgctgcaacagttgtaagggaagctgcaacacataacctggcattgcttcttcctatgtttccaaatctggacaaatattataaggttgaggagctaatgttccaattggtctgtgacccgtctggggcggttgtggaagttgcactcaaggaacttgttcctgctgtagtaagatggggagataaattggatcagatatcaagagtactattggctcatatcctggcatctgctcagcgatgtccacctatttcaggtgttgaaggtacaatagactctcatcttcgtgttttaggagaacaagagcgctggaatattggtgtccttcttcggatgttgactgagttgcttccatttattcatcagaaagctatacaaacttgcccctttgcatcagctgatccaacaagctctacaccagagaacttctcagcatcctgcctaaaatcatatgcaacaggtgactctgagtggtcagcatttgagtggatgcacactgattgcctgccagatttgatcaagcttgcctgcttgttgcctgtgaaagaagataacttaagaaccatcatcacaaagtacctcttggaagtatctggactctacggtaaagattatctggagcacattatgctacctgtatttcttgtagctgctggtgacattgatagtggcgattttacctattttcctctatcaatccagccaaaagtccgtggcttgcgtccgaaaacttcaactgctgaaaaacttgccatcatgtgtgtcttcccattattgttatctggtattttgggttctccttccagtcgtcaacagttggaagagtatctgagaaaagtacttatccaaaacaccaaggatggttcattttctatgcatcatactactgagatcattaacgcagttcggtttctttgcttatttgtggagcaccatagtgtcatctttaacattttgtgggagatggttgcgagctcggataccagcctgaaaataaatgctgcggctctactgagagcacttgtaccctacacggatgtgaaaatagcatcaactcatattttgccagcacttgttacccttggctctgatcaaaacttgaaagtaaaatatgccagtatagatgcatttggagctgttgctcagcatttcaaaaatgacatggttgttgacaaaatacgcattcaaatggatgcttttcttgaagatggatcacatgaagcttctgtttctgttattcgtgcacttgcagtagctgtacctcattcaacagataggctacgtgaatatcttttaaccaagatatttaagatgacatgcatcacacctgtcggcaatgatattgaacggcgtcgtgaaagagcaaatgtactctgtgaagcgctccgggctctggatgctacagatcttcctgctatgggtatacgtgatttgcttctgccatcaatacaaaatctgttaaaagatctggatgctctagaccctgcgcacaaggaggctttagaaatcataagccgggaaaggtcagggggtacgctggaaagcattagcaaggtaatgggggcgcatcttgggattgcatcatctgtcagcagtttctttggtgagaacagtctcctcacaaagaaagaaggtggcgaggaacatgatcctgctggccccaccgctcctgagcaaaacctgcaggctcagccagagagcacgaggtttggtcgcataatgaggagcggctttggagacatattgcgaggtcaaagcaaaggacagtgatgcacttagattgaaatgatcaattacatacatagctgccgataccacattctttgtttgtaagttgacagaatatacctcaagggttgtatgttatttgccgagat

SEQ ID NO: 4374 - DNA, 1434 bp, Zea mays
  Clone ID: 700355701_FLI
aacaagatggcgtgcacaaacaatgcgatgagagccttgttcctcctggtcctcttctgcatcgtgcatggtgagaaggaagagtcaaagggcatcgatgcgaaagcgtccgggcctggtgggtccttcgacatcaccaagttgggcgcctccggcaatggcaagacagacagcacgaaggctgtgcaggaggcatgggcatcggcgtgcggcggcactgggaagcagacaatcctcatacccaagggtgacttccttgtcggacaactcaacttcacaggcccttgcaagggcgacgtgaccatccaggtggatggcaatctgctggcgaccacggacctaagccagtacaaggaccatggtaattggatcgagattctacgtgtggataacctggtcatcaccggcaagggaaaccttgacgggcagggcccagccgtgtggagcaagaactcctgcaccaagaagtacgactgcaagatccttcccaactcgctggtgatggacttcgtgaacaacggggaggtgtccggggtcacgctgctcaactccaagttcttccacatgaacatgtaccggtgcaaggacatgctgatcaaggacgtgaccgtgacggcgcccggggacagccccaacacggatggcatccacatgggcgactcatccgggatcacgatcaccaacaccgtcattggcgtcggtgacgactgcatctccatcggccccgggacctccaaggtgaacatcaccggcgtgacctgcggccctggccacggcatcagcatcggcagcctagggcggtacaaggacgagaaggacgtcacggacatcaacgtcaaggattgcactcttaagaagacgatgttcggcgtccgcatcaaggcgtacgaggacgccgcctccgtgctcaccgtctccaagatccactacgagaatatcaagatggaggactcagccaaccccatcttcatcgacatgaagtactgccccaacaagttgtgtactgccaacggcgcctccaaggtcaccgtcaaggatgtcaccttcaagaacatcaccggcacctcctccaccccggaggccgttagcctgctctgcactgccaaggtcccatgcaccggcgtcaccatggatgacgtcaacgtcgagtatagcggcaccaacaacaagaccatggctatatgcacgaacgccaagggcagcaccaagggttgcctcaaggagcttgcatgcttctagaccctccatcgactgacccatctctctagttataatttttctctcgtccttgcattgcccattagatgctatccattggtaacgcacaacagtaaaacgacagacatccgacagctatattatgttcgacggtgtaacaccctgaatttgagggtataaaatttcttctccaaataccaaccaaattcaggggtt

SEQ ID NO: 4375 - DNA, 529 bp, Zea mays
  Clone ID: 700355742_FLI
cccaacttggggcaggattgagtgctgcagcagggcccattggcaggaccagtgaaaagggatctgggatatgctacacttacagctgcagcaaaggtgccttcgttggtgtttcactggaagggaatgtggtgacaactagaatggaaaccaatctccgcttctacggtgatgcataccagacggcaacccatatcctgtttgggagggtggagcggccccgagctgctcagcccttgtttgctagccgatttagggcttcttaagggtggattgaagatgattagagaggattaaatcgattgatagtcaaattaaatagaaagagagttaatccccctcaatccttttctatccgcatgcaaccgatccatgctttagatcattggatggtttcactactgacaccagtccacacattaaatattagcagagtatttagtgttagattattgtagaaattacgatttagacttgtttctaaatgaataattttatatataattagaagatcatgatcggttgagag

SEQ ID NO: 4376 - DNA, 436 bp, Zea mays
  Clone ID: 700355774_FLI
aaggaggaagcgcatgtgaacatttgtgcatttgtcggacgttcagatctggactcacgatgctttcggtaaaacttgcctctgctctgatccacctccaccttcaacgacttggcaccctcgaagaccaatcctgcaagcaattctttgttccaagaagacattgaggccctcacaaagaagacacaagatggtgggacaaaagtggttgaagcaaaggctggcaaagggctctgcaacattgtctatggcataagtttagaacatatgaatcgttgtcactgtcagcatgtctattggttacactatagaatatcttgtctgtttattagccttttagaattttatgattactttcttctatgctttgtaactattcaatcagtagatgcttcttgccttcattgatttttctatgaaggactacttgtcattc

SEQ ID NO: 4377 - DNA, 885 bp, Zea mays
  Clone ID: 700355786_FLI
ggccgttcgtgcgtgccgtgagggagagagggaggtgctcgcgccgccgccgtcgcaggcggcaattcctgtcgttcgggtcccagggtggggtcgcgaatggccatcaacctgcgtggactacgtgcgcgcgagccctcgatccgagaacctttggagctcgcaaacagggagcacccgacctcggcgccgtgggccattcattgccaccgttgacctgcgcattcgctggcgatgtcacctcggtgggagttccagatggggcggcaaactatgtgggaaatgtgtgggaccgttgccgaacgaaggagtgcgtgctggcgggggaatttctcgccgtcgcgcagcgacgccatgaacccgccgtgccgcatggacagcttcacccagcctctcagccatcgataatgccccttggatcgattcgatacctcctctgcattatttagcacctagttacgcttcgaatcaagtctgggtgcgccgcataatcgatcttcggtgtgagcaccgccgtcccgagcgctcgccccgccgtgctcggcggtcgagcgtggaagaaatccccctggtcgtccgattggctttgggcggcttggatgtgatcggtggcacccctccccctttttagttgtttgagatctcggtcgttcatctaaaactcaagggctcccgacgggtctaggtgtgggagagtttgaaccgctgatctgtgatccaacgggtcagagagcgtacctcttcgctctttaaatccttgtcgtcgatctttgatcctaggacctcggctttgtaccggattattgtgaacgagatcttttctgggccgtgcgattgtcatccaacggatctgataagaggatacccctttgtcctgaaaaaatt

SEQ ID NO: 4378 - DNA, 1463 bp, Zea mays
  Clone ID: 700355809_FLI
ctctcacccggcgccgccgccgccaccgccgccgccccgaggccccatcccagcgcaaccgacttccgcctcggattgaagcaatgtcgtcggacgacgaggtcagggaggagaaggagctcgacctctcctccaacgatgtcgtcaccaagtacaagactgccgccgaaatcctgaacaacgctctgaagctggttgtgtctgagtgcaagccaaaagcaaagattgttgacctttgtgagaagggtgactctttcataagagagcaaactgggaatgtctacaagaatgcaaagaggaagattgaaaggggcattgctttcccaacctgtgtttctgtgaacaacacagtctgccacttctccccgcttaccacagatgatgcagttctggaagaaaatgatatggttaaaattgacatggggtgtcatattgatggctttattgctgtggtggcacatacacatgtaattgcaaatgggcctgtcacaggaagagcagctgatgttcttgctgctgccaacacagcagcagaagttgcaatgaggcttgtcagacctgggaagaagaataaggatgttactgaagcaattcagaaagttgctgctgtttatgattgcaaaattgtggaaggtgttcttagccatcaactgaagcaatttgtgattgatggtaacaaagttgtgctaagtgtctccaatgctgatacaaaggttgatgatgctgaatttgaagaaaatgaagtctatgcaatcgatattgtcaccagcactggggaggggaagcccaagttattggatgagaagcagaccaccatctacaaaagggctgtagacaagaattataacctgaagatgaaagcgtcaagatttattttcagtgaaatcagccagaagttcccaatcatgcccttcactgctagggcattagaagagaagcgtgcacgcttaggcttggtggaatgcatgaaccatgagctattgcagccgtaccctgtacttcatgagaagccaggtgaccttgttgcacacataaagttcactgtgctgctaatgcccaatggatcggataggattacatcatatccgctacaggagttaaagccaacaaaatccattgaagacaatgctgagataaaggcatggcttgctttggggacgaaatcaaagaagaagggtggtggaaagaagaagaaaggcaagaaaggagatgcagcaggagatcccatggaggcgacaaacgatgctacaagccaagaataattctgatttttggaattactgcacccagcattttctctcttgtttcttcgctgcatctgatggtgttatattacattcagttgcgaaaaaatgaatacttttttctagtgtctaagaaacgaagcatcctgttgcacattatcgcatccaatggcacaaagataattatctacgaggcatgcctagtgttggttctctgtt

SEQ ID NO: 4379 - DNA, 718 bp, Zea mays
  Clone ID: 700355817_FLI
cagcaacggctaccactacatggagggcgagacgatgagggtgcagttcgagcgctggatcgtcgccgccaaggccgacctcgtcgtcgccggccacgtccacgcgtacgagcgcagccaccgcgtgtccaacgtcgcctacgatatcatcaacgcccggtgcacgcccgtccggacaagggacgcgcccgtctacgtcacggtaggcgatggcggcaacatcgagggcatcgcggacaacttcacgcagccgcagccgagctactcggccttcagggaggccagcttcggccacgccaccttggagatcaggaaccggacacacgcatactacgcctggcaccgcaaccaggacggcgccaaggtcgtcgccgacggcgtctggctcactaacaggtactggatgcccaccgacgacgacatcaactgatgagtgatgatcacatcatgcatatgccatcgccaccactcatcaccggatccgggagttcggccgtatagattagatctcgcttcgttctcggttcagttcgtccatgtgtcctctcatgataattgtgtcagcaaactttcaatttatttggcttgtgctaaagcacaatatatcatatgtttagtactgcataagttagattttttctgtgatctagtaaaacttttaaagactcgtctgaaataaacgtataagaaaaaccacggccatgggggtcgagtgtcc

SEQ ID NO: 4380 - DNA, 1910 bp, Zea mays
  Clone ID: 700355830_FLI
cggcagcaaggaggacgccaacaggcgcctcgagtgggccaccttgaacctggagcgcggcgtcgtcgtgagcgagacgacgaagggcgacggcaatggcaatgcaggccggaaggcgccgataagcatcgtccggctcttcttggcctgcatggtctccggcggcatccagtacggctgggcgctgcagctctccctcctctcgccctactctcagactcttgggatctcgcacagctacgtgtctctgacatggatctgcgggcctatcgccggatttgtggtgcaacccatcgtgggctactacagcgaccggtgcacctcgaagatgggccggaggaggcccttcatcctcgcgggatgcatcatcatctgcctctctgtgttggtgatcgggttctcggcggacatcgggcggcgcctcggcgacaccaaggagcactgcagcacgttcaccggctcccgctggtccgccgccgccgtctacattgtcggattttggttccttgacttcgccaacaacacggtacagggaccggctcgcgcgatgatggccgacctggcagctggacagcacggccccaacgttggccaggcgatcttctccctgtggatggccctcggcagcgtgctcggatacttgtccggcgccaacgcgaaatggcacgactggctcccttggctcaaaaccgcggcgtgctgcgatgcgtgcgccaacctcaagggcgccttcttgactgcggtggtcctcattataatcagcatgtctgtcaccttgtggctcgccggcgaggagcggctcgacaaggaaagcgtcgacacctccggcggcgcgtgctccgcgttcatggatctcttcaagaccctcaagaagcttccgcctgccatgttcagcgtgctcgccgtcacggccgtcacatggctctcgtggttccccttcttccagtacaacaccgactggatgggccgggagatcttccacggcgagccgcagggcgcgggcggaaaggcggacctgtacgaagccggcgtccgcgagggcgccatcggcctcctattctgctccgtcgcgctcggtgtcacctccttcttcatccccaggctgtgccggaagctcacgtcccgggtcgtctggtccgtcagcagcctgatggtgttcgtcctcatgacggccatggtcgtcctcggcatggtctccatgaagggctacaggccctcgctcgccgcctccctctctggccccgaccactcgttcaagggcggcgccctcgccatcttcgcgctcatcggcatccctcaggccgtgctctacagcgtgccttgggccgtggcgtctgaggttgccaccgaggacggcggtggtcaaggtctcaccattggcgtcctcaacattgcaatcgtccttccacagctggtgatcgcgctgggcgcaggccccatcgacggcgccttcaacaaaggaaacaccccggccttcggcatcggcgccgccttcgcccttatctgcgcggtcctggcgctcatcctcctcccaaagacgagaggcgtctccaacgccaccgtcatggccggcgggcactgatctattatctatctccaggcaggcttgtcgcagcggctgaccggctgagagtagatcagaaattcagaatctgcttcttggtttcagccccacccgattaaggaggtgtttgattcatccggagtccgggttttagatgccgattaagactataattataaagctaattgataagccatggttaattcgcgagacgattgtattaagtctaattagttcataattagcacatttttagtatcgcaaaatatgagcaaatcatgtattaatagattcgtctcgcgaattatacaattagttttataattagcatgtgtttagtcgtcct

SEQ ID NO: 4381 - DNA, 1190 bp, Zea mays
  Clone ID: 700355840_FLI
cagttgaagctactagcgtgtagctagggaagagaagcgcgcgagtagctagcagacgtacgtaggcagaagcctagctgggtttgaagggccccgatcgatgatcccctacgcgactgcggcggaggcggagggagcactggggcgcaccatgacgtgggctgagacagcatggtacgagtactcggcggtgatgccagattcctggctgcactgccacaccacatttatcctgttcgtcatctacagcatcgccccgctgcccctgctactcctagagcagttcgctccgtccgtcgtgctgccgtacaagctgcagccccgggtacggctgcccccggcagcctccctcagctgctacatggacgcggcctgcatctttccgctcgccgttggccttcagttcgtctcctatcctgcggtcgccaagatactaaggacccgaatgggactgccgttgccgtcggtgagggagaccatcgcgcagctagtcgtatactctctagtggaggattacctcagctactggatgcaccgtctgctgcacacccagtggtgctacgagaagatccaccgcgtccaccacgagttcacggctcctacaggcttcgccatgtcgtacagccactgggccgagaacgtcgtcctttctatcccggccttggccggcccagtgctcgtgccatgccatgtcaccacgcagtggctatggttctccatccgcctaattgagggcattaacacgcacagcggttaccatttcccgttcagcccttgcaggctgattccattctacggaggggctgcataccatgactaccatcactatgcaggaggccgtagccaaagcaactttgcacccctgttcacctactgtgattatttatataggacagacaaaggctacagataccacaagctaaagcaagagaagctgaagagtctagcagaaaatagtgcggataaaggaggcaactactcattcgacgaagggaaaaagaacagatatttttgtgcctgagcgtacgaagaataatcaaggctattacttcgtcctgttcgaagggaagatttgcaaataaataattcgaatttactgcagaagctcttgattggtcgacgaacaaatatattgttgcaatccgtttcgtgtattctatatatctaatatgaaacttttttgtcggaat

SEQ ID NO: 4382 - DNA, 869 bp, Zea mays
  Clone ID: 700355861_FLI
gccgcggagaaggatgagcagcagcagtcccgagggatagcactgatgcagggcatctgcgccgtggtgtaccgcaaggccgataacacgccctgccccatcaagcagggtctctacttgggatctgttggagcagcattcaataaggacgctctcaagagtttgaacatcacccatatcttgatcgttgcaaagtcactggatccagtatttccagctgaatttaattacaagaagatcgaagatgaagctataagctctggaggcaatgttttggtccattgctttgctgggcggtcaaggagtgtgacaatcgttgttgcatatctcatgaagaagcatcaaatgagcctcgaaagtgccttgtcactagttagaagtaaacgacctcaagtggctcctaatggggggtttatttcccagctggagaagtttcagaaatccttgcaagtggagcaggaatggagaatgcaacctgtgcagcactgataattatactagtgttataataggtgcagaaggcctcatatgttgtgaaggcgtatgcgttgtaagagcgtcttgaccgcgtattatggcatctggataacaagcgaggccttggcaaactttatgatgtaaacagcaagcaacgttgttcatccattgggatgcagtttacatgttgaagaagaatgaaccaaagaggggtaatagttggtgctctctctccttgaagaagaatactccatcgtgcatagatgccggcacaccgttgacttttctaaaaaactttgactagtgttattcaaaaaataatgagttatcatttattttattgtgatttgttttatcactcaaagtaataagatgagtggccaaagttttcg

SEQ ID NO: 4383 - DNA, 542 bp, Zea mays
  Clone ID: 700355876_FLI
tgtacgtgttctgctgctcctacgcccacaacgtcgcgcccaaaggcaagttcatcgccttcgtctccaccgaggccgagaccgacaagcctgagatcgagctcaagcccgggatcgacctgcttggccctgtagaggagaccttcttcgacatctacgacagatatgaacccgtcaacaaccctgacgacgactgctgtttcctcacaaatagctatgactccaccacccattttgagacgacggtcaaggatgtgctcgccttgtacaacaagatcacgggaaaggagcttgatctctcagtcgatttgaacgcggctagtgctactgagcaagaagctgcttgaacaccccggcggcctctttttttgcagctctacacaatagctatttcttcgatttttttttaaaaatgttccatagatggataagtttattgaagaaatccattattgtatgttttttggagttccattttttgtcacatgcatgtaatgaacaacggtggcaatgatttataaaggttccattattcgctggcg

SEQ ID NO: 4384 - DNA, 1688 bp, Zea mays
  Clone ID: 700355912_FLI
atggaactaaactcagacaccctcctcttcctaactactatcatctcagcggctatccttgttgtgtgctcacttagccgccgcaaaccttcaccaggccccaagaagaagcggcctccaggcccatggcgtctccccttgatcggaaacctcctccacctagccacctcgcagccgcacgtcgcgctacgggatctggccaggaagcacggacccgtcatgtacctgcgtctgggccagatcgacgccgtcgtgatctcctcgcccgcggcggcacaggaggtgctccgggacaaggacgtcgccttcgcgtcgcggccgaacctgctcgtggcggacatcatcctctacggaagcatggacatgtcgttcgcgccgtacggcgcttactggaggatgctgcgcaagctctgcatgtccgagctgctcagcacacacaaggtgcggcagctcttggccgtccgtgacagcgagaccatttcgttggtcaggaaggtccgggctgccggcggccagagcggagagccggtcaatctgggcaggctggttttgtcctgctcgatggcgatcaccggcagggcgacgtttgggcagctgtgcggcgacgagctcatgtcggtcgtcgacgtggcggtgctgtacggtggcgggttctgcgccggggacctcttcccgtccctgtcgttcgtagacgtcgtcactgggttgacacgacggctgtggcgagcgcgccggcacctcgacggcatatttgacaagatcatcgccgagtgtgaggcacggcagcgacaggcgaagacgacgaccgggacaacgaacggagatggcgacggccttctcagcgtcttgcttaggatccgagacgagggggagaccggcatcagcatgactagtatcaaagcaatcttatttgacatgctcgccggcgggacggagaccacgtcgtcggccgcggagtggatcatgtcggagctgatgaggaacccggaggcaatggccaaggcgcaagccgaggtccgccgagtgctcgacggcaagagcccgcaagaccacgaagggcaaatggacaagctcagctacacgaggatggtggtgaaggagggcctgaggctgcacccggtgttccctctccttcttcctcgtctctgccgggagacgtgcgacgtcggcggcttcgaggtggcccagggcaccaaggtcatcgtcaacgcgtgggcgttggcgaggagccccgagcattggaagcatccggaggagttctggccggagagattcgccgacgacactagcgtcgccgcggcggcggactacgtagggtctcagtttgagtatatcccgttcgggagcggcaggaggatgtgccctggaaacacctttggcctcgccgcgctggagctcatggttgcgcggctgctctactacttcgactggagcctcccggatggaatgcggcctgacgagctggacatggacaccgtcgttggttcgaccatgcggagaagaaaccacctgcatctggttgcgtcaccgtgcaaggagatcgagagctgatgttggtgttgttctgatttactgaataaaagctgtcacttttgatatattgttatcattttcataaaaaatacacttcctccatgcaccgatacaaaacggctaaaaggctgcaggaccatatatttttacaggcg

SEQ ID NO: 4385 - DNA, 1826 bp, Zea mays
  Clone ID: 700355918_FLI
ggttccttcaatttttaatcgaacaaaggcaacttgttttgcttatgggcaaactggcagtggaaagacatataccatgcgtccccttcctcttaaggcttcccaagatatcttgaggttaatgcaccatgcatatcgaaatcaaggatttcaattgcatgttagcttctttgagatatatggtggcaaattatttgaccttctcaatgataggagcaaactttgcatgagagaggatgcaaagcaaaaggtttgtattgttggtttgcaagagtatagagtgtccgatgtagagactatcaaggagttgattgaaaaaggcagtgctaccagaagtactggcacaaccggtgcaaatgaagagtcctcaaggtctcatgccattcttcagcttgctattaaacgccgtgtggatggcaatgactccaaaccacccagacctgttggcaagctgtcatttattgaccttgctggcagcgagcgtggtgctgatacatctgacaatgataaacaaacaagaattgagggtgctgagatcaataaaagtttgcttgctttaaaggaatgcattagagcacttgataacgatcagactcacattcctttccgaggtagcaaattaactgaagtcctgcgtgactcattcattggagactcacgcactgtcatgatatcatgcatttctcctagttctggctcttgtgagcatactctgaacacattgagatatgcagacagagtgaagagtttgtcaaagggaagcaatgccaagaaagatgtgtctttggcagtgcctttaagagagtcgagcccttccccactgccttcagttgtaccctcattctctgcatctgaggtgatgaatgatatcaccgagagaaacaattttggttggcccaagcagcagtatgttaaagaacggcctgctccgacatttgttgaacgaatgcccaaagtgaaggatgccgtggagttcgcaacatcagacggtgcttatttgaagggacaaagaagccagggctgtatggcaccaaatatagctgaaataccggatacaatgtaccagcagagaaggcaaccagcaaggaaggctaaagataccgctttgcggaataatatgagaaattccgttgcttacccaactagaagtgttgagccagacgaagatgatcatctgaataatcttctccaggaagaggaaggcttggttagtgctcatagggagcaggttgaagcgactctggacatcctcaaagaggaaatgaacatattaggcgaagcggatcagcctggcttccaacttgacgactacaacattacgagactaagcagtatactctcgcagaaggcggctgggattgtggacctacaggctcggttggagcagttccagaggcttttggatgagaacaatgtgctgctatatgctcagagcccccggttgtagttccatctgttgccttcatggcaccgtaaaaggtgggcatcggtggcttctaccagcgcctcaggtggcatcatatgcggtatcggcatgtcgctgtggccatgacccatgatgctgcaatttgtttttaacccataggtgccggtgaaacgcaaactagatggctagttcacagcctgttgccatggttctttggcatggccggccccgcaacctattttgtactagagttgctccattcttgtctttccgcgctccatccttaatccaatgtgtatatcttgtatttgtccgtgtcacatgagtgctctgttatttgtagctcaacaaatacatttttttacctttctgatgtatgaagttttccagagtgtacggt

SEQ ID NO: 4386 - DNA, 514 bp, Zea mays
  Clone ID: 700355934_FLI
agggtctgggcaaaggcggcgccaagcgtcaccgcaaggttctccgcgacaacatccagggcatcacgaagccggcgatccggaggctggcgaggaggggcggcgtgaagcgcatctcggggctcatctacgaggagacccgcggcgtgctcaagatcttcctcgagaacgtcatccgcgacgccgtaacctacacggagcacgcccgccgcaagaccgtcaccgccatggacgtcgtctacgccctcaagcgccagggtcgcaccctctacggattcggcggctgagaggcgctaccgccgctggtggccgtggcaaaagtcttgggtcgcggtcaagaaatcgagagtattctggatgacgtgcttagtttcgtagtattattatcactagtgcttattgttagcggttgttgggttcgaccactctaagccactgtcaaacagtaatatatgagtaccgcatttccgtgtttcgaacttctaatatatcataatcttatggacatcgggtt

SEQ ID NO: 4387 - DNA, 1472 bp, Zea mays
  Clone ID: 700355939_FLI
ccccaactcgtccagagttagttgtagctatagacctggttgttgtagcgcacgcagtagccataggaaatacggctgcttgctgccaagatgagtggcggcgccaaggcctacgccgccgtcgtcctgatcaggatcatgtactccggcatgcacgtcatgagcaaggtggccctggatcagggcatgaacccgctggtgttcctgttctaccggcataccactgccgcgctcgttctcatccctgtcacctttgttgtcgagaggcggaaagctaagccggttacgttcaagattggatggaagatgttcatacatgccctctatggggtgacagcatgcggtgacttgtttaaccttggactcaactacacttctgctacgtcatcttcagcgttgtacaacgttcaaccggtggtcacattcatcctagccgtcatatttgggatggagactctgaaactgactcggttccatggcaaagtgaaattcgcgggcatcctgttctgcgtcgccggcgtcaccatcctggccttctacgaggggccgatgttcaggtccttcaaccaccaccatctgtttcagaacggcggcggcggcggcggtagctctgcagcaggagcaggagacacgcactccaagaagcagtgggtgctggggatcttcctcatgacactatccaacgttctagcaggcctgtggacagtgctccaggggcccctgatagaggacacgtcgaagctgatgaacacgacgctgcagatctcgtgggcgtcgctccaggccttcctggtggccgttgcggtggagagggacttctccaagtggaggctgggctggaacgtcggcctcgccgccataatctacagcggcgtgatcgtgacggcgctttcctactacatgcaaatgtggacgatcgccaagaggggcccggtgttcctggccatgtccatgccgctcaccttcgtcttcaccatcgtcatatcctccttcgtcataggggacgcagtcagcctaggaagcatctttgccggggcgttgctggttggaggcctgtacaatgtgttctggggcaagagcatcgaggagcgagacgacgacgacctgatgaacaagatcagcggcccgggaaaagccgggcagcaggacaaggcggcggacaataatccggcgtcgtcccaagtgccggatgacggtgcggaggcaaaggtgtaatacagcctctctcatcagtcagccagacacgggaacgatcgatctgcgtcaaaagctaggcggccagcaggccaaagccaagccactggttaatttatttcaggggtgctgggaaacaaaacaacgaagaacgaagcaggaattagcacacgtattgtgatttgtgaatgtgacgtgatcgatatgcaggtctactcaccggccggccggccggactcgtgtggcacacgcacgctgtaaatttggtctcggatttt

SEQ ID NO: 4388 - DNA, 840 bp, Zea mays
  Clone ID: 700355941_FLI
atcgctccctgcctctgccctctggtcacctcgcttccgctcccggctcccctccggccacccagacatcgtccgttcgctcgccaagagacaggaccggagaccatggcggaccagctcaccgacgaccagatcgccgagttcaaggaggccttcagcctcttcgacaaggacggcgacggttgcatcacaaccaaggagctcggaactgtcatgcgatcactgggtcagaacccaaccgaggctgagctccaggacatgatcaacgaggtcgatgcggacggcaacggcaccatcgacttcccggagttcctcaacctcatggcccgcaagatgaaggacaccgactccgaggaggagctcaaggaggcgttcagggtgttcgacaaggaccagaacggcttcatctctgcggcggagctccgccacgtgatgaccaacctcggcgagaagctgaccgacgaggaggtcgatgagatgatccgcgaggccgacgtcgatggcgatggtcagatcaactacgaggagttcgtcaaggtcatgatggccaagtgagtaaagcctgcggtaacggtatactaccccgcgggaattgaaggaggaaaccaaaccgtgcatcgcatattagaaaggcaatgcaggtcttgtttccttcgtcttccccatgaagaaaccgtactagctgtagctgctgaacgtttgagtccccctgctgccacccttatctccatttgtgtcatcgaaactccttgcttcccctgctgtgtgaatctgtacggctttgcgtgttctggacactgattgcagttgaatccagtttgtagttctatttgttcatcg

SEQ ID NO: 4389 - DNA, 3492 bp, Zea mays
  Clone ID: 700355972_FLI
ctctcgtgtcacctcccccgtttgttaccccgagaaggcaagccgaggcggagccggaacgggaaggcgccgaagcgttcgcggtcgcggcttcgcgatttcggcaggaggatcgcctttgagagcttgcgctgggtggtggtggtggagcggcggcgaagatgacggcgccgcgcggtggcggagatgagccgccgccgtcttcggctgcggcggggcacgccgcggggaacgagccagtgacgccgacttccgcgctcgtgtcgggactcaaccgccgcgggtcgaggggtgcgggcatggccaccttctcgatggaggtcttcgacaacgaagtcgtcccatccacgctcaacagcatcgcgcccatcctgcgcgtcgcggccgagatcgagcacgagcgcccccgggtcgcgtacctatgtcggttctatgcatttgagaaggcacaccggctggatcagaactccatcggccgtggcgttaggcagttcaagacagctctgctccaacgtcttgaaaaggataatagccctagtcttgctaagcgcgtgaagaaaagcgatgctcgcgaaatcgagagtttttaccaacagtactacgagaactatgttcgtgcacttgacaaaggggaacaagctgacagggctcaacttgggaaggcctaccagactgccggagtcctctttgaggtactctgcgccgtcaataaaaatgagaaagtcgaggagctcaatcctgagattattcgcttgcacaaggatgtgcaagagaagaaagacatctacacaccattcaatatcctgccccttgatgctgccagtgcatcccagtccatcatgcagctggaggagatcaaagcagcagttgcagccctccgaaacattcgaggcttgaattggccttcaacatttgagccgcagaggcagaagggtggtgaccttgatttgttggattggttgagagctatgtttggctttcagcgagatagtgtgcggaatcaaagagagcatttgattctcctccttgctaatgtccacataaggcttgagccaaagcccgatccactgagcaagcttgatgaccgagctgtcgatgtggtgatgactaagctattcagcaattacaggaagtggtgcaaatttttgtcacggaagcatagtttaagatttccacaaggcgcacaaccacaagaaattcagcaacggaagattctatacctaggtctttatcttcttatatggggtgaagcagcaaacatcagatttatgccggagtgtctttgctacatcttccataatatggcatatgagctgcatggtttgctagctggaaatgttagtattgtgactggggagaatatcaggccatcttatggtggggatgaggaggcattcttgaagaaagtggttacacctttctatagagtcatcagaaaggaggcaggcaaatcacaacatgggaagacaccacattctgcgtggtctaactatgatgacctaaatgagtacttctggacatctgattgtttctcgcttgggtggcctatgcgggatgatggtgactttttcaaatccgtgcatgattcaaggcctgtaacaacggctggaagctcaccacaaaaggattccacgaaaagtacagggaagacaaatttcgttgagactagaacattttggcacatcttccgaagttttgaccgaatgtggactttctatattttggctctacaggcaatgctgatttttgcttggaatgattattcagtgaccgaaatccttcggaaagaccttttgtattatctatctagtgtattcgtcactgcagcatttctacagttcctccaaagcattttggacttcattctgaactttcctggtagtcatagatgcaagttcgttgacgtcatgagaaatgttctaaaaatgatagttagtgccatgtgggctgtggttcttccctttttctacattagcacagcatctaaagtcaatttattaccattcaaggacttggaaaaatggctccgttatgtcaatggggtgccacctctatatatcctggctgtggcagtgtacctaatacctaatatccttagtgcggcactcttcctgtttccaatgttccgaaggtggatagaaaattcagactggcatattgttagactgcttttgtggtggtctcagaaacgaatttacgttggccgtggaatgcatgaaagccaagtttcactttttaagtatacatttttttggattttgctgctatgctccaaattttcgtttagctactttgtccaaattcagcctctaataaaaccaacaaaggatgtaatgggtgttcataatattcattacgagtggcatgaattttttccaaatgcatcctataatattggtgccatcatgtctctatgggctcctgttctactggtctatttaatggatacacaaatttggtatgccatcttctctacgatatttggtggcatgactggagcacttgggcgacttggggagatacgaacattgggaatgctgagatcacgattccattctttgcctggagccttcaacacatatttggtgccttcagataaaagcaaaaataggcgcttttcactctcaaagcgctttgctgaggtttctcccaacaagagaactgaggccgccaagtttgctcaattgtggaatgaagtaatatgcagtttccgggaagaagatcttataagtgatggggagatggacttgttagtggttccttattcgtcagaccccagcctcaaattgatgcagtggcctctgttcttgcttgctagcaagatacctatagctttagacatggcggcacaatttagacctagagattcagatctttggaaacgtatatgtgctgatgagtacatgaaatgtgctgtactggaatgttatgaatcattcaaactcgttcttaatttattggtggttggagaaaatgaaaaaaggattattggtattataatcaaagaaatagaaggtaatattggaaagaatacattccttgccaattttagaatgagcgcactcccagttctttgcaagaaatttgtagagcttgtgtctaccttgaaagaaagagatgcctcaaagtttgataacgtggtgctgttgcttcaagacatgttagaagtgataacaagagatatgatggttaatgagattagagagctggctgagtttggtcatggtaataaggattcagttccaagaagacaactttttgctggttctggtacaaagcctgcaattgttttccctcctccggtttcagcacagtgggaagaacaggttatataagcaaattgttgattgcctgtattaccaagcgtgtgtcttagagtatattgtcttgtataacagtgttcacaaactccaatgtctacagattaagcgattgtaccttcttttgactgtgaaagaatctgcaatggacgtcccaacaaatttagaagct

SEQ ID NO: 4390 - DNA, 1191 bp, Zea mays
  Clone ID: 700355983_FLI
cgtacacatacccaagatgccaccccattgactcttggccaagaattcagtggctacactacacaggtcaaatatggaattgaccgcattaattgtacattacctcggatgtaccagcttgctcaaggtggaactgcagttggaactggcttgaacaccaagaaaggatttgatgccaaaatagctgctgcagtggctgaggaaacaaacctaccctttgtgacagcagagaacaagtttgaagctttggcagcacatgacgcttttgttgagagcagtggtgccgtaaatacaatttctgcatctcttatgaagatagcaaacgacatacgtttgctaggaagtggtcctcggtgtggtcttggtgaactaatcctaccagaaaatgagcctgggagcagcattatgcctgggaaagttaatccaacccagtgtgaggctctgacaatggtttgtgcacaggttatgggtaatcatgttggtgttacaattggtggtgccaatgggcattttgaactgaatgtttttaagccaatgatcgcagccggattacttcgatcattgaggttgttaggggatgcatccgtgtcctttgagaaaaattgtgtcaggggaattcaagcaaaccacaagagaatttcacaacttttgcatgagtctctgatgttagtgacatctttgaaccctaaaattggctatgacaatgctgcagctgttgctaagaaagcccacaaagaaggaaccacgttgaaggaagctgcattagaccttggagtattaacggagcaagaattccatgagcttgtcgtcccggagaaaatgattggtccttctgattgataaccccatgttcactatgtttctttgaagcattcaggttgccacatccgcgagttctggtggccctgtgtttccaagttaatgattctagcgcacccataaataaagcaaataatttttcatatggtcattaggtcctcaccgtaccgcactagagaaatgatttttgcatggcggatggtatctgagaaaacagttgtattcttgttcaaatagggagcagtgcactttgattcatgaggcgccttccattatcttggcatcagtcaaccttttcttgccaagtagctagtgctatgtaacaagtgacatggcaaccatgtatagaaattatttgcatgggtttgtgtt

SEQ ID NO: 4391 - DNA, 587 bp, Zea mays
  Clone ID: 700356015_FLI
ctcggccaaagctgactacagcctacaagcgaagcgctagaagagctcttcccgatagccatggccaagcccccgcttcaaacggctgcgatcatcctcctcgtactcctctcggccgcgtcgtgcctccacaccgtcgatgccgccactttagggttctgttggggcaagtgcagcgttcggtgcgcgggggcgaccgcgcggcaggcgcgagccgcgtgcatgagctcctgtggcctctgctgcgaggcatgcaactgcgtgccgcacgacatccatgactgcccctgctaccgcaacatgctcaccgccggccccaagaagaggcccaagtgcccctgagactgagactacgaggtcgactcacacggcggcatcaatgggactgcgactgctgcctgcaactgcgatccaatccatgctgggccagacaacctattatgttatggatccagatacttatatggttgttagatttttttgttattttgttgttagatttttggttttatttgtttggtagtgaataagtagaatgcaggatctactatgcatatttgtattttgtttttagcattgagctagtt

SEQ ID NO: 4392 - DNA, 2076 bp, Zea mays
  Clone ID: 700356023_FLI
gtgagaagaacacacaaaatgagggttcttgtagagaagctgttagtctctgtgtttttagcagcattctattcagggtgcatggtcgtgtctctagaatatgatcacacggcaagcatcgagtgccttggcgacccaatgaaacccttgtacaagggcggcattgtccagaacagcgagttcaacagcggactgatgggctggtcgacacaccggaacgtcaaggccggcgtgagcagatcgccgtccggcaacaagtttgcagtggtgcatggggcgggaagctacgtgagcagcagcggcaagctcctaccgtcccacagcgtgtaccagagaatccagatgcagagcgacaggcactactcgctatcagcatggctgcaggtgtcgaacggcacgtcggcacatgtgagggcggtgatcaagtcccccaacggcgaacgcgtcatcgctggtgccatcgttgcccagtcgggctgctggagcatgctcaagggaggcatgaccgcttactcttcgggacccgcagagatctactttgagagccacgcaccagttgacatctgggtggacagtgtctcgctgcagcccttcaccttcgacgagtgggacggtcacacccgccgctccgccgacaaggtccgccggcgaaccgtgaaggtggtcgccatgggcgccaacgacaagccgatggcgcatgccaacgtgagcatcgagctcctccgcctcggcttcccgttcggcaacgcggtcaccaaggagatcctcggcctcccggcatacgagaagtggttcacgtcgcgcttcagcgtggccaccttcgagaacgagatgaagtggtacagcaccgagtggacccagaaccatgaggactaccgcgttccggacgccatgatgaacctgatgcgcaagtacaagatcaaggtgcgcgggcacaacgtgttctgggacgaccagaactcgcagatgcagtgggtgaagcccctcaaccttgcgcagctcaaggcagccatgcagaagcggctcaagtccgtcgtgtcacgctacgccggcaaggtcatccactgggacgtggtgaacgagaacctgcacttcaacttcttcgagacgaagctgggccccatggcgtcggcacagatctaccagcaggtggggcagctggaccgcaatgccatcctattcatgaacgaattcaacacgctggagcagcccggcgatcccaaccctgtgcccgccaagtacgtggccaagatgaaccagatccgcggctacgccggcaacggtggcctcaagctcggcgtcggcctcgagagccacttcagcacacccaacatcccgtacatgaggagctcgctggacacgctcgccaagctgaagctgcccatgtggctcaccgaggtggatgtcgtcaagagccccaaccaggtcaagtacctggagcaggtgctcagggaaggcttcgcccaccccaacgtcgacggcatcgtcatgtgggcagcgtggcatgccaggggctgctacgtcatgtgcctcacggacaacagcttcaagaacctccccgtgggcgacctcgtcgacaagctcatcgccgagtggaagacgcaccgcgcgtccgccaccaccgatcacaatggggcggtggagctccacctgcccctaggcgactttaagttcaccgtaagccacccatctttgaaagccgctgctgttcaaaccatgaccgtcgacaattcggcgtcggcgtcccagcataccatcaacgtcaagtcctaggagacgacatcaggcactctgtggcggatctttaattaatttcttctttatttttcattctggtgaataaataggtcccaaagagagagataaaaggagaaggaaaggagacgtggcagcatggccacgttagtgattttttgttcggtgatttttttttgtaagctatatatagatagagagtagtcatttttaagttattaattatatagttgcaaatgcgcacgttaatggttgtcaatagctttgtcacatctatatggattcctagtaatacacataaacattacagatctttgaact

SEQ ID NO: 4393 - DNA, 2249 bp, Zea mays
  Clone ID: 700356052_FLI
gcgtcggatcggagcgagctcattctcaactcgactcaagagctctgcctcctccatcttcccttctctttctggacgttgagggcctccggggccacgctgagagatggaggcgaatccgaagaacaccttcacgatcaaagtggaggacgggaagcccgggaaggacggccggctggcggtcggaccggtgttccggagcgttctggccaaggatgggttcccgcagcttgagcctgacatgaagacatcatgggacgtgttcagggtagcagcagtcaagtatgccgacaaccggatgctcggatggcgtccgttcaaagatggagtgccagggccctacttgtggaaatcatacaaggagatctacgacgaggtgctgcaagcaggctctgcgttgcagaagctgggagtgcagccaggttcccgggtggggatctacggagcgaactgtcctcagtggatagtggcaatgcaggcttgcaatggctatagtctagtctgtgtcccactgtacgatactttaggtgcgggagctgtcgactacatcatcgatcatgccgagatcgatgttgtcttcatacaggacaagaaaataaaagagatactgtccccaaactgcaagtctgccaagagactgaaagcattggtggcgttcacttcggcgacaactgaacagaacaaagaagcggatcaaattgggatcaaaatgtatgcctgggacgatttcttgaaagtggggaaggataatcctcgtcaaccttgccctccgcaagcaagtgacatctgcactgtcatgtacacgagtgggacaagcggacagcccaaaggtgtgatgctgacccatgaaagccacgccatgtatgtgaaaggggtggacctcttcatggaccagtttgatgataagatgacaacagatgatgtcttcctgtcgtttctcccgcttgctcacatccttgaccgcatgatcgaagagtatttctttcacaaaggggcctcaattggctactaccacggagatctgaatgccttgagggacgacattgtggagctgaagccgactctactggttggggtgccccgagtgtacgaaaggatttatgaaggtatcttgaaggccattgcggaactcagacctctaagaagggtcatctttaatgctttgtacaaccgcaaactggcaagcatgaaagcaggctactcgcacaaaaccgcttcacctttcgcggacatgctggcttttcgcaaggtcaaggcaaggcttggaggtcgtcttcgcttactgatttcaggaggggctccgttgagtaatgagatcgaggagttcatgagagtgaccacctgtgcatacttcatccaaggctatggtttaacagaaacactgggacctagcactgtctgctacatcgacgacatggccctggtcggaagcgctggtgtgcctgccacctacaccgaaattcggctggaagaagtgcccgagatgggttataatccactcggcgttccttcgcgtggtgaaatctgcatccggggaaaatccctcttcgctgggtactacaaaagtccagaactcacaaacgaagccatcgttgatgggtggtttcatacaggtgacattggagagatgaccccagacgggatcttgaaggtgattgacagaaaaaagaacatatttaagctgtcgcaaggggagtatgttgcggttgagtacctggagaaagtttatggcttccctccactcgttgaagatatctgggtatacggggacagtttcagatcaagtttagttgcagtagtcaatccacaccaagaaaacacaatgaagtgggcagagtccaatggctacaagggttcttttgatgaaatctgcaaacttgaaggactcaaagagtacatcctgaaagagctggcagccgttgcgcagaagaacaagctacgaggcttcgagtacatcaaaggcgtagtgttggatcctgtgccttttgacatcgagagggatttggtgactgcaacaatgaagaagaagagaaagaatatgctgaactattaccagtctgagattgacacaatatacaaaaagctggaggcgcagaagagtgctgccagagctaagtgaagagatgtgccctattcgaccatcagctgaaaacaagggaaacgacaccgttgtaaatttcacattaatattgcgaagtaacaactcagggctatgagtaaggaataaaatgtatattgtgcctttgtct

SEQ ID NO: 4394 - DNA, 1415 bp, Zea mays
  Clone ID: 700356055_FLI
atggcgtgcacagacaatgcgatgagagccttgttcctcctggtcctcttctgcatcgtgcatggtgagaaggaagagtcaaagggcatcgatgcgaaagcgtccgggcctggtgggtccttcgacatcaccaagttgggcgcctccggcaatggcaagacagacagcacgaaggctgtgcaggaggcatgggcatcagcgtgcggcggcactgggaagcagacaatcctcatacccaagggcgacttccttgtcggacaactcaacttcacaggcccttgcaagggcgacgtgaccatccaggtggatggcaatctgctggcgaccacggacctaagccagtacaaggaacatggtaattggatcgagattctacgcgtggataacctggtcatcaccggcaagggaaaccttgacgggcagggcccagccgtgtggagcaagaactcctgcaccaagaagtacgactgcaagatccttcccaactcgctggtgatggacttcgtgaacaacggggaggtgtccgggatcacgctgctcaactccaagttcttccacatgaacatgtaccagtgcaagaacatgctgatcaaggacgtgaccgtgacggcgcccggggacagccccaacacggatggcatccacatgggcgactcatccgggatcaccatcaccaacaccgtcattggcgtcggcgacgactgcatctccatcggccctgggacctccaaggtgaacatcactggcgtgacctgcggccccggccacggcatcagcatcggcagcctagggcggtacaaggacgagaaggacgtcacggacatcaacgtcaaggattgcactcttaagaagacaatgttcggcgtccgcatcaaggcgtacgaggacgccgcctccgtgctcaccgtctccaagatccactacgagaatatcaagatggaggactcagccaaccccatcttcatcgacatgaagtactgccccaacaagttgtgtactgccaacggcgcctccaaggtcaccgtcaaggacatcaccttcaagaacatcactggcacctcctccaccccggaggccattagcctgctctgcactgccaaggtcccatgcaccggcgtcaccatggatgacgtcaacgtcgagtatagtggcaccaacaacaagaccatggctatatgcacgaacgccaagggcagcaccaagggttgcctcaaggagcttgcatgcttctagaccctcagtcgactgacccatctctctagttataatttttctctcgtccttgaattgtccattagttgctatccatttgtaacgcacaacagtaaaatgatagacatccaacagctatattatgttcgacggtgtaacaccctgaatttgagggtataaaatttcttctctaaatgccaagc

SEQ ID NO: 4395 - DNA, 1453 bp, Zea mays
  Clone ID: 700356094_FLI
cgagcggaagcactactccgagcgcgccgccgccaagctcgcccgcaccatcgtcgaggtcgtgcagctgtgccacgagaacggagtgatgcacagggacctgaagccggagaacttcctgttcgtgaacaagtcggaggagtcacctctcaaggccatcgacttcggcctctccgtgttcttcaagcctggagatcggttcaccgaagtggttggcagcgggtgttacatggctccagaggttctcaagagaagctatgggccagagatagacgtgtggagcgctggtgtcatcctgcacatccttctctgcgggttccctccgttttggggaggctccgatgagaaaattgcacagtcgatactccgtggggtaattaacttacagaaggatccatggcccaaggtctcccagagcgcaaaggatcttgtcacgaggatgcttgacccagatccttgtacacggttgacggcaaagcaagtccttgagcacccttggctcaagaatgctgataaggcttcaaatgtgtcactcggagaggttgttcggtcgaggctgaagcagttgtcgtctatgaacaagcttaagaagaaggcacttggagtcgtcgccatgaatttaccgatggaagagattggcaaattcaaagagatgttccatacaatggacaaaaacaaggacggtagtttgtcacttgaagagctgaaggagggtttccggataaacgatcatcctgttccagaggaagagataaagatgttgttacaagcgggcgatatacatggaactgacacattagattgtgaggaatttgtgacagtcttgcttcacattaaaaagatgagtaatgacgagtatctacctaaagctttcgagttcttcgacaaagacgggaatggttttattgaaatgtccgagttaatggagactctaagtgatggtgaactaaagcctgatgagcaattggttaacgacattattcaagaggttgacaaggataaggatggtcgcatcagttacccagagtttgaattgatgatgaaaagtggatcggactggaggaacgcctctagacgttactcaacagagaatttcagcagcctcagtcaaaaactgtgcaaagatactttatgaaacaagaaagtagtttccaagcagcaattactgactgaagtaccacaccctcaactaaacagcatcagaagacaacgcaaaagcaggattactggatctggtggaaataagggttgaaggagatcacatataccagttgcatgcttgacaaacttcgtcaactagcaagccctctggcattgtcctttgctctggaagtaaaatttactattccaatagaatacatgacttagacatagacagatgtaaaggatgccccagcatccatgcaatccactaaccaaaatttggcattttactactgtcaaatatataaag

SEQ ID NO: 4396 - DNA, 597 bp, Zea mays
  Clone ID: 700356141_FLI
gctgcgtcatcagccccgtcgtcttctggatcttctacaaggcgtacgacatcgggatggaggaaggctacccggcgccgtacgccaagatctaccggggcatcgcgctgctaggcgtcaacggctggaaccagctgcccaagtactgcctccgcttctgcctcgccttcttcctgctcgccgtcgccatctgcgcgctcaaggaggtggccaaggcgcggcggtggtgggtgcaggactacatcccgagcgcgctgggaatggcggtgcccttcttcctcggctcgttcttcaccatcgacatgtgcgtcggaagcatcgtgctgtacctgtggagcaagtcggaccgggtgagggcgcacatgttcgcgccggccgtcgcgtcggggctcatctgcggcgacgggatctggtcgctgccgtcgtccatcctctccctgatcaacgtcaacccgcccatgtgcctcagggtcttctccgccgacacaaactaccaggttgaggagttcctctggacgctgcgaaacccagccgccacataagaatagcctttccttgtcctgcttcttttctatattgtcgtcgtcgtcttccttc

SEQ ID NO: 4397 - DNA, 513 bp, Zea mays
  Clone ID: 700356152_FLI
agcaccgcacggagagcaagcaagaaagcaaccaccgcactgccactacctaacaatggcccgcgcctacgtgtttctcgtcgtgctcctcctggccgctgtcatcgtggcaccgttcgcgggagcgacgcgtgtcgacgtcgttgagggcaggtccatggcgtccgccgacgcgccggaggccgccgcaccatcacccgggcctgactccgcctcgtcaccggactcctcgtcggatgcgccctccagcagcagctcctcggactagatagctagccgctcgacgcacgatctcgctctccatctacacggcgatcgagttctagctttgtcggcatgcaatgcaaaattccgattcttcgggaataatcaagcaccaaaggaatgtgcttgcatcactcactactagtaccttgtttttatatatgtttcctctcctgacgctctccgattttaatcttcatgtatgcaacatatgtgatgaatggaaaaatcgatttgtatttgttagtc

SEQ ID NO: 4398 - DNA, 847 bp, Zea mays
  Clone ID: 700356187_FLI
ctcagaagctcgaaaccatcactgctgcatttaaatttacgtcaatgttacaagctccattgcatggttttgcattttggttcgatgttgagttcaatggaccagtacgccagaaatcgaagaagcaacctagtcaatcattggatgagaacacccaaaatgccagcccaagcaataggaagagaaaaccagatgtctctattgttctttcaactgcaccagaggatgcccctactcactggcagcagacccttttgtacttgtttgaacctatagaactaaacaaagatcagatcatagaaggctctgttactatctcccagagccagcaacatgctcgcttccttaacatctgcctgaaatactttactggcgaccaatggtatgtcaaagaatctgtgatgcgataatctgggggaaactgaaacatagtaaccttctttctgaataggctcaaatctgttttgtatgaaggacaaccttgctgctggtcattgcggtttaggagcattctgactgtactgggttgtcgtggtagcaaattgataaaaaatggagtgccatttcgagtgcagcttgatcaaaatggtagtgggcctcgacaagtaatatgtgaatctttggctccaaactcaaattgacgaacaaaacatagaacatgttgacaagagtagtaccgttttctttttttttttgttcttttgaataggtacaagctgctggtactttattccccataatagactgctcattcattgtaacgcttctgcagcgtgtagtgcagcatagacggtatgattttacaaatggtagcattgaatttttacgagtggagtttttgaagagt

SEQ ID NO: 4399 - DNA, 376 bp, Zea mays
  Clone ID: 700356188_FLI
cagtccctggagctcgccttcatactcgccgagaagcttaggaagcggaggatgcggcggtcgtcggtggcgtctgggctcggcggcagcatcttgcccttgccgccctttggcttttgatgtcttgcacgctggctgtgtgcatgcagggtgcagtgcaggggtgtggtaggagaatcttacgttgtcgtttgccttgctatgtagtatgtaatgctttaatttactgcattctacgtcgttttttcccttcttcttctatttgtttctttttgtacgtagctgcagctcataagagattgaataatactattgctgccacatatatagacggagttggctttgtgaattaataaagtccattgctgctgtcgtc

SEQ ID NO: 4400 - DNA, 559 bp, Zea mays
  Clone ID: 700356209_FLI
cacctatgatgagatcaaggctaccctctgcctcggccttgaccgcagccttgatctcatcataggtggcagacttctcaagcctaacagtcagagggtagcctcaagggcattctgggttatgtcgaggaggaccttgtttccaccgatttccagggtgacagcaggtctagcatctttgatgcgaaggctggcattgccttgaacggcaactttgtgaagcttgtgtcctggtacgacaacgagtggggatacagcacccgagtggtcgacctgatccgccacatgaacagcaccaagtaaatgaacaaactgatgaaagcatgcaaagagtgatgaaagcatgcaaagagagttgtgtttcttccccggaagtgcttccgagaataaatttttcttatctgattgtctaaaacctataattggtgtaatggtatcgtagtggttggttgagcattgagtgactcatattttgtcaggtctatgtgttatcgttaaacttttaacggtcattctatttcaaaagttttgcattttgcaatctttgacgctccatttc

SEQ ID NO: 4401 - DNA, 907 bp, Zea mays
  Clone ID: 700356235_FLI
gaccttgttagcaagagcattgctgtccagactgagattggaggagtggctattagaataggtgggatggctaaaggttctggaatgattcacccaaatatggcaacaatgcttggtgttttgaccacagatgctcaagtcagcagtgatgtctggagagaaatgatccggatgtcagtgagtagaagtttcaaccaaattacagtggatggtgatactagtaccaatgactgtgttattgctatggcaagtgggttgtctggtttatctggaattcaaagtcttgatagcattgaggctcaacagttccaagcatgcctagatgcagtaatgcaaagtcttgcaaaatccatagcatgggatggtgagggtgcaacatgcctaattgaggttactgtaagtggcgccaacaacgaggcagaagctgctaaaattgctcgttcagtagcatcttcttctttggttaaagccgctatatttggaagagacccaaattggggacgaattgcttgctcagttggttattcaggcattcaatttgacgcaaatcgtcttgatatttctctgggagttattccactaatgaaaaatgggcaaccactcccctttgacagattggccgctagcaagtatctcaaagatgctggagatgcccatggtacagtaaacattgatatatcagttgggagtggaggaggaaatggaaaggcatggggctgtgatctgagctacaaatatgttgaaataaatgctgaatatacaacatgagatttatatttgccatggagaaaaaaatcttgtaatgatgaatgggtgcgactaccgtcaggagaatgtagtttcgtgttgcaatggcagccttgcggatgtattatttcacgtgagatcaatcagaccaatatttcat

SEQ ID NO: 4402 - DNA, 1163 bp, Zea mays
  Clone ID: 700356246_FLI
gccccaggatcctgggtgatttcacagctttcgccgacttctgcttcaagacgtacggcgaccgggtgaagaactggttcaccatcaacgagccgaggatgatggcccagcatggctacggcgacggcttcttcccccccgccagatgcaccggctgccagttcggcggcaactccgccaccgagccgtacatcgccggccaccacctcctcctcgcgcacgctgccgctgtcaagctgtaccgcagcaagtacaaggttcgtcaggccggcaagatcggcatcctgctggacttcgtgtggtacgagccgctgaccaagtccgtggaggacgagtacgcggcgcaccgggctcggatgttcacccttggctggttcctgcaccccatcacctacggccactacccggagacgatgcagaagatcgtcatggggaggctgcccaacttcaccttcgagcagtctgccatggtcaaaggctcagcggactacgtcgccatcaaccactacaccacgtactacgccagcaacttcgtcaacgccacagagaccaactaccgcaacgattggaatgcaaagatttcgtatgagcgagatggtgtgcccattggcaaaagggcgtactcggactggctttacgtcgttccatgggggctctacaaggctctgatttggaccaaggagaagttcaacagccctgtgatgctcatcggagagaacggaattgaccagcctggaaatgagaccttgccgttcgctctgtacgacaagttcaggatagactacttcgagaagtacctgtacgagctccagtgcgccatacgcgacggtgcaaacgtcttcggctacttcgcgtggtcgctgctggacaacttcgagtggcggctcggcttcacctccaagtttgggatcgtgtacgtggaccggaacacgttcgtccggtaccccaaggactcagctcgctggttcaggaaggtcatcaagaacgagaactgaatgatcgatcggccggtccattattaaggaacgaactccatgcgtttctttttagctaggggtatagtagtgcgtgtagggggtgcatcgatcagtttggtcatttcaataaaatgcttgtagttgttgttttggacttcgaataataaaaatactacttcccttctc

SEQ ID NO: 4403 - DNA, 934 bp, Zea mays
  Clone ID: 700356259_FLI
gactcaccttttcaagttatctaggcatttcctatatatttaccacatataaaaattatactaaggcagtaacaaaagaggtgcctttatatctgacaaacagaagggagtgaaaaagtttagattacacctcagtttgcctgtggtgacaactatgtcaagtggcacttcgtccggatcgagccggtgggtccaaagttctagatccgaggatgacctagatctccaggcccagatggagaggaggagaaagcggaggaaggagtcgaatcgggagtcagctcggaggtctaggcaacggaagcaagaacaccttgacgacctcacctcacaggtaaatcagctgaaggaccagaacaagcagctcagcatggcactgagtataaccagccaaaaccttgtggcagtgcaagcgcagaactctgttctgcagacccagaagatggagctggacagcaggctgggtgccctgacggagatcctctggtacatgaactcaagcaccagcaccagcactgctcctacaaatccagccatagcgaacgacttcacagcatggagcagagcctctgatattcttggtggaaccagctacagcgccatagacctgtaccaatgcttctagctctaagctctagctctagaagagagaaggtggctgtggcatatgacatagtggtagggccaggaagaaaggaggcgggcaggcatcaagttctgttcaatcgtgtggggcctttgtgtcactgttgatgtgtgcagtgtgtgcttgatgcttctccctccactgtttattttcgaggcgacggcgatgttttggtttggtagagactcaaggacggacaaaatggcagaaagttgccttggctttgtgtgacgtaaatgcagttgttctccggtatttatatggcaaataatattgggccagctagtg

SEQ ID NO: 4404 - DNA, 1249 bp, Zea mays
  Clone ID: 700356463_FLI
agggagggttgttggagacagcctaaccccttctccatccgacggcggacaccagcttccctccgcccgcccacatccctgctgtgtgctgcgcctccccgcctgatcttgtcgcgcccgagagaccgcgcgctagggaacgtcggccgccggagcctggcctgcattccgggggcagcgagaggatgttgcgttgcgcatacacgcagcggcggtgggcgcaccgccgggggggcttcgtaaccggcagcaccggttggtccaagccgccaccgccgggcctcggccgcgccgcgggggttggtacgaagaagtcggagtggtggacggtggacggggagatgcacgagatcggggaaagcgtgccgcatcgcgagcgcttcgccatcccgcgggacaacctccctaaccgccgccgcaagcagatgcgggagcaattcatgcgccgcacccgcctcgttctcaaagactcggaacacgaaacatggtgcaaaaattacatggaattataccaagaacttagagaaaactgggaaaggttgtactgggacgaaggttattcaaaaaagattgccgaatctcatgctaattatgactctgccgaagaagatgatattgacttctcgccatacagcaggagaaggcagtccaatgtagaaccaaacaaggaccttggcttcggggtgaacaaacgaggtgaaacgtgggaaagggttactcaaattcgtgacaaatttgaatatgacagagaaaggagaatgagagaacgagcatttgctcccatgaacacggagaacaattatgctcggcgtgacccaagatttagaagccaggatgattcaagttttgctcatacgaacttgagtgatgattttggcttgcatggtcaaacttttggaaaccgttctgatcaaagttatgaaaatgagtcaaatttcaggaataagcgtgattcaagtttccaacatgaaccaagagacagaaaccagcgtaatttaaatatccaaaacgaaccaagtttcagaaaccaccgatatccagatttccaaaaccaaggtggcacaagaagtcagacatttgatgagtagagggtgaaaaaaaaagtggctgctgatttgctggcaacgtgagcatgctggttttgctgatttctgtggtggctcgtatgagatgttgtaatttattctaaaatgattggtgtaagaaactatctcttgtggtagctggttgcaacaaaatagaaaggaag

SEQ ID NO: 4405 - DNA, 1564 bp, Zea mays
  Clone ID: 700356467_FLI
cgtcttcgtactcgcctatctccgcgactcaaagcttcttccatttcctaccgccgccgctgcagctccaccccattccgtcgacaccatgagggagtgcatctcgatccacatcggccaagccggtatccaggtcggaaacgcgtgctgggagctctactgcctcgagcatggcattcaggctgatggtcagatgcccggtgacaagaccattgggggtggtgatgatgctttcaacaccttcttcagtgagactggtgctgggaagcacgtccctcgtgctgtttttgttgaccttgaaccaactgtcatcgatgaggtgaggactggcacctaccgccagctcttccaccctgagcagcttatcagtggcaaggaggatgcagccaacaacttcgcccgtggtcactacaccattggcaaggagattgttgacctgtgccttgatcgcatcaggaagcttgccgacaactgcactggtctccagggcttcctcgtcttcaacgctgttggtggaggaacaggctctggccttggttccctcctcctggagcgtctgtctgttgactacggcaagaagtccaagcttggtttcactgtgtacccatccccccaagtttcgacctcagtggttgagccatacaacagcgtcctgtccacccactccctcctcgagcacactgatgtggctatcctgctggacaacgaggccatctatgacatctgccgccgttcccttgacattgagcgcccaacctacaccaacctcaacaggcttgtgtcccaggtcatatcatccctgactgcctccttgaggttcgatggtgctcttaacgtggatgtgaatgagttccagaccaacttggtgccctacccgaggatccacttcatgctttcctcctatgctccagtcatctctgctgagaaggcctaccacgagcagctgtctgtggccgagatcaccaacagcgccttcgagccatcctccatgatggccaagtgcgatccccgccatggtaagtacatggcctgctgcctcatgtaccgtggtgatgtggtccccaaggatgtgaatgctgctgtggccaccatcaagaccaagcgcaccatccagtttgtggactggtgcccaactggctttaagtgcggtattaactaccagcctccaagtgtggtgcctggtggtgacctggccaaggtgcagcgcgctgtgtgcatgatctccaactccaccagtgttgtggaggtgttctcccgcatcgaccacaagttcgacctcatgtacgccaagcgtgccttcgtgcactggtatgtcggtgagggtatggaggagggcgagttctctgaggcccgtgaggatcttgcagcgctcgagaaggactacgaggaggttggtgctgagtttgatgagggtgaggaaggtgatgatggtgatgagtactagaagtatcctgatgctgtcatcgtcaggcttgtgtgctgctcttgtccccgttgtggtttgcaacacctgatgttgtaagactttctggttatgtccgccccgctttgccactgggttatt

SEQ ID NO: 4406 - DNA, 1435 bp, Zea mays
  Clone ID: 700356484_FLI
cacactgccactcatcacattggcacccctccgacacgggccgggacttctcggactgcaggcagccaggcacgcaccagcaacaccccccacccgccggctcggagcggggccccacccgaatcacacagatcgggacgccggaggaggagcaacgccgtcccgcatcaccggagcaacgcgggcgcggagaggccagccagcgcaggcgcagttcaagctttggattcccggatcccacaccaccggtctctctcggggagtgtaatccagcgagcgttgagttgaaagccgcgcaagtggagatgagtactctgaagaaatccgacaagaaggctgccctcgacttcgcagcatggagtttcaatgtcaccacatcggttggactcatcatggtcaacaaggccttgatggctacgtatgggttcagtttcgccacaacattaaccgggcttcattttgtgactactaccttgatgactatcttatttcgttggttaggcctgagtcagccatcccacttacccctagcagatctagttaaatttgtgatattttcgaacttgtcaattgttgggatgaatgtgagcttgatgtggaactctgttggcttttatcagatagcaaagctgtgcatgatacctgcatcatgtcttctggaggttgtatttgatcatgtacattattcccgggacacaaagctgagcataatggtcgtgcttataggagttgcagtctgcacggttactgatgtcagtgtgaatgcaagaggtctaattgctgctgttatagctgtttggagcacagctttgcaacaatactatgtccattttctccaacgcaagtactccctgaactcattcaacctcctgggccacacagctccagcccaagctgggtcactgctgctagtgggaccatttgcggattacttgttgacaggcaaaagggtggatcagttcagtttgtcatcgcttgctctgtttttcctggcactctcatgcttcatcgccattggtgttaatctgagccaattcatctgcatcgggcggttctctgccgtatccttccaagtcctaggccacatgaagaccgtacttgttctgtcccttgggttccttttctttggcaaggagggcctgaaccttcaggtagtccttgggatggtcctggccgttctcggaatgatatggtacgggaacgcgtctgctaaaccaggtggcaaagagcggcgcagcatcctgccggtgaggtctgcgagtctcaagggaagttccgaagaaaaggccggtgccgagaaatagtcttgctatatctgactgcaaactttttatttagatggggaatttttcgttccgaaggttaaatttctggtgaggtgacgcgagtatcacagattgggagctctgcattatgtctgacgcgcacaaaacaa

SEQ ID NO: 4407 - DNA, 998 bp, Zea mays
  Clone ID: 700356487_FLI
gttttcagagcagtccgatcggactcccagatgttcaagatctcagggttcacgctgtcgactgccatgccgttgtccgagacactccagcttctgcagctcggcaagatcccagcgaccgacttcgacgccctcatctgtggcagcggcagcgaggtgtactatcctggcacggcgaactgcatggacgctgaaggaaagctgcgcccagatcaggactatctgatgcacatcagccaccgctggtcccatgacggcgcgaggcagaccatagcgaagctcatgggcgctcaggacggttcaggcgacgctgtcgagcaggacgtggcgtccagtaatgcacactgtgtcgcgttcctcatcaaagacccccaaaaggtgaaaacggtcgatgagatgagggagcggctgaggatgcgtggtctccgctgccacatcatgtactgcaggaactcgacaaggcttcaggttgtccctctgctagcatcaaggtcacaggcactcaggtatctttccgtgcgctggggcgtatctgtggggaacatgtatctgatcaccggggaacatggcgacaccgatctagaggagatgctatccgggctacacaagaccgtgatcgtccgtggcgtcaccgagaagggttcggaagcactggtgaggagcccaggaagctacaagagggacgatgtcgtcccgtctgagacccccttggctgcgtacacgactggtgagctgaaggccgacgagatcatgcgggctctgaagcaagtctccaagacttccagcggcatgtgaatttgatgcttcttttacattttgtccttttcttcactgctatataaaataagttgtgaacagtaccgcgggtgtgtatatatatattgcagtgacaaataaaacaggacactgctaactatactggtgaatatacgactgtcaagattgtatgctaagtactccatttctcaatgtatcaatgtatatagaagttaacgtgc

SEQ ID NO: 4408 - DNA, 1091 bp, Zea mays
  Clone ID: 700356633_FLI
caatggtcccatagtccaagaaatgcatcactctctcaaagtaaaggatactatagtgaaagacatcgagatggtcgcttacacaacaatatgcccaagttttcgaaaggatctccacaagctcatgccaactttggagcaaaaggccgtccagcccaatcaaaatctccacgccatacctcttatcttgatgaattacctagaacacatggcgagaataaccaatttgctgcatcacgagtgcccaatgactggggaattgagaggcatggagcagatgccagttcaagtcttaggtttgacatgccatcccaccaacagaccttggaagaacttgagatggagtttaaaaaagaagctacacaattagctagagctcgtgaccaagaggaggatgaagagaactataggcatcgagagtcgctgagagtgattagagaaaattacatggagagagtgattaccatgaggactgtgcatgcaaggaagtgggaagaatttcttgacacctttaaaagtcaacaacaagcacagccttcatacatacaaaccggatatctaggttttgagcagagaacggcacatatttcagctacacatcaaccaatggattcgaagagcacatatccgtatgcttctgatagctattcagccccaaaggctcatgcagcatatggtgagtttcaacatgagaggcatgatgatcttgggagggcctataggcgatattagctgtgaatagtgggcgattttgtgaggaatcagtgtcaatggtgcgcttagacctacttatcacccattgctgttatgtagcttgaggaggtaagcattcatatataggcagaactgtctcccaattactttctttgcagcgtctacaaccgcaacggactgtggagctgtttcaggcatcgtaacaagctgctttccaatgaactaaactgaaatgctataaaaaacattgacctgtatgactgttttatctgcttggaaaaaatctccctgagttggcgtttatgtgaacctagtatttttttttgtcaaacctggcatatcactatgctgggcctatccgaatggttgtttgcatc

SEQ ID NO: 4409 - DNA, 1528 bp, Zea mays
  Clone ID: 700356672_FLI
caagcggcagagcgccccaaacaaaacccaactcatttttttttttcccagctcgcggaacgggcggcctcgttgcaacttgcagagacccagtcctctcgctttctcaccgcgattcgcctcgcttccatccgattcgattcgggagctagaggagagagaggagaggagaggcagtgatgccgctggctgagtcgcccccgtggcgccgcaaggccacagatttcttctccacgtccagtgtcaagctgaagcaggcaggccaatcggccggggataatatagttgatgttgctgggaaggttgggtccgtggtgaagagtcggtgggctgtcttccaagaggctaggcagcagcagcagcagcagcaacgtccgccgcatgagacagtgcaagagcgtatcatcactgctgctgcctccactggtttgcttttcaggaaaggcatttcagagacaaaggagaaggttgcagtgggaaaggtcaaagttgaagaggctgctaaaaaaactgcagataaaagcaagagtatcttgaacaatattgaacgctggcagaagggagtcgcaagcactgatgtgtttggtgttcctattgaagctactgtacaacgagagcaatctgatagagcggtgcccctggtgcttgtgagatgtgcggactacctggttatatcaggtttgaataatgagtacttattcaaatctgaaggtgacaaaaaagttcttcagcagttagtttctctttacaatgaagactcgggtgcatctttacttgaaggtgtaaatcctattgatgtaggtgcactggtgaagtgctaccttgccagtatcccggagccacttactacattttcgctttatgatgagcttcgagctgcgagggttagcattcctgatcttaggaacatattgaagaagcttccaaatgtgaactacatgacgctagagtttgttacagcgttgctgctgcgagtcagccgtaaatcatcacttaacaagatggactcccgcagccttgctgtggaatttgcgcctttgatcatgtggcggcaaggtgacactggcacagatttgcgtaaccacctcaagtttaccctgaaaccgcctccaaaaattgtggatacaacatcaaatgctgccacatgggacctgttagatgaggatgacgaggatgcttcatcccagatccccttagacgatgcttcaccaccagactacagctccattgaggttatccagtgtctgatcgagcatcacaatgccatcttcaccgacgcaaatgaaaccgtgtggagatgatcggcatctcctctagatctctctggtgttagatcgtgctattgtacaagttccaggtaggaaggtgggaaggtggattagcgctcgctattgttagggataagcattttggccggaatatttttgaagtaggtttgtatatacactagtgttaactgttaattctccacgggactagaaccgggtcatgccatatcaataaaaatatatttggatggatgtaaacg

SEQ ID NO: 4410 - DNA, 707 bp, Zea mays
  Clone ID: 700356675_FLI
aacaatccttgcacccctcccctgcgtcaccccaccatatccggccagcccaacgaaaatgtcgcgcgccacagctgcggtcctcttctacatcctcgccgtcgctgccctcagcgcggccgaggcaccggcagagtcaccgaaggcaggcagtcctgccaaggcaccggccgagtcaccgaaggcaggcagtcctgcagctcctgccaaggcacccgagtctgctgccacgagaactgcccccgctaaggcacctcaagccgcctccacccccgccgctgccgctgccccatcgtcgtcgtcgtctaggaagtctggtccagctgccgcgccgaccaccgccgcctctacaccgtcttcttccacggacgaggagttgagcccttcgccgtcggcatccaccgccgaggtggcgtcccctgccgctgatgggcctgctgagggaccggcggctgctgatgcctccggtgctgctacccttggaagcggagctgccatcgctggtgtcgccgctgctgtcgctaccatgatcttctactgagttcaccagggaccgtgtcgtcgagggtgggcacgtagttggctgtgcggtaattgctcgtctggtcgggagggaccaataacgcaagtgttgctttgctttgctcacttcgtttgctcttgtaactttatggggtcaaccgttatataactgaaacgatttgatt

SEQ ID NO: 4411 - DNA, 835 bp, Zea mays
  Clone ID: 700356773_FLI
atttggagatgttgttccaactaagctggagcagccatttatattgaggacgccagatatgtcagccatgcatcatgactcttcgcatgacctcaaaactcttggatctaaactgaaggatatagttggggtcgcagatacttccctggaagtaagatacattactcgtcacatctgcgaccttgtcgcagagcgtggagcacgcttggctgccgcaggtatatatagcatcctgaagaagataggccgggacaaagtaccaagcagtggcagtaaaatgccaaggactgtaattgccttggatggtgggctctatgagcattacaagaagttcagcagctgcgtcgaagcaactcttacagacttgctcggcgaagaggcctcttcctccgtggttgccaagctggccaacgatggctctggcattggagctgctctccttgcagcctcacactcccagtatggcgagagtgactagtcttgaaaaccggtgtggatcgaacttcgagtgtagctctcatgtttatctttttttcccttcaaaacatccctaatattccggctctcctcggggaatttttcggcttcctttcttggctattctgtggatgcacttaaggctctgcagcgggatatagctagtatagagccaatcagtttggaggttatctaatggcataagatttggacggcaggagcatagaaatggaagctgaacaatgccattcatgttctgcccaatttttcttccccttgcatggtgttgtaaaccaatcaaaaaatttaacctttttttttgtgttggcaataaagaggaggacacgataatttgacc

SEQ ID NO: 4412 - DNA, 1570 bp, Zea mays
  Clone ID: 700356819_FLI
caggacatatggtggtactggaattggattgagcatcagcaaatgtcttgttgaactaatgggtggtcagataaactttgtcagccgaccacatgttgggagtacgttcacatttactgcggttctcaaaagatgtgacagaagcgctattggtgacagtaagcctgttatgttgcatcctcttccatccagtttcaaaggtttatctgcactattggttgatagaagaccagtaagagctactgtaactaagtatcacttgcaaaggctgggaattgcctgtgatgttgttgctaccattgaactggctcttggtgtgctgtccgggagaaatggcagttccctaaccagtatgaagcaaccatgcatgttattgatcgagagtgattcatggggcttcaatattgatgtttctttacgatctagactcctggagatgaagcagaatggtcacacacatgtattacccaaaatcatccttcttgcagctgcagaatcgggcaaactcaaagaacactatgcagttgattctgtgatcacgaaacctctgaaagcaagcgcacttgccgcttgtctattccaaacacttggtatcaaacagtcaagcaacgagagaagtgacaactcaggttctctttacgggttgcttcttggcaagaacatattggtggttgatgacaacaaggtaaatcttagagtggctgctggcacgttaaagaaatttggagcaaaggtggagtgcgtggagagtggaaaagatgccctcgccctcctacaggtcccatataagtttcatctttgtctcatggacattcagatgcccgaaatggatgggtttgaggctaccaagcaaataagggcaatggaagcgaaggcaaatgagcaggcagtcgcctgtgacgattcagaaatagatggcgcgacaagggcagcaagatggcgcctgcctgttcttgcaatgaccgccgatgtcatccaggccacccatgaagagtgcacgaagtgcgggatggatgggtacgtcacaaagcccttcgaggagaagcagctcttccaggcgttgcagaagttcttggaccccggcatgtcctgctaacgccgaagtgatgcgttggagaccgtgcagcgcgggctgctcgtcgatcatgccagcggggaacagcaggcagacaaggcagcacgcaccacgggccttcgctggtctgcctgcctgtgcaggcgtcgtgtaaatgtattgtatttgcagggatactgtttacagcgctagtatgccccgtgccacaatgtccgagctacctgtggctgatgcacgttgcgcataggtggttttttttgtacagcttccaccatttttgtgctccagatcagaccaccgaaggaggcaagcatgctcgctggtgcagtgcagcactggaaggaaaacctgacttcctgagagtagatttttgctgtttaattgcattgggatttatgatgtattataatcagataaatgtgtgatgtaagctggcgtaattggcccaatgcatttccattgttatggatgagttgaaatggcattggttagact

SEQ ID NO: 4413 - DNA, 1482 bp, Zea mays
  Clone ID: 700356833_FLI
gggttcaaagcttgtcggatgtggatcagccatcccaacacttggcgtttcaaatgatgacctttcaaaaatagttgagacgtcagatgaatggattgcagctcgaactgggattcgtaacaggcgagttctttcaggagatgaaacattgcgggggctctcaataaaagcagctcaaagggcacttgaaatggccaaagtaaaagctgaagatgttgaccttgttctcctttgtacatctactccagatgatttgtttggaggtgccactcaggtgctgacggacgtggggtgcacaaaggcttttggatttgatattacagctgcttgcagtgggtttatagttggcttaatcacagctactcgttttatcaaaggtggaggttttcagaatatcctagtagttggtgctgatgctctttcaaaatatgtggattggacagacagaggtacatgcatcctttttggtgatgctgctggtgctgtgttggtacaggcatgcagcgctgatgaagatggcttgctaggtttttgtgttcaaagtgatggcaatgggcaaaaacacctaaatgccgcaacggcaaacgatgagtcaatcttgtccaataccaatggtgttcctggatttccgccaaagaaggcaacctactcatgcattcagatgaacggaaaggaagttttccgctttgctgtccgatgtgtgccacagtccattgagaaggcactccaagaagctggtttgcccgcctccagtatagactggttgttgttacatcaagctaatcagcggattattgatgcggctgccagccgattagatatcccgtccgacaaggttatttcaaatcttgccaactatggcaataccagtgcggcatccatcccgttagctttggatgaggctgttcgcagcggcaaggtgaaggctggcgatattattgcggcgtcaggttttggtgctggacttacctggggttcagctattgtcaagtggggctaattattcaacgtgaaccggaacaacacatcaatgagatagcttcaagctttcaaaggccttgggaggcctacatctgttggttctttccagtgtttttctgtgcaacatttttctttcgcatgtgccagttttccttgcacatgaaaatgcagtgcgccattttaccgtaatccatctgttccttaggctcattacacagttgagagagattgtaatgtagttggcagtagtttgagtggtggatgtaatgtaagttcttgaattttgcatggagataaatttggtggggttaaaagatgagatcacactgtaaagctaattggccttttgtctgggaactgtactgagcggtttccgatcttgtggccccaggcaataagcatgttacaaggagaattggaccgtggacgtatgctgtaggtcaattcttagtaattttgatctgtttttattatacaccattcttcgtgtatttttttttc

SEQ ID NO: 4414 - DNA, 1336 bp, Zea mays
  Clone ID: 700356834_FLI
agatggcatgcacaaacaatgcgatgagagccttgttcctcctggtcctcttctgcatcgtgcatggtgagaaggaagagtcaaagggcatcgatgcgaaagcgtccgggcctggtgggtccttcgacatcaccaagttgggcgcctccggcaatggcaagacagacagcacgaaggctgtgcaggaggcatgggcatcggcgtgcggcggcactgggaagcagacaatcctcatacccaagggcgacttccttgtcggacaactcaacttcacaggcccttgcaagggcgacgtgaccatccaggtggatggcaatctgctggcgaccacggacctaagccagtacaaggaccatggtaattggatcgagattctacgcgtggataacctggtcatcaccggcaagggaaaccttgacgggcagggcccagccgtgtggagcaagaactcctgcaccaagaagtacgactgcaagatccttcccaactcgctggtgatggacttcgtgaacaacggggaggtgtccggggtcacgctgctcaactccaagttcttccacatgaacatgtaccggtgcaaggacatgctgatcaaggacgtgaccgtgacggcgcccggggacagccccaacacggatggcatccacatgggcgactcatccgggatcaccatcaccaacaccgtcattggcgtcggcgacgactgcatctccatcggccccgggacctccaaggtgaacatcaccggcgtgacctgcggccctggccacggcatcagcatcggaagcctagggcggtacaaggacgagaaggacgtcacggacatcaacgtcaaggattgcactcttaagaagacgatgttcggcgtccgcatcaaggcgtacgaggacgccgcctccgtgctcaccgtctccaagatccactacgagaatatcaagatggaggactcagccaaccccatcttcatcgacatgaagtactgccccaacaagttgtgtactgccaacggcgcctccaaggtcaccgtcaaggacgtcaccttcaagaacatcaccggcacctcctccaccccggaggccgttagcctgctctgcactgccaaggtcccatgcaccggcgtcaccatggatgacgtcaacgtcgagtatagcggcaccaacaacaagaccatggctatatgcacgaacgccaagggcagcaccaagggttgcctcaaggagcttgcatgcttctagaccctccgtcgactgacccatctctctagttataatttttctctcgtccttgcattgcccattacatgctatccattggtaacgcacaacagtaaaatgac

SEQ ID NO: 4415 - DNA, 606 bp, Zea mays
  Clone ID: 700356845_FLI
gcagctgtgtacgacaaattgctagtggctgatgatttgcaatccttcggcgagcaactgaggaagaactatgaggagacaaaagagctactccttcaggttgctggtcacaaggacgtccttgaaggtgatccttatctgaagcagcgtctgcggctgcgtgagtcctacatcaccactctgaacgtgtgccaggcctacaccctgaagcggatacgcgacccgagcttccaggtgagcccgcagccgcccctgtccaaggagttcaccgacgagagtcagccggcggagctggtgcagctgaaccagcagagcgagtacgctccaggcctggaggacaccctcatcctgaccatgaagggcatcgccgccggcatgcagaacaccggctaggccaagatcttcggtgtgcaaataacctgtctcccatgagacggtggacgatatgtgtaggcctgtgagcagttagtacaccggcgccagtgtgttctggaggatttttcatgtcagagcctttctcttgtgtgcttgctgtagatgccaaggggagcttattggctgttgaagcctgatgcaaaataaagtacgaaactatgttttttgttt

SEQ ID NO: 4416 - DNA, 748 bp, Zea mays
  Clone ID: 700356858_FLI
aacttcaccttcgagcagtctgccatggtcaaaggctcagcggactacgtcgccatcaaccactacaccacgtactacgccagcaacttcgtcaacgccacagagaccaactaccgcaacgattggaatgcaaagatttcgtatgagcgagatggtgtgcccattggcaaaagggcgtactcggactggctttacgtcgttccatgggggctctacaaggctctgatttggaccaaggagaagttcaacagccctgtgatgctcatcggagagaacggaattgaccagcctggaaatgagaccttgccgttcgctctgtacgacaagttcaggatagactacttcgagaagtacctgtacgagctccagtgcgccatacgcgacggtgcaaacgtcttcggctacttcgcgtggtcgctgctggacaacttcgagtggcggctcggcttcacctccaagtttgggatcgtgtacgtggaccggaacacgttcgtccggtaccccaaggactcagctcgctggttcaggaaggtcatcaagaacgagaactgaatgatcgatcggccggtccattattaaggaacgaactccatgcgtttctttttagctaggggtatagtagtgcgtgtagggggtgcatcgatcagtttggtcatttcaataaaatgcttgtagttgttgttttggacttcgaataataaaaatactacttcccttctcaaatagttgtcgtccgctagttcatgtt

SEQ ID NO: 4417 - DNA, 1063 bp, Zea mays
  Clone ID: 700356904_FLI
gcccgaggaccgggctactgccgtccgccgcaagccccgtcctgcactcctgcatccgttcacgttttaccccgtccggccgtccccctcgttctttctctcccccttctctctcgctgcgacgactgggtaggctgccgccgccgccctacgccaggtcccgaggaccaaggcattcgtattcgtcagtctcttcgccgggcgacgccaggtttcggaatgatttgtgcaacaattgtaagcgtcctgggcattttgctagagagtgtcctagcgtggctgtctgtcatacctgcgggcttcctgggcacattgcagctgaatgttcttccaaaggtacctgctggaactgcaaagagcctggccacatggctaacagctgcccaaatgaagggatatgccgtaactgtggcaagtccggacatattgcaagagactgcactgctccaccagtgccgccaggagaagtgatcctttgcagcaactgctacaagccagggcattttcgtgaggaatgcaccaatgagaaggcctgcaacaattgccggcagagtggccatattgcccgtaactgcaccaatgatcctgtttgcaacctgtgcaatgttgctggccacctggcccgtcagtgccccaagtctgatacattgggcgagaggggtgggcctcctcccttccatggtgttggcgctcccttccgtggtgttggcgttcccttccgtggtggcctcagtgacgtgatctgccgggcctgcaaccagattggccatgcgagtcgtgactgcatggctggtgctttcatgatctgccacaactgtggcggccgtggccacacggcatatgagtgtccctctgtgagtctcattgagaggttcccacctcgccgtttctgaaggacgtccaagggctatccagatgactgttgttttcagcccattgtgtcaagaacactcatttccgttttcttttttttttccaaaccctaatggattctagatctttcagattcttaacttgtcagcactatttgtgattccctaatggattctagatatttcagatt

SEQ ID NO: 4418 - DNA, 724 bp, Zea mays
  Clone ID: 700356966_FLI
gctgttgcagttgcaggtggtgtctggtcgcttgcggtagccggtaggcgggttcgctgcgggtggtcggcggcgcgatggtttccttcgagatgaacgacctcaagaagattgggctgggcttgactggatttggagttctattcacattgctcgggatcattatgttgtttgacaagggattcctggcgatggggaatattctcttcgtttctggcgtcttactgaccattgggttgaagccaactgtgcagttcttcaccaagcctaagaatcacaagggttcaatatttttcgggtttggctttttcctggttctcattggatggcctgtctcaggaatgctggtggagtcgtatggcttcatcacgctcttcagcggcttctggccaacagctgctgtttacctgcaaaagagcccctccttcggttggatattccaccaccctcttgtgacttcgctgatcactcggttcagaggaagacgggtcccggtgtgagtggataggatcaccccgagggcatgcgaaatcgcctctactgtacagaagtaggccaattgacatatgcactttattcgtttatgttcgtcgattctacctggtttaaagagagactaaaaggtggccgctgttgctggtattggatcttcctacgctgctaccagtagtctgtccatagcgtaactacattgattgcaagagagcatctgtcggttgttaat

SEQ ID NO: 4419 - DNA, 789 bp, Zea mays
  Clone ID: 700357140_FLI
gaagccatgggcgcacgagcacgagcccgtggcgaccctgctggaggccgtgcagtccctgaagccgacggtgctgatcggcacctcgggcaagggcggcaccttcaccaaggaggtggtggaggcgatggcgtcccagaacgagaagccggtcatcttcgcgctgtcgaacccgacctcgcactcggagtgcacggcggagcaggcctacacctggaccaagggccgcgcggtgttcgcgagcggcagccccttcgacagcgtggagctggacggcaaggtgctggtgccggggcagtccaacaacgcctacatcttcccggggttcggcctcggcgtcgtcatctccggcgccatccgcgtccgcgacgacatgctgctggccgcctcggaggcgctggcggagcaggtaaccgaggagcacttcgccaaggggctcatcttcccgcccttcaccaacatccgcgccatctccgcgcgcatcgccgccaaggtggctgccaaggcctacgagctcggcctcgccagccgcctgccacgccctgacgatctcgtcaagtacgctgagagctgcatgtacacccccatctaccgcagctaccggtaaggaaaggaccatggccggggcggcggcctgagcaaaaggaaaggaaacgggtaaattatgagtcagtgagtgaataaagggtcgatgcgatatttgttgcagctagaggagtgagtttacacatactttcatttctatacactgtatttctgtgtaccgtatacggcataccatacaacact

SEQ ID NO: 4420 - DNA, 443 bp, Zea mays
  Clone ID: 700357430_FLI
gagagaaggaatccgatccatccaagccaagccaaggcagagaagaagaagaggaggaagaagaagcatcggcagcatgtcggaggggactgccaactgcgtggacatcctgatcgccatcatcctgcctccgctgggggtgttcctcaagtacgggtgcggccacgagttctggatctgcctcctcctcaccttcctcggctacatccccggcatcatctacgccatctacgccatcaccaagaacacctagctagtcatccttgccgacgacgatccatgtctctgtatctgtgtctgttcatatgcctgatgccgacttgtgctgtatgtagttgcttgaattcagtcgtgttcctgttttgctaccgtacccaccccatgcatcatctgtcaccgcgacgcaataatcatagtaataacaagttcagataatcgaattc

SEQ ID NO: 4421 - DNA, 2168 bp, Zea mays
  Clone ID: 700377412_FLI
ccgctcgccgaacagatcctctctggacgaacagaaaggttaccagcagcaccacggcgagatctccccttggcgggccaaaaccgacggcgagcttcaccggcgttggtcggctccaatctcttcgccgttttattttcctcccaggttaaggttgcaggcttttagcttgggattctgaaagatggggacctcttctggcgcgaatttccatcagcaacctcctccgacccaggggatgttgcctccaaggcatggtccacgcccctcagggttgcagacctcgctctcgctggcctcttcggagcaggttggctcgcctgacatgcaggagcctggttcaaactcggagccagggcatgattccgccactgagagcgccagttccaaagacacatggccagctgagccgaaccagagcaatggtggggtggctgccagtgatgttgtgagtaaggcggcggagaaggaggtggcaaatggtgtatccaagccgcaggttatccatggaccctcctcccgtgtgagtgggatgcttctgcgggaggttgcacgggagagggttgatctggtcgctgagaagatgaagatgatgtcggatgagcacctagaggaggtcaagaatgagctcaggtcgattctggagggcactggaggttctcaccacatcgaggagttcttgtacttgcagaagcttgtccaggacaggcatgatttgacaccatccatgctttcagtggcacaccatgtgcagcttgagatccttgttgcaatcaagactggaatacaggcctttctgcaccccagtgttaccattccacacaatcgcttggtggaggtcttcttgtacaagaggtgccggaacattgcttgccagagtgctctccctgctgaggagtgcagatgcaacgtgtgcgctagcaggaatggtttttgcaacctgtgcatgtgtgtcatctgcaacaagtttgattttgaggtcaatacatgccgttggattggctgtgatttttgctctcactggacacatacagattgtgcaattcacaatggccagatcggaatgggacaatcagtgaaaagcagcattggtcatgctgaaatgctttttaggtgccgagcttgccagaggacctcagagctgctgggttgggttaaggatgtcttccaacaatgcgctcctggttgggatagggatgctttgttacgcgagcttgagttcgtttgtaagatattccgtttaagtgaggatgcaaaagggagagtgttgttcaggaaatgtctagatctgattgaaaggctgaggaacactccagctgattccatcaatcctaggatgatactacaagcactccaagagcttgagatggactcccccaagatctctgaaaatgaagatgttgggcatctgatcacaccccaggaagcctgcaaccgcatagcagaggtagtccaagaggccgtgagaaagatggagctcgtggcagaagaaaagatgcgactttacaagaaggctcgcctcgccgtggaggcctgcgaccgagagctggaggagaaggttagggaagcccaggagctgaaggcagagcgtcagcgcaagaagcagcaggtggaggagctggagagcatcgtgcggttgaagcaggcggaagcggagatgttccagctgaaggcgaacgaggcccggcaggaggcggagcgtctgcagagcattgcgctcaccaagtccaagacagccgagcaggactatgccagcatgtacctaaagcggcgcctggaggaggcggaggcagagaagcagttcctcttcgagaagatcaagctgcaggagaatcagaggccaacggtcggcgtgggcagcagcagcggtgcgggaggggactccacgccgacgatgatgctatccaagattcaggatctgctcaagaacgtccgcagcatgccagcaaagtcggagggtcactagtcggagtaagagctttcgctgctgacactttcggtaattatgtgtgatctgctgacttgttcgagcagaggtgtaacgaaatcgtgtggtgctgtgagaaattcgaatcccttcgcgttactgtcggtactcgctaggcgtgctgatgtattaactctgttgtcgcaggtgatcatagtgtgcttgaaacaatgttaaagtt

SEQ ID NO: 4422 - DNA, 1038 bp, Zea mays
  Clone ID: 700377427_FLI
gtcgctggccacttcctcacgcgccagcgccaagaagtgcgatgacgtcaagagcaacggcaattgcggggactccggcgaggaggcaagatgcagggacggctgcgcctgcgcgccagaggagacgcagcagcaggggaagaggcaggcgcggcccgacccggagaaggacctgggcatcgtcttctccacgttcgaccacgacggcgacgggttcatcacggcggtcgagctcgaggagtcgctgcgccgcctcggcatcgcagtgtccgccgacgaggccgcggccatggtcgcgcgcgtcgatgctaacagcgacgggctcatcgacatccacgagttccgcgagctctacgactccatacccaagaagaggaagcaccagcaccccgtagccgacggtttcagcggggcagcaagggaggtgccggtggagggcgacgacgaagaggccgaggaggagagggacctgcgggaggcgttcgacgtgttcgacggcaacaaggacgggctcatctccgccgaggagctcggcaccgtgctgggctcgctcggcctgcgccgccagggcaacggccggaccgccgtcgccgattgccgcgacatgatacgcctcgtcgacagcgacggcgacggcatggtcagcttcgaggagttcaagcgcatgatggccgtcgtcaaggcctaggctgctcttcttcctcctcgcagatcaaatcaagtaccaaacttgagtagcgttatttcgttcttggatcggaaaagattaacacaccaggagatcgtatttgtttatggggggttttgaaagctgaagtagcttcttgatctgtgtttctcccctgttcttcaatctcgataacttgctctgcttttacactctgattctctcctactaccttttttagtccttggtactgttttcactgacagatattgatcagacatgtatgtaaatattacttcttgctcgctgtcaggtcagtctgtggaaaaaatgaacaactaaatgaatcaacgagtatgatttgttcattc

SEQ ID NO: 4423 - DNA, 1397 bp, Zea mays
  Clone ID: 700377436_FLI
gttgctcgtcgcgctaaaggtttaggaatgcatgtgattgcacatgatccatacgcttctgctgatcgggcccgtgcaattggagttgagctagttagtatggaggaggccatgacaactgctgacttcatctcattgcacatgcctcttacccctgcaacaaacaagatgctcaacgatgaggcctttgctaagatgaagtatggtgttcgcattataaatgttgcacgcggtggtgtgattgatgaagatgctctagtcagggctcttgattcaggaatagtagcacaggctgctcttgatgtgttcactaaagaacctccagctcctgataacaagttggtgctgcacgagaatgttactgtcacacctcaccttggtgccagcacagtggaggcacaggaaggagtggctattgagatagctgaagctgtcattggagctctgaaaggggaacttgcagcttctgcagtcaacgctccaatggttcctgctgaggtgctgtcagagcttgcaccttttgttgtgcttgcagaaaagcttgggcatttagctgtgcaactagttgctggtggtggtggcatcaagtctgtgaaagtgacctatgcatctgcacgggcccctgatgatcttgacacgagacttctccgtgcaatgatcaccaagggattgattgagccaatctccagcgtttttgtcaatcttgttaatgctgacttcaccgcaaagcagaggggagttcgcatcactgaggagaggatcatcttggacggctcacctgagacgcctatcgactacattcaagttcagattgccaatgtcaagtccaaatttcctagtgcgatatctgagactggagagatcacagtggaggggagagtgaaggatggcgttcctcatctaacaaaggttggagcattccaggtggatgtgagcttggaaggaagcctgatcctttgcaggcaggttgatcagccaggtatgattgggtcggtaggaagtgtcttgggtgaggagaacattaatgtcagtttcatgagtgtcggaaggattgctcctcgcaagcatgctgtcatggcaatcggtgttgatgaggaaccaagcaaggtcacactgagaaagattggggagattccagcaatcgaagagtttgttttcctcaagctttaggcaactaagcgcaaatgtatgtttcaagttgcaagcatgctgtgcaattttgatgtagcttagcaatatagaggacggatggttctccttaaataagcttttaggattatttttgtagtggcgctcttgaatttggtgcaatattgatgccatcttttgaacggggtgttattctcagctactgtttcccaggttataaaaaataatatgtactccacgttccaatc

SEQ ID NO: 4424 - DNA, 1008 bp, Zea mays
  Clone ID: 700377448_FLI
ggtacggccaccaccaccggccaggaagcaagctcaaaccctaaccgccggcgacgccagcacgatggcccgctacgaccgcgcgatcaccgtcttctcccccgacggccacctcttccaggtcgagtacgccctggaggccgtccgcaagggcaacgccgccgtcggcgtccgcggcacggacaccgtcgtcctcggtgtggagaagaagtcaacccccaagctccaggactccaggtccgtgcgcaagatcgcgtgcctggacacccacatcgctctggcatgcgcggggctgaaggcggacgcacgcgtgctcatcaaccgcgcgcgggtcgagtgccagagccaccgactcaccgtcgaggaccccgtcaccgtcgagtacatcacccgctacatcgctgggctgcagcagaagtatacacagagtggtggagtccgccctttcggcctctccacactcattgtcggcttcgacccctacaccgacaagccagcgctgtaccagaccgatccttctggtaccttctctgcttggaaggcgaacgccacgggaaggaactccaactctatgcgtgagtttctggagaagaactacaaggagacctccggcaaggagaccatcaagcttgctattcgtgcacttctagaggttgttgaaagtggtgggaagaacatcgaggttgcagtgatgacaaagaaggatggtctccgggaacttgaggaggctgagattgatgaatatgttgctgagatagaggcagagaaggctgcagctgaggctgcaaagaagggtggtcctagggacacctagtccctgtattgtggtattcctccctttgtgtgtcttgtttttatgttccatagcaccatcttaattgttttagaagaaggatgcttatatggctgtggctgccttgtgacttgtgtgggtctgtgggctgcggggtggttctaaagctctgcagccccgagtgtttatttattaattattgttgaggttgagag

SEQ ID NO: 4425 - DNA, 337 bp, Zea mays
  Clone ID: 700377471_FLI
attgctttgaacggcaactttgtgaagcttgtgtcctggtacgacaacgagtggggatacagcacccgagtggtcgacctgatccgccacatgaacatcaccaagtaaatgaacaaactgatgaaaacatgcaaagagtgatgaaagcatgcagagagagttgtgtttcttccccggaagtgcttccgagaataaatttttcttatctgattgtctaaaacctataacgggtgtaatggtatcgtagtggttggttgagcatcaagtgactcatattttgtcaggtctatgtgtcatcgttaaacttttaacggtcattatatttcaaaagttttgc

SEQ ID NO: 4426 - DNA, 1131 bp, Zea mays
  Clone ID: 700377482_FLI
gcggcgcctcccacgtctccagtccgacactccgactcactccccctcccccgccccaacccgtcgcaatggccgccgtctccgcagccccgaggccctcgatgcctccccgactcgccctccgtgcccacctcttctcctccgcctctccgctcccaatgcgcgcgctccccttactccgcagccgcttccgctccttgaccacggcctacgctgtcaagcaggacacggccctctggacccctgcacccgtctccgccatcagtgctgccaccgacgacggctccgtctccctcatcgccgtcgacctatctgacgccacggacctcgtggactcgtacacgaacccgggccaatacctcctgatccgcgtacccggcgaggagctcaagccggcgtacatggtcatctcttcgccgcctaaagcggggccccggttcgaattcctcgtcaaaagcgtgccgggagctaccgcggggcggctctgcgccctccgagacggggatgttgtggagctcggcgccgtcacggggaaggggttccccctcgacaggataaatccgcccgacgtcgcgcagaccgtgctcatcttcgcggcggggacggggatcagtgcgattcgatcacttattgagttcggtttcgctgccaaagaaagagctgatgtgaggctttattatggtgatacaagtctgaaatctatgtcataccaggaaaggcttagtaactgggagtcaactggaattaaaataataccagtcttatcacaaccagatgacagctggaaaggtgaacgaggatatgttcaggatgctttcttcagaaacaagaacatagtaaatccatcttctacaggagccatactttgtggaccgaatgaaatgcaggaggaactcaccttatcccttgtagcagatggtgtctcacgagacaaaatcttaacgaactactgaaagcgatctccggtctctgatgtattttatgaccagttaggcctcaacgtgtaaactttattgcttaggcctggctgtgatgttccagtgatatatgaataaactactgaacttgagacgaggatgtaatgttcagtgatatattatatgaataaactactgaatttgaggcgaggac

SEQ ID NO: 4427 - DNA, 1148 bp, Zea mays
  Clone ID: 700377574_FLI
aggaaacgaaatcggagcacaaacacacacacacacacagaccatggtgatggaggagacgatagacgacagtgagatgagcttgtcgaacatggtgctgggcttcctggaagatttcgagagggacgagcgacggccggagaacgacgacgacaacaacgaggaggagggctccagcggcggcgacaccgccgagagcaaggccttctggcagacccaacacttgcagctgcgcgaggcactggccaagggcagcccagccgagagcaggatccgcgcggacacggaggaggccgtcaagagcatgcgcgccgcggcctgctcctgctcctgcacggggcggcccgccgcccgggactgccggccgtgcatgctccggcacgtcgccgaccggctgcgcgacgccggctacgacagcgcgctctgcaaatccaagtggacgcgctcgccggatatcccttcaggcgagcacagctacgtggaggtggcggtgcagacgaggagcggcaagtccgtgcgcgtggtggtggagctcagcttccgcgccgagttcgaggtggcgcgcgccagcgccggctaccgcgcgctggtgaccgcgctgcccgaggtgttcgtcggccgggccgaccggctgcgcggcgtcgtcaaggtcatgtgcgccgcggccaagcagtgcatgaaggataacaacatgcacatgggaccctggaggaagcacaagtacatgcaggccaagtggctcggcacgcccgagcggggagcggcggcggtggcggcggcggagacgccggtggtggcggttccgtcggtgacggtcggctcgccagagaagcagaccaagttcagggcgtccatgctgaccttcgactttggccggaccgcgctggaggtcgcgtgatgaacgcacatacgctgccggtcgagcggcattagtagttctctaaatatagacagaggaggtaactttcgagaagaaaaaaaagttatatagagtgtacctgggttttaggtttttgtcaggattcagaaagctgaatctgtaatatcaatcgagctaggtgtaaacagataaggcgagcttgtcacgcgtactccgatcgcgtcactgtaatggaaatgaagctaaaagatcatgggtgtcggttcac

SEQ ID NO: 4428 - DNA, 1186 bp, Zea mays
  Clone ID: 700377579_FLI
gccaccccaagcaggagtctgcttccgttccattgcatcccagtcccagccaaagcaggatgccgcacgccaagacggactcggaggtgacgagcctggcgccgtcgtcgcctccgcggtcgcctccacggacccgcggcgccgtctactacgtgcagagcccgtcccgcgactcgcacgacggcgagacgatcaaggcggccacgtctgtgcactccacccccgcgctgagccccatggcgtcgccgcgccactcgcactcccactcccactcgtccatgggcagggactcctcctccagccgattctcgggccacggccacaacaagcgcaaggccgacaagggcggcagcaacaagggcgcgccgggcggcaaggggtggcaggagatcggcgtcatcgaggaggaagggctcatggacgaggaggaccacacgcggatcgtgccccgcaagtgctactgcttcctcgccttcctgctcggcttcgtcgcgctcttctccttcttcgcgctcgtgctctggggcgccagcaggtcccagaagccgcgcatcgtcatgggcaccatccgcttcgacaacttcatcatccaggccggcaccgacgcgtcgctcgtgcccaccgacatggccaccaccaactccaccgtcagattcacctaccgcaacaggggcaccttcttcgggatccacgtcaccgccgacccgttccagctctcctacagccagctcacgctcgcgtcaggagacctccacaacttctaccagcctcgcagcagcagccgcaccgtcagcgtcgccgtggtcggcaacaaggtgccgctgtacggcggcggacccacgctgacggcggcgccggcggccgggggcaaggggcagcagcaggccagcgccaaggtggcatcggtgcccatggtgctgaggaccacgctgcactcgcgggcctacgtgctgggcgcgctggtcaagcccaagttcacgctcgccgtcgagtgcagggtgctcatgaacccaaacaagcagaacaagcccatctcgctcgggaacgcctgccactactcatgatatatttagcctctcatactagctgctcaacatcaccatgcccatgcatccatctcctacctacctctcaattgtactgtaatggagtatttattgatttatttatgctttgcttcgtcttc

SEQ ID NO: 4429 - DNA, 1834 bp, Zea mays
  Clone ID: 700377609_FLI
tatgcctttctacgccgcgccgccgccatgtcctccccctcctcctacagccgcacaggctacccccgccctcgccgcggctactcgggaaggccctcgccgccgccgccgccgccgcccccggacgcggcctccgagatcgtcagcagggattaccatctcagtgccgtgcacgccgccaacgaatccctgcgtcgtggcggcggcggcgacatccgctggcctccaccgccatacaggcaggggcctcaccctcaccaaccgcactatggctatggctatggctacggatacggatacggccaaacgtggcagccgggtccatcctatgggtttgtgccgtacaactacggccacccgcagcagcagccgccggggcctcagtacggctacggggctccgaacccgtacgttcacgggcacctgcagccgcagccgcatgtgcgtggggcagcgagtccagggttccgtcctggcgcgccccagctgactccgaggctggcagattacctccgacggtggcgctttgcaaagcagaggccgccacatcaagctgggaggtttattattctatcatacaatatacttgcggactatctggcccaggagcaccgctttctttatgaaaaaatatcaccttttattttggattggaactggcgcaaggataagttactgtttgagttcggtctgtggtctccagacattctatgtcttcaggaggttgacaaatttacagaccttgaacaagaaatggcaagccaaggatataacggtacatggaagatacggactggagatgcagctgatggatgtgctattttttggagaacaacaaggttccagttgcgttatgaagaagacattgagttcaccaagcttggacttcgtgataatgttgcccagctctgtgttttagagtcggtgggccttcagtatgtgcaaactgactctgttagtttatctacaagttctaaccatccacaacaagctaaacaagttataatatgtaacattcacgttctttataatccaaagagaggggacatcaaacttggtcaggtcaggacacttctggataaagctaacgctctatctaagatgtggaatgatgctccagtgatagtttgtggagattttaactctacacccaagagtccattgtataattttatgttggggcaaaagttgaatttgtctggccttgcgagaaatactatatctggacagcaaattggtggtagttcacaggggctatatactggccctaatatatctgggtggacaccagaagaaatcaaagctgccactgggaaggatgaatgcactttcatgaaacacagtttgaaattaaggagtgtatatactgacgtcgaggattttgaaggaacaaaagacgccagcaaggaaccactggtgacaagctacaacagaaaattcatgggaacagtagactacatatgggcctcggagggtctgcatactgttaaagtcttggacacatttcccatagagattttgaaaaaaacaactgggttcccgaccaagaaatggggaagcgatcacattgcccttgcctgtgaattggcttttacaaaatgacgccttttatcaggcggagagggcgcctgcatagttgctagtgaccaaacacacctcaagagaaagaatactgtctacaggacgattaactgaaccaaacctcgctcttttagagctcgttaatttatttcatttttttttcgacacacctttttgaattgtgcgtgagtatggagaaccggagtacatcatttgggtccaattttagagcattgttcctgtttgattggct

SEQ ID NO: 4430 - DNA, 1366 bp, Zea mays
  Clone ID: 700377732_FLI
gaacttgataagatgctggaactggcacagtcaaacatgaaagaaatggaaaaacatattagcagtcttcaagaggaggtaaagggtcatcaagataaggccactgaccatcagcaaatagaagaatcgctgagaaacacaatctcagaactcaaggtggtacaagaggcactggagctgtcaaagtcacaagtggcagatttggaacagaagcttgcctcccaggatgctgatatcagtaaactaactgaagagttgaatctccattgttcgtctgaagaatcccttaaagagaataatcttaaactacagactgaacttactgctgcgcttgaggaactacaatcaaagcttttgagtttgcaggaaatggagacaaaacttgatgaacagtcaaaagacagacaaacaagtgaggctgcactagagaagcaaaatgaacagctacttatcttacaggctgggcttgacaacttgaaggatgaaaatgaaactctccaagggtcacttgctgatcttaattcaaaactttctgagaaagattccttgttgcatcaggcagaagatgagcttgctaaagcacaattggtactctcagaagcactgtcacaaaaaggagagttggagctgaatctgaactctctcaatgagcagcatggtgaatccaaagcttttggagaaaatgcaagtcagaagattattgagcttgaagcacaaatacaggcaatgcgtgcagctgaagaggcactcaacctagagctaaaagaagctgaggcaagtgtcaaagctgctgagaagaaaggctcagaccttgagcaacaactcagtgagattgagaataaattagttgcatcaagtgaagaaatagagttgctgaaagagcgtattcaacaagaagctgctgtatcagcagaaagaggaatgcagcttgaagaaacaatgaccagtgcagagggatacaaagaaaaaattaacgagctacaatgctccctagattcctcgatgtctaaaaaccagctacttgaacaagaagtcaaggagctgactgataaatgttcagagcatcaagaacaagcgcattcagttcagcaaagaagtctggagctggaagatctgcttcacacatcaaagactcatgctgaaggtgcatactctcggacacaggagttggagcaggagctgaacggcacatatgaaaagctcaagggggttgaagaagaacttgagcagtacaaaagcaaggcttcgcagctctctgatgatctagaagcttatcagacaaaagcagctagtcttgaagctgtggtggaagcagcaagcgagaaagagaaggagcttatggagtcattgagccaaataactgaag

SEQ ID NO: 4431 - DNA, 1606 bp, Zea mays
  Clone ID: 700377741_FLI
cgcgactcaaagcttcttccatttcctaccgccgccgctgcagctccaccccattccgtcgacaccatgagggagtgcatctcgatccacatcggccaagccggtatccaggtcggaaacgcgtgctgggagctctactgcctcgagcatggcattcaggctgatggtcagatgcccggtgacaagaccattgggggtggtgatgatgctttcaacaccttcttcagtgagactggtgctgggaagcacgtccctcgtgctgtttttgttgaccttgaaccaactgtcatcgatgaggtgaggactggcacctaccgccagctcttccaccctgagcagcttatcagtggcaaggaggatgcagccaacaacttcgcccgtggtcactacaccattggcaaggagattgttgacctgtgccttgatcgcatcaggaagcttgccgacaactgcactggtctccagggcttcctcgtcttcaacgctgttggtggaggaacaggctctggccttggttccctcctcctggagcgtctgtctgttgactacggcaagaagtccaagcttggtttcactgtgtacccacccccccaagtttcgacctcagtggttgagccatacaacagcgtcctgtccacccactccctcctcgagcacactgatgtggctatcctgctggacaacgaggccatctatgacatctgccgccgttcccttgacattgagtgcccaacctacaccaacctcaacaggcttgtgtcccaggtcatatcatccctgactgcctccttgaggttcgatggtgctcttaacgtggatgtgaatgagttccagaccaacttggtgccctacccgaggatccacttcatgctttcctcctatgctccagtcatctctgctgagaaggcctaccacgagcagctgtctgtggccgagatcaccaacagcgccttcgagccatcctccatgatggccaagtgcgatccccgccatggtaagtacatggcctgctgcctcatgtaccgtggtgatgtggtccccaaggatgtgaatgctgctgtggccaccatcaagaccaagcgcaccatccagtttgtggactggtgcccaactggctttaagtgcggtattaactaccagcctccaagtgtggtgcctggtggtgacctggccaaggtgcagcgcgctgtgtgcatgatctccaactccaccagtgttgtggaggtgttctcccgcatcgaccacaagttcgacctcatgtacgccaagcgtgccttcgtgcactggtatgtcggtgagggtatggaggagggcgagttctctgaggcccgtgaggatcttgcagcgctcgagaaggactacgaggaggttggtgctgagtttgatgagggtgaggaaggtgatgatggtgatgagtactagaagtatcctgatgctgtcatcgtcaggcttgtgtgctgctcttgtccccgttgtggtttgcaacacctgatgttgtaagactttctggttatgtccgccccgctttgccactgggttattaagaacgtcgttatggatggttgtctacattattgcttctcgatattggaaaactgttatgcgc

SEQ ID NO: 4432 - DNA, 726 bp, Zea mays
  Clone ID: 700377745_FLI
atccggagcagccgcagtcccaccgaccccgccgccggtcgccctccatctcctcgccgctgcctctcgtttctcttttcaataatcaagatgagccgtggtggtagtgccggtggtggtcaaagttctctgggttatctctttggaagcggtgagccccccaaaccagcagtggcaccagctgcaagtgctccacctgttgagaaaccatctgctgcaaagactgatgcggccaagcaggttgctgctggggttaccagccaaaccaataactaccacagggctgatggtcagaacactggcaacttccttacggaccgtccttcaaccaaggtccacgctgctcctggcggtggctcttccctgggctacctgttcggtggcaactgatgcccgtgctggtgcgctcaccaaagttatcctcccctgcctgctgcgtgctatgtctgaatcgtgaacaaccgttgtcatttcatgtgtgtaccccgtgcaatgctttgtgcgcatggttgatttctctgtggcaaacttcccgtcctgcatggggttgtaagctgtctctaaatttcacggcaagtcgtgtgcctgaaccttcatcttaagttgttgtcgtatcccttcgtcttgtttcggttgcaccccgtgatggtatggattggttgctgaccacttgatctatctattctgcattttcctttgaaatgtacccttgtgcatttggatgct

SEQ ID NO: 4433 - DNA, 440 bp, Zea mays
  Clone ID: 700377749_FLI
acctcggccagcgcgacaccaaggagtggacgtcggacgccaaggcgcaggaggcgttcaagcggttcggcgcgcggctgaccgagatcgagaaacgcgtcgtcaccatgaacgcggaccctcgcctcaagaaccgaaacggcccggccgagttcccctacacgctgctctaccccaacacctccgacacgaagggcgacgccgccggcatcaccgccaagggcattccaaacagcatctccatttgagttctgtctgagatgaggacgtacggtcgtcgcactagttgtttgcgtttccccgttccgttccgtgaagtgtggttctcacttgcgcggtattgtgcaaatagccaagtactccttacggaagtcgctacgtgaggactgttgtaataaggctctattcagttcctcaataatgaagttactttgtgtttc

SEQ ID NO: 4434 - DNA, 1728 bp, Zea mays
  Clone ID: 700377763_FLI
ggccggacggtggtggcatcgccaattcaactccgcatctgaatcggcactcggcagcgcgccagctccataggaggaggagatggcgctcacaagaatcggtcttgctggccttgcggtcatggggcagaaccttgccctcaacattgcagagaaagggttccccatctctgtgtacaacaggacaacctccaaggtggacgagaccgtgcagcgtgccaaggcagaaggaaaccttcccgtctacggcttccatgaccccgcgtcctttgtgaactccattcagaagccacgggtggtgatcatgctcgtcaaggccggcgcgccagttgaccagaccatcgcgacgctcgcagctcacttggagcagggcgactgcatcatcgatggggggaacgagtggtacgagaacacggagaggagggagaaggccatggaggagcgcggcctcttgtatcttggcatgggtgtctctggaggagaggagggtgcccgcaacggcccgtccttgatgcccggaggctcgttcgacgcttacaagtacgtcgaagacattgttctcaaggtggctgctcaggtccctgacagtggcccgtgtgtcacgtacattggcaaaggtggatcgggcaactttgtcaagatggttcacaacggaatcgagtatggcgatatgcagctgatttccgaggcttacgacgttctcaagtcggtcggtaagctcaccaacagtgagctgcaccaggtgttctccgagtggaacaagggcgagctcctgagcttcttgatcgagatcacggccgacatctttggcatcaaggacgagcatggcgatggctacctagtggacaaggtccttgacaagaccgggatgaaagggacagggaagtggacggtgcagcaggccgccgagctgtcggtggccgctcctacgatcgaggcgtccttggactcgaggttcctgagcgggctgaaggacgagcgggtggaggcctccaagatcttccagggtgactactactccaccggctcgccggtggacaaggcgcagctggtggaggacgtgaggcaggccctgtacgcgtccaagatctgcagctacgcgcagggcatgaacatcatcaaggccaagagcgcggagaaaggctgggggctcaacctcggcgagctggccaggatctggaagggcgggtgcatcatccgcgccatcttcctggaccgcatcaagaaggcctacgacaggaacccgggcctcgccagcctgctcgtagaccccgagttcgcgcaggagatcatggacaggcaggcggcgtggcgcagggtggtgtgcctcgccatcaacaacggcgtcagcaccccgggaatgtccgctagcctggcctacttcgactcctaccgcagggacaggctgcctgccaacctggtgcaggcccagagggactacttcggggctcacacctacgagagggtcgacatgcctggctctttccacaccgagtggttcaagattgcgcgcaacatctccaacaactgatgagctgctcaacggatggcatgcccggtgttgactactccagtcggtaatgagatttcctgcaggaacttgtctattgatctttgtaagttaattatttatatgaataaaataagagcaaacatgcttgtgtttgggcaccctctgttttctcctccctgttaatcaatgcaccatgctccaaaggtgatgtacat

SEQ ID NO: 4435 - DNA, 979 bp, Zea mays
  Clone ID: 700377772_FLI
gtacatacaaaaccctggatcagccagcgttccattccaacgacagcacagcaccgcagagcaagagcgcaccagcacgacacagccaagctccactccaccgacacgctgcgctcgagcccgcccgagccgcccgctagatccatggcgcggctgctaccgacggccgcggcagcggccatcgtggccgccgtcctggtggcgggcctgccgggcgcccgggcggcgtctgcctcgccggcggcggacgacgcgccgccgtacaggaaccacaccgttggcggcggcgatgggtggttcttcgacgccaacaccaacgcctcgtccgggaactactccgactgggccgccggcgagaccttctacctcggtgactacctcattttcaagacgaacgacaactcgtcggtggtgcagaccaccaacgccacgacattcgggctctgcgacgccagcgacgacctggcggagacgacgtccatctacggcggcggcggcggcgggggcggcggcctcgagcagaacagcaccatcgcggtggcgctcaccgccgagggcgccaactacttcttctccgaggccgacgggggcgcgcagtgccagcaggggatgcggttcgagatcaaggtcgagcacggccggggcctgccgccgtcgctcctgcaccagccgccggcgcccaagggccgcgtcctcgcgccgccgccggcgggcacggcgttctcgggcaccggcggggtcgagcccggcgacggcgccggggacaacggcggcgctggcaggagcggcgcgtgcagggcggcggcggcggccagcgcccggttattgggggtggtggctgctgctgctgcggctctggccgttttggttctttgagtagcgatggtttaaaggcattcgtcatttggaaccactgttctgcttatgtatgtgtctgtatttaaattcatcatttaatggagatttgtgttcgatgctt

SEQ ID NO: 4436 - DNA, 701 bp, Zea mays
  Clone ID: 700377774_FLI
gagagttggcatcatctaccttgtctctggcgtcggaggcagcgtgctttcgtctctgttcatccggaacaacatctctgtcggcgcttccggagctctgttcgggctccttggggccatgctgtcggagctcttcaccaactggaccatctacgcaaacaaggctgcagccctggtgaccctgctggtcgtcatcgccatcaacctcgccatcggcatcctcccgcacgtcgacaacttcgcgcacatcggagggttcctcaccggcttcctcctcgggttcgtcttcctgatgcgcccgcactacggctggatgcagcgctacgccctgccctccgacgtcaagtacaccaccaagaagtacctggtctaccagtgggctctgctggccgtggcctcggtcctcgctgtcatcgggttcgccattgggctggggatgcttttcagaggagtgaacgcgaatgatcactgcggctggtgccactacctcagctgcgttccgacctccagatggagctgtgggaagtgaagatcggcgtgctgacaaaatggactgaagccaggagagagcccatggccgcccatggggccttttcgagcaagcatttccatgaatagatagatatatagctcgcacagtcttactgtacataatgtcaccaggatgtggtttatatatgacattattttgttatctgatt

SEQ ID NO: 4437 - DNA, 988 bp, Zea mays
  Clone ID: 700377791_FLI
gccgccaccaggtgcagagtctttcgtcatctcttctccggcgaagaacccccagtcgcccaccagatcacttgttaaactttgttgaggggtgatggcggtttctttcgcaaacctcagctccgaggcagggcttaaaaagcttgatgagtaccttctcactcgcagctacatcactggctaccaagcttccaaggatgacttggctgtctacacttcgttttcgtctgctccctcgtccaagtatatcaacgtagcaaggtggtttaatcacattgatgcgctcgtgaggctgagcggaattactgcagagggccaaggtgtgaaggttgaatcgtcagcagttccttcagccccaactccagatgttgctgaagcacaggccccagttgctgaggaggacgacgacgatgatgttgacctttttggtgaggagaccgaagatgagaagaaggctgctgaagagcgtgctgcagctgccaaggcttctggcaagaagaaagaatctgggaagtcatcagttttacttgatgtgaagccatgggacgatgagactgacatggccaagctcgaggaagctgttaggagtgtccagatggaagggttgctctggggcgcatccaagcttgtcccagttggatatggtatcaagaagctgcaaatcatgatgaccatcgtcgacgaccttgtctctgtcgacactctcattgaggactatctgtgcgctgagccagttaacgagtacgtacagagttgcgacatagttgccttcaacaagatctaggcgtgactttcgatcagtccttcccctggggtgctggcgatggtggtggctgggcaatgcaccagcctaatttatccatagctatatgtctgctttgtgtggccagtgatattgccgtgagtatttttggatcctattcgagtcgaatgtaccagtaccagagttaatttgctttaattcgaaacaccgttccagttggaattc

SEQ ID NO: 4438 - DNA, 311 bp, Zea mays
  Clone ID: 700377840_FLI
gagggaactatgttgcaggagttgccctgggcagatgcgttgagggcgcgtatgaaagtgcctcgcaaatatctgacttcttgaccaagtatgcctacaagtgatgaaagaagtggagcgctacttgttaatcgtttatgttgcatagatgaggtgcctccggggaaaaaaagcttgaatagtattttttattcttattttgtaaattgcatttctgttcttttttctatcagtaattagttatattttagttctgtaggagattgttctgttcactgcccttcaaaagaaattttatttttcattctttt

SEQ ID NO: 4439 - DNA, 528 bp, Zea mays
  Clone ID: 700377842_FLI
cgagttcatgctgtggcggtgctgttcttggaccacctcgtccacagcatgaactcgagcgcggcgacggcgacgaggaggacggccaggctgaagccgtatccgatcttccatgagctgtcggcgccgccgacgtggatcccgagcacgatgttgacgaggtggtccaagaacagcaccaccaccccgacgtactaggaacctgctgctgcacgtaccttgttgtttttccggggtcggatgatgttttgtgtttgcctttgaccttgtttttttttgttgttggtggtggtggtgtatctatatgatatatcctttggaactgcctgcaatcgcgtcagcgtgcgttcaggcaagtgcactgccactgcccgtagttacttcgttcagcacgcctggtggtgtagtggtttctctatgattctttatttgccgaggcatgttatagccgtgtctgatatttggcgacctcttcatgactgccgcctttgcagagtggattttctccacacatgtacatgtggccat

SEQ ID NO: 4440 - DNA, 1726 bp, Zea mays
  Clone ID: 700377868_FLI
cctgctcctgccctcggtttctgatcagcgaacatgggaacccgcggcgtcgccctgctgctcctcgcggcggtgctgctcctccaggcgctcctccccgcgtcgtcggagggcctggtgcgggtcgcgctgaagaagctgcccgtcgaccagaacggccgcgtcgccgcgcgcctctccgccgaggagaggcagcgcctcctcctccgcggctccaacgctctgggctcaggcggcgacgacgactccgacgtcatcgcgctcaagaactacatgaacgcgcagtactttggggagatcggcgtcggctcgccgcagcagaagttcaccgtcatcttcgacaccggcagttccaacctctgggtgccgtcctccaagtgctacttctcgatcgcttgctacttccactcgcgctacaagtcagggcagtcaagcacttacaagaagaacggaaaacctgctgccattcgctatggaactggttccattgctggttttttcagtgaggatagcgttacattaggtgatctggttgtgaaggatcaggaatttattgaagctacaaaggagccagggcttaccttcatggttgcaaaatttgatggcattcttgggctaggctttcaagaaatctctgttgggaatgcaacaccagtgtggtataacatggtgaaacaaggtctcatcagcgaccctgttttctctttctggtttaaccgacatgctgatgaaggagaaggtggtgaaattgtgtttggtggaatggattctagccactacaagggcgatcacacgtttgtcccagtcactcggaagggatactggcagttcaacatgggtgatgtcctggttgatggaaagtccactgggttttgtgccggtggctgtgcagccatcgcagattctggaacttccttgcttgctggccccacagccataattactgaaatcaatgaaaagattggtgctgctggtgtagtcagccaggagtgcaagactgttgtttctcaatatggacagcagatcctagatcttttgctagctgagacacaaccaacgaagatctgttcccaggttggtctgtgcacttttgatggcactcatggtgtcagcgctggaattcggagcgtagtggatgatgaagctgggaaatcaaatggtggtctcaagagtgatccaatgtgcaatgcctgtgagatggctgtggtatggatgcagaaccaacttgcccagaacaagacacaggagctcatcctgaactacattaatcagctttgcgagcgtcttccgagtccgatgggagaatcagctgtggactgtggcagtcttgcgtccatgcctgacattgcgttcaccattggaggcaagaagttcaagctgaaaccagagcagtacattctgaaggttggtgaaggacaggctgcccagtgcatcagcggattcacagctatggatatcccaccaccccgtggccctctctggatcttgggtgatgttttcatgggagtctaccacaccgtcttcgactatggcaagctgagggttggcttcgcagagtcgacctagggatatggtttggcagcaacccgtccagaggcaaacgcgtaatttgtgtgtttatgcgaccggcgatgtgtgtatatatgctactacatgtttagtcatgctttccgagacctgagacaacgcccgtctgttttaacgtggcgcaagaataattatggtt

SEQ ID NO: 4441 - DNA, 1651 bp, Zea mays
  Clone ID: 700377885_FLI
cgcagagataggcgtcttcgtactcgcctacctccgcggctcaaacctttcccccttctcccaattccctccgtcggccgccgctccatcccgtacgacgacaccatgagggagtgcatttcgatccacatcggccaggccggtatccaggtcggaaacgcgtgctgggagctgtactgccttgagcatggcattcaggctgacggtcagatgcccggtgacaagaccattgggggaggtgatgatgctttcaacaccttcttcagtgagactggtgctgggaagcacgtgccccgtgctgtttttgttgaccttgaacccactgtcatcgatgaggtgaggactggcacctaccgccagctcttccaccctgagcagctcatcagtgggaaggaggatgcagccaacaactttgcccgtggtcactacaccattggcaaggagattgttgacctatgccttgatcgcatcaggaagcttgccgacaactgcactggtctccagggcttcctcgtcttcaacgctgttggtggaggaacgggctctggccttggttccctcctcctagagcgcctgtctgttgactacggcaagaagtccaagcttgggttcactgtgtacccttccccccaagtttctacttcggtagttgagccatacaacagtgtactgtccacccactccctcctcgagcacactgatgtggctatactgctggacaatgaggccatctacgacatttgccgccgatcccttgacattgagcgcccaacctacaccaacctcaacaggcttgtgtcccaggttatctcatcccttactgcctccctgaggttcgatggtgctctgaacgtggatgttaacgagttccagaccaacctggtaccctacccgaggatccacttcatgctttcttcgtacgctccagtcatctctgctgagaaggcctaccacgagcagctctctgtggctgagatcaccaacagcgccttcgagccatcttccatgatggccaagtgcgacccacgacatggcaagtacatggcctgctgcctcatgtaccgtggtgatgtggtccccaaggatgtgaatgctgctgtggccaccatcaagaccaaacgcaccatccagttcgtggattggtgcccgactggcttcaagtgcggcatcaactaccagcctcctagcgttgtgcctggtggcgacctggccaaggtgcagcgtgctgtgtgcatgatctccaactccaccagtgttgtggaggtgttctcccgcatcgaccacaagttcgacctcatgtacgccaagcgtgccttcgtgcactggtacgtcggtgagggtatggaggaaggtgagttctctgaggcccgtgaggacctggcggcgctcgagaaggactacgaggaggtcggcgctgagttcgatgagggcgaggatggcgacgagggtgacgagtactagagaagtttgctgatgacgcagcatcaggccagtgtgctgcccttatcccgtgatctgccgtgagttgctcctgctatcgtgttatgtgtgtctgttctgaagtattgtgtggtttacaacacctgatgttgtaagagttgttaattcccctgcattgctaccgggttattgagaataattatggctgttt

SEQ ID NO: 4442 - DNA, 816 bp, Zea mays
  Clone ID: 700377920_FLI
gggaattggagctaattgacgatgacaagaatgaagaaatgcctttgtcagttcttcaggtaaatgctatgagaaagttggggtcggtggaagaggtgcctgtcccgctcttcccgtccaagggtcttcggttgaagcaaaagattaaggactggttggaagggttccagaggctcccttatgtatctccatatgagaatttcagccacatcaatccgggtagtgatgtttcagagaagcgggcagtcggggtgctccatgagctgcttagtctgtttgtgacatgctctgctgagaggcgacggttacgctgcctgcggcagcacctagggctgccacagaagtttcatcttgtgttcgagcggcaccctcatgtgttctacttattgttaaaggagaagacatgctttgttgtcctcaaagaggcctacatagctggagaagacactgcaattgaggcgcaccccatgttggaagtgttcaagaagtatgttgagttgatggagcagtcacgggaaatcataagatgtcgacggagcgggaagcctattgaactagagtccaaggcatgcggggatagctgagaagaaggatgggaatacatgtgcaaatatgacctctataacaagaatgtggatatgtactcttggtaggagctagtttatttctcattatttgcagagaaatacatcaagtgctgaaacagcttggtgactatatttaatctgcattcttaatttccagttgttcattacttgactgtgtactattgatgtcttaatcacacaatagtttcgtcagagatttctgatttcc

SEQ ID NO: 4443 - DNA, 878 bp, Zea mays
  Clone ID: 700378020_FLI
caacggcgagctgtaccgctacatctgcgacaccaagggcgccttcgtgcagcctgctttctacgaggctttcgggctgacggtggttgaggccatgacctgcggcctgcccacgttcgccaccgcctacggcggtccggccgagatcatcgtgcacggcgtgtctggctaccacatcgacccttaccagggcgacaaggcgtcggccctgctcgtggacttcttcgacaagtgccaggcggagccgagccactggagcaagatctcccagggcgggctccagcgtatcgaggagaagtacacctggaagctgtactcggagaggctgatgaccctcaccggcgtgtacgggttctggaagtacgtgtccaacctggagaggcgcgagacccggcggtacctggagatgctgtacgcgctcaagtaccgcaccatggcgagcaccgtgccgctggccgtggagggagagccctccagcaagtgatgcgtgacggcggccacagacctgatcgatcgatgagcgagagggagcactcggagtgtcgtgtcttttcccttgccatttctttctttcttctttttccttcccggaggcgaaaaaaaaagagtctgcttttgctaggcggcgggcgttcgttgctgctctttgcttcaagagttaaatttacctaccttgtcaaggtcttgttccatcattgatccgggtgtcgcttttagtagtctgatggactgttagtagtttgcgttgcgtcggttgagagggaacggtggtggtggtggtgtgtgtgcagtcgggtgtggtgctccctttgtttcctggatggaatgttgctccttgaataataatcgtagtggccttggagcccttttcctgaaac

SEQ ID NO: 4444 - DNA, 859 bp, Zea mays
  Clone ID: 700378024_FLI
cggcggagcaaacgcaggcgaaggcgagggtgtgagggaaggagcaccagccatggtgcacgtcaacttctaccgcaactatggtaagacgttcaagaaaccaaggcgtccttatgagaaggagcgtcttgatgctgaactgaagctggtcggtgagtatgggctgaggtgcaagcgtgagctttggagggtccagtatgcactgagcaggatccgtaatgctgcaaggcacttgctcacccttgacgagaagaacccccgtcgtatctttgagggtgaggcgcttcttcgccgcatgaaccgctatgggctgcttgctgagggtcagaacaagcttgattatgttcttgccctcaccgctgagaacttcctcgcaaggcggcttcaaacacttgtcttcaaggctggcatggccaagtccattcaccatgctcgtgtcttgatcaagcagcgtcacatcagggttggcaggcaaattgtcaacgtcccatcattcatggtgagggtggagtctgagaagcacattgacttttcactgtcaagcccattcggtggaggccccgcaggaagggtgaagagaaagaatcagaagaaggcaagcggtggcggcgatgctggcgatgaggatgaggagtgaggatggacaagtagcgttacccaatataataatattatctagttttcttgaacttgttcgaatgatgagtgcttagctgtgtgatctgacgcagagttccctgtgctgactctgtgtcatggatggtccattttatcttgtggtattatcagcctttacataactgctatgtttggatatgttcaattctgttgcaattttatgtggttgttttttgcgttt

SEQ ID NO: 4445 - DNA, 1474 bp, Zea mays
  Clone ID: 700378034_FLI
gcaccagaaacagaaaggtagtagatcaaggaacgccagtgcggcgacaatgaccggcagtggaagcacgggcgccaatggcaagagccagagctccagggccaaggcaatgctgctcgccttgggcaagagctttcctgaccaagttctgcctcaggagaaggttgtggagagctacctccaagaaagcagctgcgacgatcccgccaccagggccaagcttcagcgcctttgcacgactacaacagtgaagacaaggtacactgttatgtccaaggagctattggataagcacccagagctgaagatggagggtactccgacactgacaccccgccttgacatctgcaatgccgcggtgatcgaccttggtgctgccgcagctcgcgctgcccttgacgaatggggtcgccctgcagctgatattacccacctcatctacatctcatcaagtgaccttcgtctcccagggggcgaccttcacctggctgctcgccttggccttagcccaaacaccgtgcgcacttcccttctcttccttggctgctccggtggtgctgctgccctccgcactgccaaggacattgctgagaacaatccagggagccgtgtcctagtaacagctgctgagaccactgtgctaggcttccggccaccaagttatgaccgtccttatgaccttgttggtgctgcgctgtttggtgatggtgcatcagccgtgattataggagcaggtcccatgacaccagcagaaaatcctttcttggagcttgagttctccacgcaggagttcctacctgggactgataaggtaattgatggcaaaatctcagaggaaggaattaattttaaactagggcgtgatttgcctgagaagattgaaagccgcatagaaggtttctgcaggactctcatgaacaaggtagggataaaggatttcaacgatatattttgggctgtgcatcctggtggaccagcaatattgaacaggcttgagttctgccttaaacttcagccagagaagctcaagattagcagaaaagccttaatgaactatggaaatgtgagcagcaatacaatcttctatgtgctggagtacttgagggacgagttaaagaaaggggcaataagtgaagagtggggattgatcttggcttttggcccaggcatcacctttgaaggactgctagttcgaggtgtaaagaaaaccttcacaagctaatataatggtgggtacatggcaagcataaagattaattatatatacagaaacatcacataaagagcatagatgtctcggtggaagctgagcaccacatagcacatcgctaatattttactgtatttgtgttcttcatctatcaaacagtgtaaggtacttgagtttgcttcctagacattgtagaaataaggcactatacagcctgttgtagtgttgttccactgtactatgcaatgattgcaggattacttt

SEQ ID NO: 4446 - DNA, 1141 bp, Zea mays
  Clone ID: 700378156_FLI
agcggcggcaggcggagctgatcgcgcagttctccgctcaggcggcggcgctttcgtccgcgccccagctcgccgcgctggtgcttgaggccacctcccacccggccctcttcgccttctccgagctcctcaccctcccggccctctccaagctcactggcacgcagtacgcgtcgtcactggacttgctccggctcttcgcctacggtaccctgaatgactacaagagtaattctggattccttccagcactgttgcctgaccaggtccgaaagctaaagcagctcagcgtgctaactctggcagagtcaactaagatactaccgtatgatcagctcatgcaagagttagacgtttcaaatgtaagagaactcgaagatttcctaatcaatgagtgcatgtattcgggtatcgttagaggcaaactggatcagctgagaaggtgctttgaggtacaatttgcagctggaagagatcttacacctgatcagctaaagaacatgatagagactttgtctgattggttgggaacatcagatagactgttgcatcaaattcaggagaaaatcaagtgggctgacacaatgagtgaggtgaacaagaagcaccagaaagaatttgaagacagagtggaagaggccaaaaaatcaatcaagaagttaaacaatttaagcaggcagacattgacttacgggggcatgacgagtttctctctgaatctggaggaataatggattttgaagaggaccgcgtccgaccaaaaaggaggaggcaaccaccggcgtagtttcaattagcccttaccaatctctcccagaatgggacctgctgataccttgattgagacattttgacgccggagttgagtaaactttgtacatctgtcgtgtgatgcctccactgtagcgagtctgtttattttgccttctggtcttggtggggacgtacaaggccaaacctaggcgttatgttgcatttatttggtagtaaatggcccatggaagaaataacgttgttatgattatggcactgggttattctcaagtgtactgaacgataacagaagcacctctgttaaatgatgattgactcgaggcttgctgacttgctgctctagaggagttagcatagctgctcaggt

SEQ ID NO: 4447 - DNA, 2678 bp, Zea mays
  Clone ID: 700378210_FLI
tgctccacaggtgtgctgttagatgacctcctagttgctgaagatcttgctgctgctgaaacaaccagtgcagctaatcatgcagcagcagcagctgctgcatcctcaaatgtacaaagagaaccgggtagatatgcctacaacgatgaacaatcaggacaaacagttacagtttcaagtcctgatggagctgttgttcttgggactccagttgctcctccagtcaatggggacatgtatactgatattagtcctgagaatgccattatccagggacagagaagattgagcaaaggtgttgattacttggttgaagcatcagctgcagaggctgaggcaatcagtgctactttagctgctgtaaaggctaggcaagttaacggtgagatggagcattcacctgacagggaacaatctccagatgctgcaccaagtgccaagcaaaattcaagccttataaaaccagatcctgctcttatgaacaattcaacaccaccacctggggttcggttgcaccatagagcagttgtggtagcagcagaaactggaggtgccttaggtggcatggttagacagctctcgattgaccagtttgagaatgaaggtagaagggtcatttatggcacccctgagaatgcaactgcggcaaggaaattgctggatcgacaaatgtctattaatagcgtgcccaaaaaggtaattgcttctctgctgaaacctcgtggttggaagccccctgtgcgaaggcagttctttcttgactgcaatgagattgcagatctatgtgataatgctgaaagaatattttcaagtgaacctagtgtcttacagcttaaggctcccattaagatatttggtgatctgcacggtcaatttggtgacctcatgcgcttgtttgatgaatacggtgctccttcaactgctggagacattgcgtaagtatcttgtgttttgtttatttttttgctcgttcctgtttcctggatttgactaatattgttttggattctggaactcaaattattttggattccaagagtccctaaatgcctattctctaaaagaaacaatagaaagatgttaagttgtaagttcttcatttatttgtgataaacactgctgacatttatgtagcaggcactcctgactttgtatgtactttttttgaattgaaaatgcagttacatcgattatcttttcttgggagattatgtcgatcgtggtcagcatagtctggagacaatcagtcttctccttgcactgaaggttgaatatcctcacaatgtacacttaatccgagggaatcatgaagcagcggatatcaatgctctatttgggttccgaatcgagtgcatagaaagaatgggtgagcgggatggaatctggacctggcaccgtgtgaacaggttatttaattggcttcctttggctgcactaatagaaaagaagataatctgtatgcacggtggtattggtcggtccatcaaccatatagagcaaatagaaaatcttcatagaccaattaccatggaagcaggctcagttgttctgatggatcttctatggtctgatccgactgagaacgatagtgtagagggtctcaggccaaatgcacggggccctggtcttgttaccttcgggcccgacagagttatggagttctgcaacaacaatgacctgcagttgattgtgcgagcacacgagtgcgtgatggatggcttcgagcgtttcgctcaaggtcacctgatcactcttttctcagcgacaaattactgcggaacggcaaacaacgcaggagcgatcttagttctcggaagggatctggtcgttgttccaaagctcatccatcctttgccgcctgccattacgtcacctgagacctcaccagagcaccacattgaggacacatggatgcaggagttgaatgccaatagaccgccaacaccaaccaggggccgccctcaagcgcccaataacgaccgaggctctgttgcttggatatagcggcctggccatattatgaaacagtcagatttctcgcctcccaccagtggcttgaggcttatattatccatccatcttgggcacatgcaggcggtctgtgctgaaagcacatgcttagcccaaaacaacatcgaaagggaactgttcagggagcgagactaagcggtgctctgaagacagaaggccagagaagactcaccagtcaccgtcgacagtgctctccaaatccttcccctccaaatgacatgagaagtagaagaacagaaccaagtgttggcaaaccacagggtcttgcctgaggtcacgcctgtacatactcagatgccagcagataggcggggttgtgtactgtgttctttttgtcgagcgtccaaagtggtagcagcagtccattgtgctaggtattcatttgctgtagggtttttgtttcttgtccctcatgttgcagagtatggaagtgataaaaatgggtcgttctgtcaggtcgtgtataatagcgttgtcgcttgtttatgggtagtagcagcgagtcagctgtcagcacgccttacacctccctcgtgttgtaattcccgtcacctgtgctgagagtgtgcacaatatatcgtcgtctgttgtccaaagttttgggtcatggacgggtttggtgatttgagttgatttattagagaagc

SEQ ID NO: 4448 - DNA, 1530 bp, Zea mays
  Clone ID: 700378222_FLI
agtcacacggtttaatcgaatggcttcgccgtcgtgtttcctcttccgcccccgtccgccgctgtgcagccgccgccgccgcagcagcagcaggtccctctacctcctctccaagcagagcctgcaccgacttccctcaccaagaacatgccgccgtccagtggcagagcagctcgtcctgcggtcgctgccgcccggtaacggcaggcggatgggggcgacgggcttcgcctgctactgttcctacgacaccgagaacggactgcccacgccttcaccggacaagggaaaaagctcggatgagtggccaatccttcgccggtgggatgttccatgggagtggccaacgatttctctcaccatggtggcatgtgcagtaagctttcttttgacagggatagctgagcaatctattttggagcaactaggttttcgagctggggagacaactctagatgagaaagcagagatactcttcttgggacaactaattcaatgaaccacttaagctgcaaaacggatggcttctgtggtctgcaatcggcctgtttgttgcaatagttgctattgctttagcaggtgctgcaatgacatttctgaatggtgaaacaccacagagagagacagactcgctggtccttttgttgccgctgattggctcgtcaaacatcagcactgcctgtttgctgggcatcactgggattttggcacccattctggaggaaactgtgtttcgaggatttcttatggtatccctgactatgtggtttcctactccatatgctgtgcttatgactgctgcagtgtttgcctttgctcactttacaccaggagaatttcctcagcttttcgtgcttggtgtggtcttaggattttcatatgctcaaactcgcaaccttctaactcctattgcaatacacgctgtctggaactctggagtaatattgttgctaacttttcttcagatgcaagggtatgatatcagggagattttgcaggcatcttgaagatttaacgcagttagattaatttcatcctgtgttttcttgtgtcagagagggtcttgcaagttacggaactacttgtgctctgctcaaagggacattttcacgaaagtgactattttaagctgaattacggaggcatcggcaaaggtgtagaaactctgttggggttacaacaatggttctcacctacatatagaagatccttgttttcctttgtcttttctatgttagttagatccatttcccttttcccagtggtcatttatctatcagactgggcaaaagcatctcatgactcatgaggctgggcctgggatactatttccatcatcaacataaaagacaaagtttatgtataccagagtcgtcttaatgacggtgtttctgttcacttcgccgtttgtgtatgattgcagagaactgtgactgataggaacatcaagactgtataattaatcagcaaccgtagttggtgtcttacctgtaacgttatttgaaggggtaaaaaattgtttatgttgct

SEQ ID NO: 4449 - DNA, 2762 bp, Zea mays
  Clone ID: 700378286_FLI
gtctctcttggtaggagttcagagcatacaaataaatcaatagatagatcatatcaccaggcaggaatctctacaccttcaattccaccaatggattctggggttttgaattatgctgaagaatatgatcttgaatctgtcctgatgaatttcctaggtgaaatttatagttgtcacgatgaatgcccacacagtgattgcaagaataagaatgaattgtgtccttcactgaagtccctaatccataaaaaggtcaatgaattgaataatcttcctcgcaatattggctgcgcgcaatctcaagagggtaatgatgctaagctatctgaccagaataatctttctaacaccatggcagcccgatccaaacaattcaaggatgcattggaaatactgggttcaaacaatgaacttttcatgaagctgcttcagaagccaaaccaacatatagttgacagtatccaaaagcatgaaaacagtaaggtggctgccggattagagcccaataaaattcatggacagaccaattttctggtaggaagaggaggctcaagacagcatcctttggctacaaaggagcaggctaaagagagaaaatatatgttcttctggaggaagggtaaatcaaatagaaggcagatgcttgaggcaactgacacagatcagactgttaccaaaattgttattctgaagccaaatccagaaagagggtttaatcagaaagcagctactgcaagaactttacatcaacagccatgtacatcgcatgctcctgaatgtggtggaattgataactcaaagttttcaattaaggaagttaagacaagattcagatttgtgaatagtgagagtagaagagaaagcaatttagcacctgcagaggaccttcaaggatacccacggaagttcaaagattcttttgttgcaattaataaagattttagacatttcccagaagggagcttggcaaacaagtctggatcagacatcaagaatgcaatcaaacctttcatcagcagtaagcaaaatgggagcataagcggaaacagtggtcatatagtagcaccaaaaggtgcatctatcttctatgaagaggccaggaggcatttatcagagatgctaaaggataatgactgttctgtaaactatccagcagttcaaatctcaaaatccttggaaggcatactttctctgcctcatggcaatgtgtcaacccctaggagtagcctgtggggaaaggattaccttggcccctcacctggagaaacagatgtttttgttgcatgtgaggttcagagagaagaatgcacacaagagagaagccaatcacaagaggattttggaagcattgctcgatgtactagtgcagcagttgatgatcaggtgacagttcgagatggatattacacgaatgaagcacaagaaggatcaaggcatgctcagaatgagccaggccttctgtatactgaaggaattcacaaattcatttgcggcaaaaacatttgcgacgaacagtccgttccagcagaacaaagtagacacgatgtatgtcaggaaatactagaagaaataaaacaaggaaaagaacatatcaaaatgtccccaacctctgctgaggggatagttgaaacgttggggcagcaagagccagaaacaccagaaccaagagcatcaaccgaactaatctcagatggttctcccgagcaaagcgatgaaaagcaagagaggcccagtccagtatctgttcttgagtcattctttgaagatattgacaatccagactgcataaacaagaaagaatgtgagctgcatggtctccaaaggaccctgtattttccagataatgaaccagatgttagcctccttggggaggacaggagtgtcagagtggattacataaagttggtgctagaactctcggagttgtgtgcagaacaaaatttagaggtatggtacctagaggacgaattaatcagcccctgcttgtttgaagaactacagagtcagggcgatcaaacggatgatctaaagctcctatttgactgtatctgtgaggctctaacagagatccaagagagatattttagactctcttggctaactttcctaaagcaagacataaggacacctccgattggagaaaacctcatcacagaagttgatagatatgtttacgggtatatccaacatagtcttccaatcactctagagcagataatcaagagggacctggaagttcagacgtggatgaacattagatcgaaaactgaagggatttatggagatgtgggagtttgtattggatgagttgatagatgagactgtctttgatttgtggatttgaagttctgattagatctcgtccatggtgccttgtggcgagtatagtgagtaggatacgtgagttttcgtgctgacaataaccagttgtatgcggcagaataacatgatgggctactactagtcaagtgtgtaactacagtggaaatggttctcgtggatgaaaacaaaagtttaggttcagcaaatctccagaattgtgcagtttgtgtggatgaagttggttggggacggtctgtcaccagaactctcagccatgcctctcaacagcgaattgtacagcagatttgagagtttgtctgtgcatgtgtgatgcgtacacttttcagcgtgatcagatcacgcttatcgtataggtttgttttgtgtgtaaatgtgcaaaaaagtaatcatacatgttaatcaaatggcatgttttgagt

SEQ ID NO: 4450 - DNA, 1193 bp, Zea mays
  Clone ID: 700378306_FLI
ggggtctcacaccatgcagagcacttacacgtccatcgacgtccatctaggccaatcatactcgttccttgttactgctgatcagccacctgcagactactccatagttgtctccacacgctttaccacccctgtcctcaccaccgctgccatcctccactacagcagctcaaatggtgctgcaagtgtgccgcctcccccggcgcctaccgttgagatcgatttctctctcaaccaggctagatccatccggtggaacctgacagcgagtggaccaaggccaaaccctcagggttcctaccactacggtctcgtcaacaccacaagaaccatcaggctcgccaactcgcgggcaaccatcaacggcaagctgagatacgcagtgaacggcatctccttcgtcccggccgacactcctctcaaggttgctgatttctacagcatcccgggagttttcacgctgggcagcatgcccgacaacccgacgggcggcggcgcttacctccagacgtctgtgatggcggccaacatgcgggactatgttgaggtcgtctttgaaaacgcggagaacttggtgcagtcgtggcacatcgacggctacgcgttctgggtcgtcgggatggatggaggacagtggacaccggctagtcgtcagggctacaacctcagggacgccattgctcggtacacattgcaggtgtaccctcagtcatggacggctatctacatgccgctggacaacgtggggatgtggaacgtgaggtccgagagctgggccaggcagtacctcggccagcagttctacctccgcgtctactcgccggcgaactcgtggcgggacgagaacccgatccccaagaacgcgctgctctgcggccgggcctctggacgccggaccaggcctctctgaagctgaatccctgagcccaagaagaccatgtttgttcggccacgaaggggtggccggaacttgcggggatcaattgaagttgagggaagagatgattggagtgttcagattgctgaactgagttccattttgtggcgctgatgatcgttcagctcatatattatttagcaattgtagctaaaacattaattcccggtcgatttgttgtatgtgaagcttcctcgcttcctcgctcacatcattgatgatgataatattcatagtaaccagattttcctttttc

SEQ ID NO: 4451 - DNA, 2129 bp, Zea mays
  Clone ID: 700378381_FLI
agcaattggtcaacgcctacctgatgtggatctgttcgcggggtttgttccaatccaaacatttgacatcgcttttgtagttttgttatcctgtgatctggaagcatgcgtttaaggttgatgattaggcttccccatttgctagtgtcgcactcgcacagcgggaacttagtataagtctgatctgtcaatatctttagtggttatactatctgattgaatttcaggtatgacgactgcttttcttatgatgttataaacgtgtatagcaaattcatagagtacgttaaattgtgtggaggggttatatcttagacttggattacatggcccaacgataatatctagtaaaaaagctttcacgattttgagcatgcaaatttacttcggtgaatgtatctcccaaggtccttcaactccagctgatagcactctagttgtttatctaataggtttccatttggaaacatggtagcaaatggtaacgagtcagttacatggttactcagatgacttaattagcagtggaggttttttagtttagcaagtcatttagttccatccaagtgtaactgaacattgcttcatttcaatggtcaaacgtctttacagaaggatgatgaaattcaagttccgctacataggttgccagagtttacctgttttgctagttggttttagggctgtggtagtgtggtgccctgagctgttttagttgttagccatgtctaggtgcagtggagttgctagttgggtcatttttcgaccaagtgcaagtggttattggttgtcggtaattgtaccgaagtcgtagaagttactatctctgttctcgaatatttgtcgtccgttagtttatttttgaactaaatcgcgacaaataaaaaagaacggagggagtatttcgttggacaaaagtagcggcaaagctttttttccttcgtctgatgcttttcttttgtcatttttcatggaaaaagttcagtgtcaaaattcttgtttcaatctgcagatcaggatttcagggaactcgtgcagaaggtccctgaaggttgcctattcaccatcgtctctgactcatgccatagtggtggcctgctggacagtgctaaggagcagataggtaatagcaccaagcagaataagacccagtcccgtgaacctgatgagcctcgtcattctggttctggcagcggcttccggtcatttctcaaagagactgtccgcgatgtgttcgagtctgaggggattcacatccctcatagtcgtcgccatggggatgatgaccaggacgacggttacgcacagccaactggaaatggccgcaccaaaaaccgctccctgccactctcgaccctgatagagatgctcaaggaacaaactggaaaggatgacattgatgtgggttctatccggatgacgctgttcaacatctttggtgatgatgccagcccaaagattaagaagttcatgaaggtcatgctcggaaagttccaccagggccagtcaggtgagcaaggcagtggtggtggtggtgtctttggcatggttggtgcccttgctcaggagttcttgaaggctaagcttgaagggaaggaggaagaggctttcaaacctgcattagagcaagaggttcacagtgttgacgaggtgtacgccgggagtaaggcctgggcaccaaacaatggcattctgatcagtgggtgccagactaaccaaacatcagcggatgcaactacaccgcagggtgtctcctttggtgctctgagcaatgctatccaaaccattcttgcagacaagcacgggaaggtgacgaataaggatctcgtgatgaaagcacgtgagctgctgtccaagcaagggtacactcaacagcctggactatactgcagcgatgagcatgttcatgtcgctttcatatgctaaaacttggattgttacagcgattgctttcctccatccttttgtgttgatcggtgcaccagaggttgatgtttttcttcccatgtatgttacagctatattgtatcagtgtttgttgcttgaggatatgtttcaatggactatgtcaatattgaaataacttttgagaaatgtttctatatatgaataatatacacacttgtatc

SEQ ID NO: 4452 - DNA, 1306 bp, Zea mays
  Clone ID: 700378395_FLI
aaaatttggagaaacaccataattagttggtcttgtttttttttttgcatgactataacaacccaacaggaaatatgtgcatggatggaagtgttttatgcaaatgttgcactgaagtaaacacaggaacgtgatcttaggttgccacttggtgataggctgagggtgtttaacagctttactttcatttcctgcaaaatattcctcagcagaattcgtttgactcgtgagagacttttgattcaggttaattgaaggagtggcacgttctgtgaacaatctgcttgagaagttccatcagtcctttttcctgtacttccttacaggtccaagcaagttcatttcggttggtgtgtatatgattccgtttgcattgcttttggcacctctcccaatagttgctgctgcccttgctgatggcagtagaagcatggaaaaaacagcggataagttcataggcgacggtaaaacagatggcattgctgatatttcgcagaacaagggtggatcatggaaatggcttcgagctgcaaaagtattgcttgttgtccaattatgggcagtacttgtttcactacttccatattacattactcagatacctgatgccacacctacgcaaagcacactcatttgggttgtgctctccatcgtcgtactgatctccctatctgtcttgtttggctcaccatactcaactggtgttgaatggaaacttctgaaggctaccatgatcacttccatctccatcggattggggcttatgtcgataataaatttcgccactgctcagcttggtgctctgatagtgatcccaatgtgtttgttttctcggcctctgaaggcatcagggatgaatttccttcctcgggcagttttgttggcttcaaatgtagcttttgctgtgttgggttttcctccagttgcgttgctgattatgaaaggagtgtccaagggatcgaggtcgtggacaatagatgttggagatttctgggtatggatggagttcctgtgggaatggagcagcgcgacgtatctttacctatttcttgtacatcttccctgctggcttttgtgcgtccttgtgttcctgcacccatgtcaccaatcagaatataagctgaagcaggaatagctgtttggcatccatagtcttgtctttttggatggtaaatcttgtagactagtgtagaaatttctcactttcacaaacttttggttacccataattcggaaattattcacccagttggagacgacttgtagacgatgtatcctgcctaatgtactgtctgcaacattttcg

SEQ ID NO: 4453 - DNA, 617 bp, Zea mays
  Clone ID: 700378404_FLI
tgcttttcagacatctgggggtgttcctggtcttgaagaaatcggggatgtttccaacagaggaggaagagaattatcaacagaaaggtctacatgtgaagatcatggcaacgcaatcataatggaagaaaaagacactacaacaaggatatcaaaggcagagcatgcatcatctcccttggagacgatgtgtggtgtaactaaatctgctgaagctcccacaacagttcctactgtgacacggaaaaaagaggtacatggagttcagaggaccaaagagagggagaacatgacaacagcagatagtgcatgtgaaaaggacaaagggtcttctcaaagagtacaggaggaaaacgaaagtgaaaggagattggagaaagaaagagaagttgaagagaaggaaagaaggaaattggagaaagaaagagaacttgccgaagagaaggaaagaaggaaatttgagaaagaaagagaacttgccgaagagaaggaaagaagaaaaatggagaaagaaaaagaacatgccgaagagaaggaaagaagtaaattggagaaagaaaaagaacttgctgaagagaaggaaagacataaattgaagaaagagagagaacttgctg

SEQ ID NO: 4454 - DNA, 647 bp, Zea mays
  Clone ID: 700378442_FLI
ctttcggtgacggtcatatctgcagaggagttgccacctatggacattggtggcaaggctgacccatttgtggtcctgtacttaaagaagggagaaaccaaaaagaagacgagggttgtgacagacacgttaaatccaatatggaaccagacatttgatttcatggtagaagatgcactgcatgatttgctcatggtggaagtatgggaccatgatacatttggaaaggattacatagggaggtgcatcttgacactgacgagagttatactcgaaggtgaattccaagatacctttgtcttgcaaggtgccaaatcgggaaaactaaacttgcatttcaagtggacgccacagccaatctatcgtgatcgtgacagggatcagtgagacttgtaaacgaaaaaggccgataaacacttatccccaacgatgctatgtatattagtcgttctgtatttacacaaatcccacggttcttatagccacgtgaccaaaaagatatcaacccaccgacctgtattttctcctttgtgatgcaagtcagcaagtgcatggacctgtatatttgagtcgtgaatgaataggaaatgctgttactatgctgcaagcacatatatgcttagtggtgccgtggtggtggttgcttc

SEQ ID NO: 4455 - DNA, 522 bp, Zea mays
  Clone ID: 700378485_FLI
gaggagactgcgcgagcattggctggaaatgtcttgcaatgatttacctgctgcctttgaggttcttagggaaaggaaggtgctgatggagaaatcaataaagttattaggccttgagcttcagcagaagaatgtatctgtcttgagaaaggttcgctgtgacttgtccttcaattctttttcttaagtctctaatttttgtcttgagggaagtgatttacttgaatgtgtaaaaaatacagtggatgagaataccgttgtatgcttacttctgttatgtatcttccccatttacaatgtatcatagcattcgccactatagatgagaataccatgactataaagatactgaattgtaatagaggcatctagtatgaaagccataggcagtatttcattatgaatggtgaattgccctgcagtgttatcttatttgtataagctaatatattgtcacatttttgtaagtatactttgttgtaatcttcataatgaaaataaattcttataaaaaacaatctt

SEQ ID NO: 4456 - DNA, 270 bp, Zea mays
  Clone ID: 700378508_FLI
cgaaagacgaggctatgtaggtgttgaggaacactagatgctgtagggccaaaaatattttatcggtagtttctgattgctgtatagcagcctcatcgttgtgtaagttactcgcctcgaaggcgtagttcaggatctagaatcgctttgttatactgaactcatttcattttttaatgaagaatgctatataggattttacgtcagtaaggtattgttgtactgagctgatttgattttttaaataaataatttcatagattgtacgtc

SEQ ID NO: 4457 - DNA, 469 bp, Zea mays
  Clone ID: 700378587_FLI
ctctcccaccccgcagccgccgcgcaggtagccctagcacccgcgacgagcaggatctgcccagttgctcttgcggtagttcccccaactgtcaccatgcagaacgaggagggtaagactgtggacctctatgtccccaggaagtgctcggccacaaacaggatcatcactgccaaggaccatgcctctgtccagatcaacattggccacttggatgcgaatggcctgtatgatggtcacttcacaacgtttgctctctctgggtttgtccgtgctcagggcgacgcagacagctccttggacaggttgtggcagaagaagaaggttgatatcaagcagtagattttacatctagtttaccaagaattggacactgccttagctatgttttgaattcatgtcactatatgcaatgttgtgatttcagctggtaccttaaatctgaagatttagtatctttgttgggttc

SEQ ID NO: 4458 - DNA, 449 bp, Zea mays
  Clone ID: 700378702_FLI
ccaatggctctaagcaagatgaagcatttgatcttccatctgatgattcggatgacaatgattttgaccccaatatgcctgaagagcatgtggctagtaaggaagaaggatcttctgaagaggaagaggatgatgacggaggatcagactctgacgactctgacttcttaacctgttctgatgatttggaacctttgatagataaaaagaaggttgatgacctgggattaccttctgaagattcagaggatgatgactatgatccagcaggtcctgattcggataaagatgtcgaaaagaagtcaaattctgatgagtctgatttcacgtctgactcggatgatttttgtaaggagattaaaaaatctggtggacatgatgaagtttcatcgcctccattacccgatgtcagggtgggtgatatggaaaagaacactgctcagtctaac

SEQ ID NO: 4459 - DNA, 624 bp, Zea mays
  Clone ID: 700378722_FLI
tggagtcttatttccgcgtacgacagcggcgaactcggccaagcgctagctgagggccgtgatggctggcagaagtgggttaaaggtttcggcaagtctatcaaaagaaagggcaaggggctcttcatgccgctccgggtactgctgaccgggaagcttcatgggcctgacatgggtggcagcatcgccctaatacacaaggccggcgtctgctgcgctgtgactccgcagtccaacttcgtgactctagacgagcggttcaggatgctcaaggacgtcgactgggagtcgctggcgaaggagcaggaaacccctgctgtccctgccgccgcttcctagactgccaggaggaggacgacgttgcgcgcaatgtcgctcttgagtttttttttaaaaaaaaaatccattttggcgtgtttttgtcaccgttcgtttccatggagtaggagaggagctcagtggtttggtcataggtcgttggtgctgtaatgtgggcaataatattgaattattattattagatgatgatgatgatgcctgtaatctgcgtgtctacagcttctcgtttgctgaatacttcatctttttttttgacaagtgaatacacgattattacaggtgttc

SEQ ID NO: 4460 - DNA, 245 bp, Zea mays
  Clone ID: 700378737_FLI
accaagacaagaacagaagctcttcaggcaatggaaactcttgttgtcgccttacggtgggccggtagagttactggtattatgtgctttacgttatcagtatcacctccttttgcattctcacccagcgtgtacagggttttagtatgttggtctaggttactttgctgatcaaggttcgaatgtatttgttcttttaaacatatgcactccgatctttatatgatggaccatttctttgtgtc

SEQ ID NO: 4461 - DNA, 676 bp, Zea mays
  Clone ID: 700378757_FLI
ctcactcaaatacaatagacaatactatttggatcattcctcatccctctcccttccatacgaccctaccgcagccaacctcccctccctctgctcccgtgtccccatcgtccctcttcctcactcgtgccgccactgtcaacccctccccttctctccccgagatcatagtattagcacaaactatatgctagtatgtatagaggacacataatcgtatcattcaaggtagaaataaaagattattcatcaagctctcttgctccctaagcaccttgcatctgccctattttagtgttgcatcagccccttgcactacctcgtgctagccgtatgacaatggtctttccatgcaaatggttgcatgtgaacaaccacacctttcattgcctcctcatctctcgtcctcctacctccttgtgcaatttgcacaacccaccttccactaacattggtcccttacacttctcctatgtggttgttttaatttgtgtgcaaccatttacacaaaacattcatttgctaatattcgctagtgatatttataggtaaaaaattatggtgtcctattagcactaaatattttggataactgatctatcatcgctatttttagcatatatattctaactattagcgttgagttccccaccactgcaagctgcaagaaaatgtt

SEQ ID NO: 4462 - DNA, 104 bp, Zea mays
  Clone ID: 700378914_FLI
caacgatgttaaactagcaaaagtgatgctttttgctgctgacacaatacttcctcttcaggagctatcctatgactacggttatcgcttggacagtgttgttg

SEQ ID NO: 4463 - DNA, 260 bp, Zea mays
  Clone ID: 700379019_FLI
ctcatggccgctggcgcttactgagaaaagctatgtgcatcgcattcgcatgtgctagacggctacttgctgtgccgtgaatggagtgtttctcagcttcgttttgcttttaattttttgttatgccaggtctcctgcttgtgcttgtggtgatgatgcaggagagccatggtgggtactatgcttttgctgccagtggaactgtaagacaatgtttatatagtatctatactatgttggtgcgtcgatggttcatggtt

SEQ ID NO: 4464 - DNA, 489 bp, Zea mays
  Clone ID: 700379054_FLI
cggagagccctggaagcagccccttcccaaggacgatgacacggttgtggtggaaatctctcaccttgggcaggtcaccatgctagcaaatgagccgtgcaggtccaagagcgtcaacgaccagtcgtcactgtcgccggcgcacgacagtcatggtgattacaatgatatcgctgaggaggacgaagacgagtgggaggacggcaggaggaagtttggggcggcagatacatttaagattcctgacgagattgacattgctcatttcagttgagctttgactagtgcatcgtcgtgtgcgttctgatcatacgagtatggtttggtttataaccatctcctttcttttgatttcatatatttgcgatatgattgttgcagccatgtgtaagtgaatcctaggtaaccaagtgctgcgttgctatatatgaccaatgtatgtatagattcagtggaacggtaaaaacacgcgaactctacggttttctc

SEQ ID NO: 4465 - DNA, 621 bp, Zea mays
  Clone ID: 700379076_FLI
agaagcgcagattctgttgcccgcactaccgtgagccctccaaggtcagaggatgctgacatggatgatgtgaaacccacaagcttaagctctcggagctacctgaagagtgcaagcataagcgcttccaagtgcgtcgttgtcagaaataaacacccagagccagaggatgatggaatacctgaggagatggaaggcaccgtcgatggattgtctgaaaaggtctccaggatgcactcctaaggcaggactgtccatggcgacagcaatctcgacacaagatttctgtctggtgcactgtaatgccgacgacacactgtttggatcttgtgtacacccacagctagttcaactaagatgtagcactagttcgtccatggaggaagcagaatggacgatgaagtgtggtcagcctgtcgaccatgaggtgttttcttccaatggagtctagggtatgtttgagttctacaacggcttgtgccgtacgaagtgtcagcagtgtacgaggaggaggatatcgttgtcagtacacattttgcctgtctagaaaattatgagtactttctccgatcacaagtacatgtacatccatgtttgtcttaagataaaaaaagaaaattc

SEQ ID NO: 4466 - DNA, 280 bp, Zea mays
  Clone ID: 700379131_FLI
agctcgccaagctgaagaaggcgtccacggcttaaggagtctctttccgtgaatgtcatgttagagtttttggttatgagttggatcagcaattcgattgagcgttgtcaaagccagaattaccaatatgttccctgtaaacccatttcaaactttatcaagcacgggcgtgctcaggatacttttgccatgaatgatatggaatatctatggtagcttgtggcaaatgtgtaacgaggccgcaaatctcgtgactatcaactcaaagtttcttcctcac

SEQ ID NO: 4467 - DNA, 554 bp, Zea mays
  Clone ID: 700379139_FLI
agctcataatatttcctttattttgacaaaatacaactaaaatagtacaatacaaacttacaaagtagctcttcctcagcttagcttgctactgacgcagtttatataccgtataaagtataaactatatatcatcatatacaattatgaccgactcaatttattgcaacattaactctttattctgtttactatgatcgttacgcacagagtacgatcaggatcgatcggtatatcgcacacatgctattagcttgactccacgcatgcctgaaactgcaagaggagtgcgtcgagcacttgcatgcacacgccatgcatggatgtaagaggttgaatcacacaccgccgccgatgccacctccacctccacctccgcctccgcctccggcaccaccaccataacctccaccgccgccagagccaaggccactgccactaccagcgccagcaccaccaccgtagcctccaccagcgcctccaccatagccgcctccagagccacttcctgctcctgcacctccaccgtatccaccgccagtacctccaccagc

SEQ ID NO: 4468 - DNA, 405 bp, Zea mays
  Clone ID: 700379146_FLI
gtgacatgccgaagaaaacaagtcttggtttcgccccttgcagcgtgtctgaaccatagctgaaggtggaactgtactagatcaaatcggccatagttaactgaaattcgtatcagttgtcagaagcacaacttggctggaatgccttattgtgcttctgacaactgatacgaatttcagccaagttgtaaaattattgcccttagcagaatgtgtagcgtgagttgtcatttcctttctgccattgttgtgcactgtttcagctgtggtagtgccttgtagtaggtataggtgcctgagtttatatgtatcatcgtgtatgtaccattgggagctcaattatatgccattgtaccaaccccagacattgattattacaattcatctagcagccagattcttgtc

SEQ ID NO: 4469 - DNA, 325 bp, Zea mays
  Clone ID: 700379307_FLI
cctggatgaaagcagtggttcagagctaacttctgttctagagatgcggatgcttgactatgtgaatgaaagagtagacgattcgaacctactcctatgtggatctctaattcgtgtgtttccacctctcggaatatgtgaatgttttttgcatgtttgtttggtatttgttagatccaatgtaaatctggtaatctcagcgcggtggaatccgtaggctgttaatttagctcgatgcagataaaagctgtagtgatcttttgttgaacttgtggaggatttttttttcttaagatctcaaacatggaacaggaatattcttgcg

SEQ ID NO: 4470 - DNA, 234 bp, Zea mays
  Clone ID: 700379382_FLI
tctgaaaagatgtgttgcagcagaaccaaagcatggcgaaaaatggcaagcaataaccaaggctgttgaaaactcacacctgcctgttgaggctcttctgaagaaagctgttgtcgtgcttgatgtagaagaaaacgccaatccgggaggagcctagactctcttttttataagttgtttggtgaacatattttgtggcttacaatttactcagcaagtctgcatctttaaatc

SEQ ID NO: 4471 - DNA, 406 bp, Zea mays
  Clone ID: 700379405_FLI
gtcggaggaggaggcggtgatggcaagatcggcggcggcgctgtcaagggaggaggctccaactccgtgggaggcgcaggctctatcaactcaggtggcggcgttgcgggacatggtgatggtgcagggaagtcgggctctggcggcgatggcatgatgaaggctcccggcggcggcggttgctacatcccccgctccgacttcgaggccaacccgaaggagttcttccagggcctccaccagcagggaggaggaggcaaaaagtagatctatcgagctagatgctagctagctagctgcttgttgcatggcaagctagcatgggatttgtgatcctgaatgaatgtatggatcgtcgtcagtcttcttagcctctaaataaaatgttaagctgattgatcgtttc

SEQ ID NO: 4472 - DNA, 339 bp, Zea mays
  Clone ID: 700379438_FLI
agatcaactgcgcggtgatcccgcgggacgggtcggcgctgcgggaggaggaggtgctggcgcactgccggcggaacctggcgtccttcaaggtgcccaagaaggtgttcatcacggacgacctgcccaagacggccaccggaaagatccagcgccgcatcgtggcgcagcacttcgtgcagccgaccagtgcctgatcgttgatcctggtgcttgccaagtcatgggtcgacggattggaatttcgctacactagctagcattttgccgttgttcccgcattgcgaggtggacatggcctgactgaacctgaataaacaaacacatgcatcgtctctc

SEQ ID NO: 4473 - DNA, 431 bp, Zea mays
  Clone ID: 700379520_FLI
tcaccgttaaccaggcccagtcccgtggcggtggcggtggcggcggtggctacggcggcggtcgcggcggcggcggcggttatggtggcgggcgccgtgacggcggttatggcggcggtggcggctacggcggtcggcgcgaaggtggcggcggcggctacggaggcggtggcggctacggcggtcggcgcgagggtggcggtggcggctacggcggcggtggcggcggcggctggagggactgatgtgtgggcccatcctggcttcggccgagttatcttatctatctatagtatcgtgttaccgttcgcttctgtcaccgtgttagtgtccgttctacctttggattaggtgttggtaccctgttgttcgctttggttgctcccgctatgaaacgagacgagagaagaatgagcaaggtttttgttcgc

SEQ ID NO: 4474 - DNA, 453 bp, Zea mays
  Clone ID: 700379531_FLI
ctctaggtgtattagtccaccctagaacccatacttcacttttgagtttgttacttttcttttgagtttgtgttcacttgattgtacatgtttggtgtactgtttatttgtcatttctcaatgtgttgaatgcatgattctttgcgtagacaacgagcagtccgtagttcctgagtgtgttgtcggagacttccctgagcagcaacatggtgaaggttgttccaattgcaatcagtgctcaggaggggatgaaggcaacatggaggattttgaagagtttcaagactacgatgagttctagtcgtgtttagtggcaacccccagtcagctgcctatgaaggccttatcctctatgtttcgtattccacactttgattatgttaatgactatgttatgttaatgactctgtggatgtcttggacatcttgatgtaataaagtactatttccgct

SEQ ID NO: 4475 - DNA, 381 bp, Zea mays
  Clone ID: 700379562_FLI
gcggcgtcggcgctgtcaagggaggaggctccaactccatgggaggcgcgggctctggcaactcaggtggcggcgttgcgggacatggtgatggtgcagggaagtcgggctccggcggcgacggcatgatgaaggctcccggcggcggcggctacatcccccgctcctacttcgaagccaacccgaaggagttcttccagggcctccaccagcagggaggaggaggcaaaaagtagatccatcgagctagactgctagcaagctagctgcttgttgcatggcaatctagcgtgggatttgtgatcctgaatgaatgtatggaccgtcgtcagtctccgtagcctctaaataaaatgttaagctgctcgatcgtttctgggt

SEQ ID NO: 4476 - DNA, 487 bp, Zea mays
  Clone ID: 700379581_FLI
ccgaggaatgccttgctgcaggcatggattcctacatatctaagccggtgaacttccagaatataaacgagtgcctgcagcggtacttggtgtctcagtgactaaccgactattgtaaagtagaaaggtaatctgtgtaggccaggaaagttttgtggaatcacctacgagttcgtttgctgtaaatcgatgcgtaataaattctagcgtatcctgccttgtcgaccattttaccttcaccttctgggagacagagacatactgaatctgacctaaccccaccagtaagatcaagagctaactctgaactttaggatcccatttggttacgaggcatatccctgtatataattgtcacggaggttcttatcctttagcagttagtcttctatctgtatcgtaattgatgagcaacatcggttttatgatgatgtgatggagaagcaaaggtgtaatacagcaataagtgtacatgtattgctggaac

SEQ ID NO: 4477 - DNA, 1913 bp, Zea mays
  Clone ID: 700379641_FLI
gctcctccatggccatggccatggcccgaccttgtgctttccttctcttcttcctagttcttttctcctacgacggatccggtcctgggagcagcaggaggactaggaggagtggcgtcgcgcaggccacgcagagagtcttcctgtatccacaggctcccaaggtctcctccatcgtgagcagcaagtacaggaccgcgtaccacttccagcctcccaagaactggatcaacgatccaaatggaccaatgtactacaatggtatctaccaccagttctaccagtacaacccaaacggctcgctctggggcaacatagtctgggcgcactcggtctccacagatctcgtgaactggatccggctcgcgccggcgatagagcggacgactccgagcgacatcaatggctgctggacaggttcagccaccatcctaaagagcggccggcctgccatcatatacaccggcgccgacaccgagaagcgtcaggtccagaacgtggcgttccccaagaacctgtccgatccgtacctgcgggagtgggtgaagccacacgacaacccggtgatccagccggtcggacgagggctgaacccaggccagttcagagacccgacgaccggctggatcggcccggacgggctgtggaggatagccgtcggggccgaggtcgacggccacagcgcggcgcttctgtacgagagcgaggacttcgtgcgctgggacagagtggaccacccgctctactcctccaacgcctccgccatgtgggagtgcccggacttcttcgcggcgatgccgggcgagaactccgggctggacatgtcggctgcggtcccggatggcgccaagcacgtcctcaagatgagccttgacggctctgacaagtacatggtcggcgtctatgatctgaaaggtgacgcctttgtgccggataccgtgatcgaggaccggaggctgtggtcaaggattgactacggcaactactacgcttccaagtcgttcttcgactcgaagaaagggaggagggtcatatggggctggacgaatgagacggacagttcgtcagacgacgtcgccaaaggatgggctggaatccatgcaattcccaggactatatggttggataaagacagcaagcagctgctgcaatggccggtcgaagagatcgagtcgctccgaggaaaacaagtcagacaccaaggcctggagctcaggaagggggatctgtttgagattaaggaaattgacactctgcaggcagatgtggagatagatttcgagctcacatccataggcagtgccgacccttttgacccttcctggctcttggacatcgagaagcagtgccgggaagcgggcgcgtcggctcatggcccgttcgggctcgtggttcttgcttctgagagcatggaagagcacacctccgtgcacttcagagtgtactacagatcacaggagaagcacatggttcttatgtgcgccgatctgaggaaatcgtccttgagaccggagctgtacacgccagcctacggaggcttctttgagctggacctggagaaggaaaagacggtggtatctctgagaactttgatcgatcgctctgcggtggagagcttcggtggaggcggcagggtgtgcatcatggccagggtctatccggcggcgctcgtcgacgacggcggcactcgcatgtacgcgttcaacaatggcactagcaccgtcagagtgccccggctagaagcgtggagcatgaggagggcacaggttaacaagggatgaggaggaacacaaggccatttgatagctagaggagaggaacagagcatgggcacatgaattaaacacacactgctggtttaatttgctggaattaatcaatcaatcaatcaacaaacacacgaagattaaatc

SEQ ID NO: 4478 - DNA, 1228 bp, Zea mays
  Clone ID: 700379670_FLI
ctgacccgcccactctaccttcttccctcttcagtctcctcgcgccaacgaccacatcccaccgaacaccgatcaaggtaaacctgttcgctgctccgccagaagccgaggtcgagctgttcacggcagcgagcatgcaccacgatcccaaccccttcgacgagggcgccgacgagaaccccttctcgaatggaggcggaggagcgcgtggcggaggcgtcaagccgcagtacgggttccggccgacggagcccgcggggttcggcggcggcaggggcgatgcgaccaccgacatccctctggacaccatgaacgattcgaagggcaaggcgaaggagctgtctcagtgggagtcagatctcaggaggagggagtcggatatcaggaggagggaggaagctctcaagagcgctggggtgcccatggaggacaagaactggccgcctttcttcccaatcatccaccatgatattgccaatgagataccagcaaacgctcagaagttgcagtatcttgcgtttgcgagctggcttggtattgtgctttgcctcttttggaattttattgctgtcatagtctgttggatcagagggggagattctaaactatttttcctggctaccatctatgaactgacagtgctttcagctttggatggtttttcctttgttacctgctccatattggtttttgcatatttgctgccattgctcctgcagttgtattccgtggaaaatcattaacgggtatactggcagcgatcgacaccttttctgatcatgcaatagttgggatcttttactttgtcggatttgccttgttttgcttggagacacttgtgagcatatgggttcttcagaaagtatacatgtacttcagagggcacaagtaggctatggaagcacttgcaatagtcaaccaactaccatctcatctgattgccatgtggttttgtatgttaggacaacgtatatttttccgtttgcattgtggagggtaagtacgactatatgtataattttcggtttgcatggtggagggtaaatacgactatattgtagcgtctctctcgactgatctgtttttaaccccaattctttgctcatatacaaattgtgctttgtatgcacttttgtttgctaccaaggctgcacattgtatgcacttctgttggtgccttaaacaaggagacaaatattttatttgacactagtaaagattatggttt

SEQ ID NO: 4479 - DNA, 594 bp, Zea mays
  Clone ID: 700379678_FLI
gccactcgaagccgagatacggccatggactccaccggcaccggagcagcggggaagggaaagaagggagcggccgggcgcaaggtcggcgggccaaggaagaagtcggtgtcgaggtccgtgaaggctgggctccagttccccgtctacctcgccgctgtcctcgaatacctcgccgctgaggttctggagctcgccggtaatgctgccagggacaacaagaagactcgcattattccgcgccacgtgcttctggcgatccggaacgacgaggagctcgggaagctgctgggcggcgtgaccatcgctcacggaggtgtgctccccaatatcaaccctgttctgctgcccaagaagacggcggagaaggcgtccagtggcgggagcaaggaggcaaagtcgcccaagaaggccgccaagtcccctaagaaggcatagactgactgtccggagtgatctgatgtttagcagtaccttgttaccagtatgcggtgatgcgtaggctgcagatgggacgaatgtgcttgtatgtgtatgtgtcctgctgcaagttgtcctttgctatttagaatggaagaagaaatgccttgtttc

SEQ ID NO: 4480 - DNA, 748 bp, Zea mays
  Clone ID: 700379722_FLI
cataacggcataaccctagtccctaccccatataaaacgcggcagcgatgaggctttccttccaattccacccatcgccgccgaaatcccgttgcgtctctcgcgcgttaccaagctctcaagttttctcgcgccgacggcaatggatgaggtcaccgaggccgtgaacaacctcaacatctcgggcgtaggggccgcgggcgttgccggggcggaagggcacaagaagaatcgcatccaggtctccaacactaagaagcccctcttcttctatgtcaacctcgccaagaggtacatgcagctgcacaacgaagtagagctgtcggccctcggcatggccattgcgacggtggtgacagtagcagaaattctgaaaaataacgggcttgctgtcgcgaagagtatcatgacatctactgttgatatcaaggacgagactaggacccggcctatccagaaggccaagattgaaatattgcttggcaagacggagaagtttgatgagctgatggcagcggctgccgaggagagggaggctaatggggccgaggaacaaagctgagtacctgcaaggaaggaccttgttgtagcttatttactgttttctgctgctagatttgtcttcttcatagtttgtcgagtgggctagagacgattacttgtataatcaattaaaggcgcggcttatttagtgtgcttttacttgattcatttatgttggaatgatacaagttgtgttcaatatggt

SEQ ID NO: 4481 - DNA, 997 bp, Zea mays
  Clone ID: 700379756_FLI
tccagacatccacccaccagagccggtcgatccgttcgaaacgatccgggaaagattccacgacttgggacttctcacattcccacaccgcactgtgccactgccgccggcccgccgcactagccgttgcttcttgcttctcccttcccgttcccaaggagttgtcctcgccggcggatccggggcgccgctgcaagaggaggaaggaggaggagaggataccagaatggcgtcgcgctcggcgtccaaggatatcatcacgctgcgaggctctgccgccatcgtcagcgagttcttcgggtacgcggcgaatagcatcctctacaaccgcgctgtgtacccggaggagagcttcagcaaggtgaagaagtacgggctcaccatgctgctcacccaggacgagggcgtgaagaacttcatcgccagcctcacctcccagctctcagaatggctggaggccgggaagctgcagcggatcgtgctggtcataatgagcaaagccaccagcgaggtgctcgagcgctggaacttcaacatcgtcaccgacgccgaggtcgtcgagaagggggccatcaaggagaagagcgataaggagatcatgagggagatccaggccatcatgcgccagatcgcgtcttgcatcacctacctcccctgcctcgacgagccatgcgtgttcgacgtgctggcctacacggacacggacgtcgacgctccgggcacctgggtcgagagtgacgccaagctcatcgacaacccgcagatggttaagctgcactccttcgacaccaagattcataaggtggacacgctggtgtcgtacaagaaggacgagtgggacgaggaggagtagagtttgcaccaaaagttaccctgctgctgctagagcttggcgtgaaggctgtgtgaatcgttcattcacgtctagcgtgtactgcactaatagtatactgctactttggggggaagaaaagtgtgagacgctcctaccatttag

SEQ ID NO: 4482 - DNA, 669 bp, Zea mays
  Clone ID: 700379791_FLI
tgaagtgaatccttttgatggacaagaggccaagccgtacaagaatgatcctgaaatccttgcaatgacaaacctgattgcagcgtaccagaagaatgacatcatggaatttgaaaagatcctgaagagtaatagaagaacaataatggacgatccttttatccgtaactatattgaggacttattgaagaacatcagaacccaagtgctgctcaagcttattaaaccatatactcgaatcaggataccattcatttcacaggaactcaattttccagaaaaggatgtcgagcagctgttggtgtcactcattctggacaaccgtatccaaggccacatagatcaggttaacaagctgctagaacgtggagaaaggtccaaggggatgaggaagtacaatgctatcgacaagtggaatactcagctgaagtccatttaccaaacattgtccaacagagtttgatgagaaggatcgctgctgctgcgtgcattgcacacctagcattgttgatagcctgttttgcggatttgagggcaactgcaaagaactgtctggtgacgcttgcgatagaatcctggatctgggtaaagttaatattgactacgaggtcgtctctgaattgaatctggtgttttgatagtgcaagactacttgactggtcaaaagcc

SEQ ID NO: 4483 - DNA, 749 bp, Zea mays
  Clone ID: 700379843_FLI
caaaggcaacatccacggcgtgcacgaagagctaaatttttccacagaaaccatcaaagaaaccacatatagtgatacttacagctccactcttcccatattccaaagcagtttggaatgcaacatccattgcatctggcatctcggtgttatctagaagaaaataagttagttagacacaagaatcaatacaaaaggtgttaataagatcagggttcctaaccatcacttttccgtaatacatgtgatatcttctctgcacgatcatatgccttcataaacccactttcaagccaggaaaaaatagaagccgtcggagtgaaatccaatctttgtactacattcataggtgagtggccactcttagcaaggaaatgttcttgagaagatttagagaaattttcaccatctgatgtatccatgagcaagctacatgcatcaagtgcctctttccagatagttaataatacaagttcaattgataacgcctccaggtacaggcctttagaaagctgaataacacagaaaattaaggacgcataagagacaaaggggttatcatatctgatccatcaaatgacaaataccatttctatgattgttcaaaagagcttttgtggggtgtaacttgtaagtgttgaagtttggaaatgaataaacattaaaaaacaaatatatgtctaatatgtattaaaggagaagagttcgactgaaaataccatggctttattgcaaaagaatattaaaac

SEQ ID NO: 4484 - DNA, 497 bp, Zea mays
  Clone ID: 700380126_FLI
aaagaacagtattttgtcaatgttggagttgactgtgggttaaccatcgctggtttctactacgtctgcttttcttgtagtgatggctccattagtggattttattatgatccaaatagcagtccgtttcagaagctcgaattgaagtgtaccaatgagaaaaattctggattcaccttttcatcctatgagctgcagtgacagggccaaatgccctcgacagacaactttctgtcagcatatagtgtgtactgaactcatactccccaaatgctgctgtattgaaagaaaggagtggtggtttatgcaacacttcgttttctcgcaagagcaagaccaagcaaactgtcactttgtaatctgcagaagcatcttatcttttctaaaatgtacctttcgtattatggttgtgttcatggtatgatgcgtccaaattcagttggatagggaatgtaagggctagatgttgatccagagaaatgctatataccttttcc

SEQ ID NO: 4485 - DNA, 587 bp, Zea mays
  Clone ID: 700380146_FLI
cactggcaaagttatatgctgccaagtacaagttgcggtcaagggcaaaggtctataagatcgcgtcaagaaatcttagtcggccattgaaggataagaaaggccagtcgccagagtatcacaatttgctgagaatgggccttgttgattcaattgatggtcttcagtatacaaggatgtcgatggttcctgatcctgattacacgccgttaccatttggatggcggccagatcatgagaagattttgctggagtacataaagctcacagatcaacagacattgaaagagcagagaaactgcaccagggaggacgggcttataacaccacaggacaatattttgatgcttgtatggggctacaagaaaaatgctgttttacttccttcaaaagtgagtgatgcccaaggatccacagaggaccttggttcagataccgatgaattgaatgaaaaagagctaggaaatgagggtaaccaaagtttccaaaagcttgctgaaatgtcatgagttttggcaaactctgtagtgttcccaaggggtatttgacttgttgactggatggttggtttgtgactttgaaaacac

SEQ ID NO: 4486 - DNA, 772 bp, Zea mays
  Clone ID: 700380171_FLI
ggacggcgacggcgacgtggtgcaggtggacctgatggagtccaagacggcgcgcggcccgccgacggggcggtggacgccgatgcgcgagtcctggggctccgtctggcgcatggacaccaaccaccgcatgcagccgcccttctccatccgcatccgcaacgagtccggcaagacgctcgtcgccaacaacgtcatcccggccaactggcgccccaacaccttctaccgctccttcgtccagtacagctaaccgatcgggatccgtgccctgcccgcaattggagctggctggctggggcgctactcggctcggtcaccatcgtctacagtactatactatgctctactaccactagactgctgctgttactactagtctactaccaccaagtacggcggaacggaacagctagtcgtcgtcggcggccttgggaggggaggtgtctccggtcaccgtgccgttgcagttgtatcgtgatcatggtcctgggagttgttgcatccggggcgcgctttttaggtcaggcgtcgtgtgcgatgtttgtggggtcaggctggcatgtcatgccgtgcgtgaccctgattgcgagccggcaagcaagaagacaaaaaaactaaagccgtgtgggaaaatggaggaggcaggcgtacaagctacgctctcccgcccactgttgcttttataatttatcatcatcatcatcttcattccgatcggtgattaatcgaaaagtatattgtaatgtataaacgccattttcctttcgtc

SEQ ID NO: 4487 - DNA, 837 bp, Zea mays
  Clone ID: 700380180_FLI
ctcaggttcaagaacaccctcgtccgccgccgccgctcctccggctacgacccctgcacggagacctacgccgagaggtactacaacaggatggacgtgcagagggcgatgcacgccaacaccacggggatcccctacagatggactgcctgcagtgatgtgctgatcaagacatggcaagattcagagttctccatgctgccgacgtacaagaagctgatgaaagcaggactgaggatatgggtgttcagcggcgacacagattcagtcgtcccggtgaccgcgacgaggttcgccatcagtcatctcggtctgaagatcaagacccgctggtatccgtggtactcagctggacaggtaggaggatggtctgaggtgtacgaagggctcacgtttgcgtcggtgagaggcgcagggcatgaggtgccgttgttccagccccggagggcgttcaggatgttccggtcgttcttggccggggagccattgcccaagtcctgaaggttcctcacatgtgactgaggccatgcatgcctacctgatcatgtctagctacggtcctgacgggtgagaaggtgacgttccccaggtagagaatgacttgttgataggcgcgcagttcatagctgaggagtgattgattggtctcgggagaaggatgtagagaataataaggatggctatgttatgccatggaaacccatgagcattgcaatgattagcgaataattttcagtgatctcactctcaagtgcttatgttatgttatgttatgttatgccatggaaacccatgagcaatgcgacgaataaatttgaaggatctcactcttgaacc

SEQ ID NO: 4488 - DNA, 2421 bp, Zea mays
  Clone ID: 700380209_FLI
atcagatcataggaagtgattatgtacagccatctaagcagacagccagaagcatttctcaatctggaattgctggagctggtgtatattcagagctggttaatttcaggtcctcatctaataatggaagcactgatcaggctccacagatgggtactaactattcttatcagattttatctgataaccattcttctaataatagggcacagaatcaacttaactttcctgagggaaagatggcttataacccttccgtgaacaatgaatttgggaagggttacccaagagctggctatgcaaagccaaagcagagtttctcaggaccttctgtgatggtttccagttcaccatcgcaaataaggagtcaagggcatcctggtctacctcgtgcaaaatatcattctaatcatttcaattcagatgccaggcaagatgatgtacaaactcggaacccatcaggtcccaatgtgtttagtggttctggcaacaaaattcagggttctacaggaaggataaaagctcatagtggaggaccccaatctaacttaagatcattgaagttattgcgatcagttgagcagtactaccacacactgcagcaaatgaaatggggtccaatgaccgagcatgttctagacaatcttcattgcaagatagatgcattccaggcaaatcaagtactcaagctgcttcatgaccacactgtcgctcttggcttctttcaatggttaaagaggcaacctggattcaagcacgatggtcatacttacacaaccatgataggcatccttggacaagccaggcaatttggtgttttgaaggaacttctggatgagatgagccgagctcactgcaaaccaactgtggtgacctacaacagaataatacatgcatatggccgtgcaaattatcttaaggaggctgtcaaagtatttgaggaaatgcaggaagctggttatgagcctgatcgggttacatattgtacattgattgatatccatgctaaagctggatacctagacattgcaatggatttatatggcaggatgcaagaagtaggcttgtcaccagatacgttcacctacagtgtcatggttaattgccttggtaaaggtggtcaattagcggctgcttataagcttttctgtgagatgattgaaaatggatgcacacctagccttgttacttacaatattatgattgcgctccaagccaaagcaagaaattatgagaatgttgttaagctgtacaaagacatgcaggttgctgggtttcgtcctgacaaaataacttacagcatcgttatggaagttcttggtcattgcggccatctggatgaggctgaggcggtttttattgagatgaggcgtgattgggctcctgatgagccagtatatggacttttggtcgatctctggggcaaagctggcaatgttgacaaagcgctaggatggtaccaagcgatgcttcaggatggtttgcagcctaacgtgccgacctgcaattcgctcttgagtgctttcctgaagatgaacagatttcaagatgcctacatcgtgctccagaacatgcttgctcaggggcttgttccatctgtgcagacttataccctgctacacagctgctgcaccgtgggccagtcacagatgggtttgtgctgccagctcatggccatcactggacatccagctcacatgttcctgctgtacttgcctgatgcagaagctggtggccagaacgtcagggatcacaccggttatttcttggacatgatgcacagtgaggacagagagagtaaaaggggtctaatggatgctgtcatagacttcttgcacaagtccggtctcaaggaggaagcaggccttatatgggaggttgctgcacagaagaacgtctacccagattctgtaagggagaagagctcgtcgtattggctcatcaaccttcacctgatgtctgagggcacagcagtgactgcactctccaggacgcttgcctggttccataggcaggttctgacattgggcactggccctgaaagaattgacattgtcactggctggggcaggaggagcagggtaactggatcttcgctggttaggcaatcgattcaaaagcttctaaacctctttgaatccccattcttcaccacccgtggaaatactggctgctttgtcggctgcggggagccactgaacaagtggttgcacaatccttatgttgagcgcatgcatttattgtaagcttgcacagttttgtggaagaatcagcttggaatgaaatataagctgtgcaccatatatagttcgctctgatttagtcaggccaggtgtagtttggtagccagatagtctatgcttggaaactatttattgtgattgtgataacatttagagatggaatttttcgtttagcttg

SEQ ID NO: 4489 - DNA, 566 bp, Zea mays
  Clone ID: 700380212_FLI
ttcacaggctcaccacaccaaccaacaagcaaaaattccccaatcctctcgtctccgcggcgaagatgtcggggcgcggcaagggcggcaagggcctgggcaagggcggcgcgaagcgtcaccggaaggtgctgcgcgacaacatccaggggatcacgaagccggcgatccggaggctggcgcggcggggcggcgtgaagcgcatctcggggctcatctacgaggagacccgcggcgtgctcaagatcttcctggagaacgtcatccgcgacgccgtcacctacaccgagcacgcgcgccgtaagaccgtcaccgccatggacgtcgtctacgcgcttaagcgccagggccgcaccctctacggcttcggcggctaggcctgccgcgccgcgcttcgccgtcgctgcggttctggtgttgctgcagttcgcaagttgtttgtgtgggcggaaaaatgctagatactgtagaactgcagtgcggtatgctgcacatgctgtgtttgtctgaagaaatgttgtcaatgctggcttgctctggactcaaacatgctccattctgtgttc

SEQ ID NO: 4490 - DNA, 1094 bp, Zea mays
  Clone ID: 700380222_FLI
ccaatttacagcgtctccctcctattctgtagcgcgacggcaccactaaaacctagcagaggctcgtgccgccaccgccagccgcaacaaggaaggaaccaggaacacgatgcccaagtccaagcgcaaccgcccagtgaccttatcgaagaccaagaagaagccaggtttggagcgcaagggcaaagtagtcgccgagataaaagatgccgtggacaagtacaccagcgcctatgtttttacctacgataacatgaggaatcagaagctcaaggacctcagggagcagctcaagtcttctagcaggatatttctcgctgggaagaaggttatgcagatagcgctggggcgttcagctgctgatgaagctaagacaggcctccacaaactttcaaagttccttcaaggcaactctggtctgttattcaccaatcttccaagggatgatgttgagaggatgtttcgagaatttgaggagcatgattttgcaaggacaggaagtactgcggcagatacggttgagcttaaggaaggccctctggaacagttcacacatgagatggagccatttctacgcaagcaaggacttccagttcgcttgaacaaaggtgtcgtagagttagttgcagaccatgtagtttgtgaggaaggaaagcccctttcgccagaagcagcacagattctgcggctgcttgggatacagatggcgacattccgtctataccttgtatgtcgctggtcgagcgatgaatttgaagcttacaaagaaggcttgatgcacagagctgatgattcctcttaagcttgtgtttcgtgtatacacaacacaaagggagcacttgctgtcttggctgggttggaaactagaaagatgctgtctgcagaaaaattttgctagtgtatttctgagattcagtggggggttttgtatgtgcgacgcggtgctgaacctaaagaaactgtttggattcaggtttctgagttgggtttacttgttcaaactgaatgtagctcagtggcaaatggcaaatctgtacctcgtgcaatgtttttgagccgtccgattaatcacgattaatgatccaagtaggttt

SEQ ID NO: 4491 - DNA, 941 bp, Zea mays
  Clone ID: 700380274_FLI
cggcccgggatcacccccctgtgacgagtaagccaacctccatatcatcacggtagtgtattgtaacccactggggattccacctctgcttctttaacttcgacgtcgaccgtaatcaccaattagttaagtctgaatttcctcagggtcgcacacgcatgacatcacctccgcggacttcgtggtcaagatcgatcgctgtcgtgctgtcattgattagtgatttgtgaattctaaatttaaaatacattatatatacagtgaaataaattttaatttatttttatctttatatacaacatgtttggcatttagatgtagaattttgaataatttaatcacccctattattgagaataaagttttgtttatattctattttctatcatgatacacatgtgagaaatatttttctcaaccccgccaggtacactcacggtgcgccgccatagccctaaccgcctacaatagaaaaacgtcatcaggaaaacgctgcttgtgcatggctgctttttccactgctgcaaggacgctctcgtaggatttgatattagggtttctgtcataggatctgataaaataaattcacgagtgtgaaaagcttagatgaaatagatggagataaaataaactcacgagagccttatgaaatatcttatgaaacagatgttctagccattcgatgctcttttcacaacgttctcaagatatggaacctgaacgaacactccagcgtcgttggcgccttcaactgccaaggcgccggttggtgccgggtagccaagaagaacctcatccacgaccaccagcccagaacggtgagcggcgtcatccgggcgtaagacgtggagcaccttgcaaaggtggctggtcacggctggaacgacgatgtggtcgtgtattcgcacgtgggaggtaaaccatcatctttttttatgaac

SEQ ID NO: 4492 - DNA, 1156 bp, Zea mays
  Clone ID: 700380431_FLI
tgaagtaggtcttgagcaggtacctgatgttattcacagctatcatatatgtgtagtaaaaaataagcgtatagattcagatattattgccaaggcaactcagatgaagattataatgcagtatggtgttgggttagaaggtgttgatgtaaatgctgctacagaacacaaaatcaaagttgcacgaatacctggaagtacgacaggaaatgctgtctcttgcgcagaaatggcaatctatcttactctaggcattctgcgtaagcaaaaggagatggatactgctgtgaaccggaaagaccttggtgttccagttggagatacattatttggcaaaacaatccttatccttggatttggggccattggcatcgaggttgccaagaggctaagaccctttggggtaaaaattcttgctaccaaaagaaattggtcatcggacacattgccatcttatgttgatgagctagttgacaagaaaggtgggccggaagatatgtatgagtttgctggtgaagctaacattgttatagcatgcatgaccttaaccagcgagacaattggaattgtggatcataagtttgtttcatcaatgaaaaaggggtcatatctggtcaacattgctcggggacgcctgctggactacaaggctgtgtttgatcacctggaatcgggccatctagctggtctggggattgatgttgcttggatggagccatttgatcctgaggaccctgttctgaaattcccaaacgtcattctaacgccccatgtggccggcgtcaccgagtattcctacagaactatggcaaagtctgttggtgacaccgcccttcagcttcatttaggcgaggcgttcacggaggtagagttcgtcaactaaaaaaccgtccaggcggcagccgtagacgcatgccattcgtgggctatcggaaccgctgatgcgatcatttgtagagaataatggatccgcgacttgtaagaataaacatgtagccagatgtttgatggtgatctccatgagaactctgccactggctgccttagctggtagtggtagcaagtcattttctcaaacattgccttctctttctctgtatcactgttgtcgtcatgatcacaactttctttgttagccgggttggttaggtgctct

SEQ ID NO: 4493 - DNA, 733 bp, Zea mays
  Clone ID: 700380558_FLI
ggttggcataatacggaaggcaactctgtccaatggctttgcatagcctgtgttgaccgaaaagggatgatggcggaggttacatcggctcttacagcttgtggaattaccatatggtcttgtgtggcagaagtcaataaaaggaggggaatgggtgtgatgctgttccattttgagggaagctatgagaacgtggtcagtgcgtgttcaagtgttgacatgattcttggtgttcttggttggtctgtgggatgtagctggtgtccattgggtgttcttgagtgctaatcggtaccaagagacgtgtaccacaatagttcaccactgtcttctccaagatggagttaattttggaagcactaagacatcggtggctcaaaattttgttggtcagatcatggttggtgactggtgagcgagtggaaccctttacttctctgtcaaatcagaaagtgggggtgatcgaagtagaaccagatgtcattctgaaagtgagtgtacatagcagagcgagtagggtactgttagtgcagggattgatttgattgtacagaaggccttacaaaagattgttaagggcagttcgttcttctccccactttgtggttcgcatatactagtttgcttaaatgtgcagctagaattttgacctggacactgatcccaaattttgcctgtttaattttctcactccgcctgtaaatgttattgtacagcttcaattttgccagtg

SEQ ID NO: 4494 - DNA, 1899 bp, Zea mays
  Clone ID: 700380607_FLI
gacgagaagacggaggcgaaggacagcggctccggctgggagctgctgtactgcggcgggacgagcttcgacgccatgggtcggaaggtggtgggcggggcgcagggcaacctggtgtcgccgactcggctgcccccgctcgtgggcgttgatatccgcttcgttgcctctggatgcactgcttgccactgtgttgctttagatgctggaggcaaatgttatacatggggtcgcaacgagaagggacagctagggcatggagatactcttctgcgtaacctgccgactgttgtttctcaactatcaaaatacaaaatcatcaaagcatgtgttggaagaaaccatacagtggttgtaactgatgatggcaaatccttatctttcggtcataacaagcatggacagttagggacgggttccttaaggaatgagattgagtcatcgccagtgtcctgtatcgttgcggaagcaaccaacgttgcatgtggggctgattttactgcctggttgtcatctgtggaaggctcttctatacttacagcaggtcttccccaatatggtcaactcgggcatggaactgataatgagtacaatgctaaagaatcgtctgtgaaactgacctatgaaccccagccccgtccaagagcaatagctgcattttctgggaaaactgttgtcaaagttgcatgcggaactaaccatacagttgcagttgattccaatggctttgtttacacctggggcttcggtggatatggaaggttggggcatagagaacagaaggatgaatggcaacctcgccttgtagaagtcttccagaagcacaatgttctgcctcctaatgccattgtctcagctggttctgtgagttctgcatgcactgctggtggtggacagttgtacatgtggggaaagatgaagaatacaggcgatgattggatgtacccgaaacctgtgatggatttaagtggttggaacattcgctgcatggcttctggtaacatgcaccacattgttggtgctgatgattcttgcataagctggggtgtcgcccagaatggagagcttggttatgggcctaacgggcagaaatcatcagcaaatcccaaaaaggtggacattcttgagggcatgcatgttacaagtgtcggctgtggatttggactgtctctgattgttgtggacagagcaaatgttggtgatcgacttggtcagctggaaatttatgatggtgacaccggtgctgaagtagagaaagtggaggtgcaagtaaccaagaaggcatctgccagcaccaactcacgtgccaacaagcgcaagaaaacgaaggatgtttctgaatctgaatccgaagaggatgatgatgatgatgaggatgaaagcggagacgatgaaaatggtggtgtagaagagtcaaagggcaggcgtggccgtaaacccgctaatagagggagaggcaggggaggcaaaaaggcgacccctgaggcaaagccatctggaaggggcagaggccgccccaagaaaaccgagagttctgctcagaaagccggaggaacctcgggcagaggaaaaagaggacggccacgcaagtgatggtccgccctacagtaatgcggcgttgaaaatcagtaacgcctgatgtgatcccattgacattgaggattcattttggtagcaatgcccgttgcactctgcccattttctcactctgattgttgcagctatccaatccaaagacattattagtctcttccccctcccccaatttccgaaatggggtttgccatcccattgtaagtctagaaatgcttaacatgcacatctgtgttcttcattgacgatgattttcttcagctttaggctattaatgaacccttgattcgagtgatttatttatcc

SEQ ID NO: 4495 - DNA, 506 bp, Zea mays
  Clone ID: 700380613_FLI
ccatccgatccccccttcgcaaccaaaaccccaactcgccccgcatcgatggcgcccaaggccgagaagaaacccgcggcgaagaagccggcggaggaggagcccgcggccgagaaggcgcccgccgggaagaagccgaaggcggagaagcgggtccccgctggcaagtccgctgccaaggaaggcggcgagggcaagaggggcaagaagaagggcaagaagagcgtggagacctacaagatctacatcttcaaggtgctgaagcaggtgcacccggacattggcatctcctccaaggccatgtccatcatgaactccttcattaacgatatcttcgagaagctcgctgctgaggccgccaagctcgcgcgctataacaagaagcctaccatcacctcccgtgagatccagacctccgtgcgcctcgtccttcccggggagctcgccaagcacgccgtctccgagggcaccaaggccgtcaccaagttcacctcggcctaggctgc

SEQ ID NO: 4496 - DNA, 1097 bp, Zea mays
  Clone ID: 700380722_FLI
ggtcatgccgagcttctattttacccaccccttattaaattattcccatgacttgcgagtttagaggcaactaagaatgagaggcgcagttttgaactgtggaaatagttttcgtccatcggttttgcaccatgaaaatctaaggccctcactcctatgctccataatagccatgtttatgattgagcaagccatatccacaactatcttgctacctttctcatagatagtttgtgcaacccatcatcccaaattaccaaaaatattgaataacaaaattcaatcaagaaaaaactttacatattcatccaatagagcggccttagtagcatgcatcacacctcactattgatgcatccaatcttcctgatgacatagtacactttaattgtatcaccacttaaacatattcatgcggacttgaataattgtgggttaacgggagagggcgttgagagataacgtgactcccaactttgaccttgtcattgtggctttttatatctttttaaatgtcaagatagtgaatcagaaaccttctactagtctggttcattcttgatcacgtcacatgtattggtatttctcgacctattatgtgaccaatgtagcaaaaaaatgtctactaagagactgatgattgatgtaggtacaataggaaagatcaaatctggagacatcagtgtaattaattatttcttttaatttttatattgatgccaatatatgaatatcttacttacataacttgtgatgttatacgtattgcatatcccctctaactttttgtaagtgcaatcaaccacaattgagagttttggtgatttaatgacaaaacaaataaggttacttacaagtttgctcctagtgtatactcagtgtcagtaaagataaataacaactttagttgagaaatgaaaaggtaagtatcaaggacaaagcaaatacatcagtggtgccttgaaaagtttccatgcgacaatcgtgtaaaattttctatatatcttgagtcgcaggatcttattcttccttagtagttttcgcacatgtactggtgtttgctatttctcaagcctctaaattcaaaagttattgtg

SEQ ID NO: 4497 - DNA, 505 bp, Zea mays
  Clone ID: 700380745_FLI
agatagatgctgttgatgcaagcactgtgaagcgtgttgcaaacgctttcatcttggatcggtcccatcgcagcaatagcaacatcctgatcaaagatgaagctattgctgcgatgggaccgatccaaggacttccagaccacaactggttcagacgccggacctacatgctccgttactaagatcaatctgccggtgtaccatgtttacggtgtgcaaggacaaagataaaatttgcctctttcggcgtcagtatatcaaggcctcagcactgcacatcgcttgctgcgacagaggtttttttcttcttcagaatttgttttctttcttgtcttgctcagaatccacaaatctgccaataatgataggcaggttcgactgacgtggctgacttgggtggtcagcctatgttatttttcttacaatgagtcatgacccttaccgttccatcttttgctggaaggtttttactttggcaaataatttgatgtggctcgttatatgt

SEQ ID NO: 4498 - DNA, 1691 bp, Zea mays
  Clone ID: 700380756_FLI
cacaaacgccggcgcaaactctcgcccgagcccgacagatcttcaattccccattccgcccaccgatcgaccttcacgccagtctcggtctcttccgaaggcgtcgcgcgcggttgtttgagaggagaggaggaagatgagggagtgcatctccgtccacatcgggcaggccggcatccaagtcggcaacgcgtgctgggaactttactgcctcgagcacggcatccagcctgatggccaagtgcctggagataagaccgcgggacatcacgatgatgccttcagcaccttcttcagccagactggtgctgggaagcacgttccccgtgcaatcttcgttgatctagaacccactgtgatcgatgaggtgcgcactggcacgtaccgccagctcttccaccctgagcagctcatcagtggcaaggaggatgcagctaacaatttcgcccgtggccattacacaattggcaaggagattgttgatctgtgccttgaccgtatccgcaagcttgctgacaactgcaccggcctccagggcttcctggtcttcaatgccgttggtggtggcaccggctctggccttggttctctcctccttgagcgcctgtctgtggagtacggcaagaaatccaagctgggcttcactgtgtacccatctccccaggtgtcaacctctgttgtggagccttacaacagcgtgctctccactcactcactgctggagcacactgatgtctccatcctgctcgacaacgaggccatctatgacatctgcaggcgctccctcgacattgagaggcccaactactccaacttgaatcgccttgtgtctcaggtgatctcatcgctgactgcttctctgaggttcgatggtgccctcaatgtggatgtgaacgagttccagaccaacctggttccttacccgaggatccacttcatgctctcctcctacgcaccggtgatctcttctgcgaaggccttccacgagcagctgtctgtggcggagatcaccagcagcgcgttcgagccggcttccatgatggtcaagtgcgacccacggcacggcaagtacatggcttgctgcctgatgtaccgcggcgacgtggtgcccaaggacgtgaacgccgcggtggccaccatcaagacgaagcgcaccatccagttcgtggactggtgcccgacggggttcaagtgcggcatcaactaccaggcgccaactgtggtgccgggtgccgacctcgccaaggtgcagcgtgccgtgtgcatgatctccaactccaccagcgtcgtcgaggtgttctcccgcatcaacagcaagttcgacctcatgtacgccaagcgcgcgttcgtgcactggtacgtcggcgagggcatggaggagggggagttctccgaggcacgcgaggacctggccgccctggagaaggactacgaggaggtcgccgcagagggcggcagtgatgacggtgacgaggaggaggaatactgatctgcttgcatgaatctgtttggctgtcgagccaggttgtggtgttgaaaaacctttgtttgtgtcctggccccctgggtaatgtttgggtgtttccttccatcatcacttgctgaactgctctagtatttgcatttgtaattgaagtctgtcgctttaagcactcttggttctaaagttctctgtgcttttggggggtgtt

SEQ ID NO: 4499 - DNA, 1254 bp, Zea mays
  Clone ID: 700380822_FLI
ggtaagtccaagaagggtcagtatgaagggccagatatggacttagctgcaatgcttgaaagggatgttctggattctactccaggagtaagatgggatgatgttgccggacttagtgaggccaaacgactcctcgaggaagcagttgtgcttcctctctggatgcctgaatattttcagggtattcgtcgaccttggaaaggagttcttatgtttggtccaccaggcacgggaaagactcttttggcaaaggcagtggccaccgaatgtggaacaacattctttaatgtttcctctgcaacactggcctctaaatggcgtggcgagagtgagcgcatggtccgttgcttatttgatcttgcgagggcctatgctccaagtacaattttcattgatgaaattgactccttatgcacgtcgcgcggtgcctccggcgaacatgagtcgtcaagaagggtgaagtctgaacttctagtgcaaattgatggtgtaaacaatagctccaccactgatgatggccagccaaaaattgttatggttctggctgctacaaattttccatgggatattgatgaggcactgaggcggaggctggagaagcgtatttatattccacttccagattttgaaagtagaaaggcacttatcaacattaatcttagaacagttcagatagccgcagatgttaacatcgacgaggttgctcggaggacagaaggctatagtggagatgatctgacaaacgtttgccgcgatgcctcaatgaatggcatgaggcgcaagatagcaggcaagacccgcgacgagatcaagaacatgtcaaaggacgagatagccaaggacccggtggccatgtgcgactttgtggaggctctggtgaaggttcagaagagtgtctcgccttcagacatagagaagcatgagaagtggatggctgagtttgggtctgcctgagacctcggccatctgcttgggtcctgttcaaacattcgttttgtgtgggttgacacggcattccgtagcaatgatacggtgttacccgccggtggtcttgcttcatatagaccagaggcacgagctatcttgtctgtttccagtgatgctaggaattgagttcacgatcgtttcagttcttggtatatgcactttctgctgtcaaacgtatctcatcaagtagccgtggccgcctctatttccagatgctccgtgtttggttgaaggaatatcacaggaaccaaagttttagcgtgtttc

SEQ ID NO: 4500 - DNA, 660 bp, Zea mays
  Clone ID: 700380835_FLI
ccgattcgaaccatccagtctccgtgtccagtcgagtctcagcaaggaagatgtgggggaaaggaaagaagcgtttcggcggtggcggcagcggtgagcccgcggccaagcgccaggccgcgagggacgatggcccctccgaatccgctgaagacggtaccgtcgtagccgagatatcgaagaacaagaaggtgtccgttaggagctggaaaggcagggtcttcgtcgacttacgcgagttctacttcaaggacggcaagactctccccacccgcaaaggtatatcactccaattagatcagtggaagatattgaaggacaacatcaaagccataaatgaggcaatcgaggaaaatacatgatgggagccgccaagcagtcacgtgatgggcgaacttttgcttcttctctgtttgaggcctgatgtacggaagtagtttttgttgcccatatgctgccgtgttgcttttgtccatttgaccacctgctgttgtaggtggccgcatggccgaaaggtttggtttctgccccgtgctactagtaaacttaaacgtcggacggatgacgtaacttctcactattatcttgtagccaaaaacagcttgttaggattgcagaactaagatttagtgtaaaaatgatccggtttctttcttgctt

SEQ ID NO: 4501 - DNA, 2120 bp, Zea mays
  Clone ID: 700380861_FLI
cgttttgctccgtctctcttcctcctcacttcccacccaccctcgctcgttttgttctgtctctctttctcctcactccctccgtcgatcctctgcagcttgcatcggtcgaccagtagtcttccactgtaatcgcctctcattattctttctgccacgctcctcttcgtccttactccctccgtcttgtctatctgtagccacttcgtcttcctacgtttttgccaggatttgaggctgtcatagtatgctctctgaccgtgctggcgggaggaaggagatgatttaagttctctgcgtttataaccagaaagaggaggataatccaatcatgtgaaatttatatttgcctgttcccaccatactgtaatatgaatacaaggatggcttgatctggcaagtgctcgccattctatgggcccatcatgcttttcgagtacactgtttgatcacaaggagcggtctgctgccactaaacttcaagttgttgatcatgatggcctgaaaaattatcggggatatgctcatatgccttggccttaatttaaactacttgtatgagatggagaaatgtcacaaaacacaggatgaagacgactccaggaatccacccatgcctctcagtgactcagtggcacaaacgacagcctagtcagccttcagcgatggaggcctccacagaagctactaggatggcctccagcttatgacctctcactgccgaccgcaccttcctcagaatatgttgcttcatcaccgccctctcagcagactggagtttcttgcacatgttcaatccctggatgtacctcgacaccgcgccgccgaaaggatcaccggctttctcaagggccacgagcttctcgacgatctgagaagcgagcattctctcgatacagggtttggttccaacctccgtgatgtccaccagaaattgcatggctagatccttggtcttcaaagacttgcggtccagcaagttcaccagtttctctatggttcttagttgcagaaatctttgcaagacaagggatccacccttcgcaaagacgatctgatggagagcgtagtacgctgaatcctggagctcatcgatgttgcactgcagcatgtcaatgagctcgtgaacaatattaagctccaggaacctatgcacgtatggctctcctccagtgcaggccaatttcatcaccaaaaaggcggtctgggacctcacctggttcttttcaacctctctgcgttgtagcagccaagccaacctatcaaacagatggcttcccagaaggaggtcctgcacccttgtatcatttgccgtttcagcaagagataataaaccttggatgcctttaatgatatttttgttgtctctctgaaggatattatgaagaatcacctcaaatgattgttgaggctttggtgattgcggcacatttctgtcagataaaacaaatctttccaaactgatccgagcatgccagggcaaatgaagcagcactgcaggccctatgcacccttgaagtggagcaccaagttcacagaatgtttttagcgtgataatcgcgtggtgctgtgagatctcagaaccattgcccagaagcacaagaagtttattgtcaattcctgattcaatcattgtctcaacagccttcagctttccaacctttgtcagagatgcaagtgttgtaaacacaatttcatgccactgctcattttctgcagtcaagagatctgcaattcgaaccatgggaattcttgacaaaatttcatccgcaattgtggcatcaacatgctcagatatcttggtcagaacagaagagaggttggctagagttgaagtatcttcacaggcaccaagaagatcaattaatttatctatggaacctgctatttcaagagagtgagcaagatttatgtagtctgatggggaaaatataactgtaattgcggcagtgactgcaaaaataagatctagtgaccctatagaaattatctctgctattcgagggccaagtattttgctgaacccaattctatttgtctcaagttcagacagggatctgcatgccatgagagcttgagttgtgtttaccaataaaatctcgatgtccatgaattctagc

SEQ ID NO: 4502 - DNA, 2170 bp, Zea mays
  Clone ID: 700380913_FLI
ctcttgtctgatctaatggatgggagccgtatcttgatattcttccaaacaaaaaaggattgcgataagatcacccggcagcttagaatggatgggtggccagcattatctatacatggtgataaagctcaagctgaacgggactatgttcttgcagagtttaagagcggcaagagccccataatggctgccacagatgtggcagcacgtggtcttggtatgatgatttatttgaatattaggattaggtagtagttccaagtgctcaagggtgataagtcggagggttgttgagctgcgattggttgagtgaactgaacttgtggattggtggtgtataccaaggtgccatcatgtcaaaggtagataatttccccccgtggtttacctcatttgagcgtgagcattggcagtgttacacaggcagttcaactttgagctatcatggtaatgttccctttccgaataagccttttagggagcctacatttggataaaatggaaatcctcaaaaagtagcatgcaaccgaatatgcatttcacactatagttgatttcttagcttgatttgaattccttgatccctgcatatctgaccattttggaacatttaggtattgtgttgctgccctcttcattcattctttgtccttgtaattgaattcttttcaatccaatagtctgcttttcttgcaagtatttttggcttacctttctacattttctttgtaaatccatgtttaatttgtttagaattaattggagcaataattcttttcagagatgtattgcaaaattttaggcataaaacatttgtatacaaatgacaatatcaatttcaaatatatttgtttgcacaaatgcacattcttcatgagtagcatgtccatggatctcctttgctttcccctagttttacatgaacctttagaaagtcgttctgctttctcaatcaagctcctcatcatcggtatcactgccaagtgtgaactggtcaaaaaggatggttgtaatcagcattcttttcagttgattcacgatagtgacctctgatgcagcaccttacacattacagcctacgttggactggcatgtcctacagaattttgtttgggttatggatattgatgctgttacattattggataagtggttacccaggcatgccagttgcagtcttccaacattttttgataaggctgagaggttaatcaccatcaattccacatccagcagtgattgatgcctggttcagtttttcagctccttcgacttgtgttttagaattcaaaagtgcagcactgtggactttttggtgcttgtctagaccatgtaccttctatggggatcgacaatgttgatgttccagcgtggtccagcatggtattcaggacaacacatcaattttgattaagtactgataatatttgttgattttgcagatgtgaaggacataaagtgtgtgataaattatgattttccaacaactcttgaagattatattcacaggataggtcgaactggccgtgctggtgctagcggaactgcatttacttttttcacacacgcaaatgcaaagttctcaaggaatctagtgaagattctgcgagaagctggccaagttgtgaatcctgccttagaatccatgtccaggtcttcgaactcaacgggaggaggcaattttcggtcgagaggcagaggtgggtttggtaaccggggccatatgtctggatcaaatacctttcctttaggaggaagaaggccatattgatgtgtgcaaaagaactgtgggagtatgggactatttgtatactactcggcattaagtgcattctttgggaaatttctgagaaatttcccctactaccaggattgataacaccatcgattttcgctacagtacctggagcttcttatatgaaagaacaacacatcaactatctagcaacagcatatgcattccattcagatatttcttttggaaggaccctgtcttgttttagtggagtccctgtgatcgtttaaagtcgtctgtatacttgtactgaacttcttgtggtgttactgttaggatttatggttgctctctattggtgtgcggtgttactgaacaaatttagttaagaagttaggcatttccatatttaatctgattctgaaataaactagc

SEQ ID NO: 4503 - DNA, 1511 bp, Zea mays
  Clone ID: 700380914_FLI
cttcgtgccgctgccgccgcgaccagctgtggcttcatcagatgatggtgactctgatcagatgatggacctgcgcaagtcgcggcctttgcactcggacaagctcaagcccggctctttgcacatgaaggacgaggtgatccagctatacctcaacaattcggcagcagttgcggcaccaagggaggtgtgtttgcttggtgccctcaggtgtcatggcatcgggatgattgtaggagcattgggagtttccaaggagcaactgaaggatgcactcttggaaggtaatgtacatggtttgggagtggaagccttgcagatgctcactcagatggtgctcagcaatgaagaagagctcaagatcaaatatttcaaggatgactccctgaacagactttgcccagttgatgtttttttgaaggcaatgctggatgttccatttgtgttcaagagagtagatgccatgctttacattgccagcttctatttggagatcaatcggctgagaatgtcgtatgctactcttgagggggcttgccaggagatgagaagcagcaggctgttccacaaagtccttgaggctgttgtgaatttcggcaatttcatgagcaccaattcggggtctccaagttcaaaaggcttggagccaaacactgttctgaagatagctgatgtgaaaggagctgatgggaaggctgctctcatgcagttcattgtccaggaaattgtgaaacctgaaggatatgatgtgatgcagcatggttcaggtgcatgcaagatgagcacaaacactctgcagtgtgatgccgagtgcaggaagcatggccttgaggttgttgccaaacttgcagcccagctgagcaacaccaagaaagccgcctccattgacataaaaaggctgagccaaagcgtgtcagagcttggaatggggcttgggaaggtccacgacgtggtgaggctgaacagcatggttacatctgttgatagcgctcggcgtttccacaatagcatgagcacatttctaaggcacgccgaggaggagatcctgaagctccagtcccaggagagcatctgcttgtcatcagtgaaggagatggcggagtggtttattggggagtcagtcaacgatgaagctcacatgttcagaatctttgctggagtgaaggagttcctagctatgctcgatcatatctgcaaggaggctggggaggtgagcagcaacaattgggtcggcgcgacaacggcgagctggatggctgcacccatggggatgatgccttaagccgctggagctgtcttggcaaaatctgtagctaccctttttgtagaatatttcatatcaagctatttggactagtatggttcctagtattagcagtagatgagaacgatgttatggtatgttaagccgaagcctctctctatataaatatatctggataatgtatgctggacacccgtctattgtaaagtttactgttactggtaatggggtttgccgtcctttcctg

SEQ ID NO: 4504 - DNA, 1761 bp, Zea mays
  Clone ID: 700380945_FLI
ggccttctaaccttgcccaggtctcactcttcagggcgctgcacgagaaagaagaggagggcggcaagtcccgtggcccgtcgcggatgcgcttcttcctcatcgtcttcttcgcgagcttcgcgtactacgcgctgccggggtacctgctgccgatcctgaccttcttctcgtgggcgtgctgggcgtggccgcacagcatcacggcgcagcaggtcgggtccgggtaccacggcctcggcgtcggcgcattcacgctcgactgggcgggcatctcggcgtaccacggcagcccgctggtggcgccgtgggcgtccatcgccaacacggccgtgggattcgtcatgttcatctacgtcatcgtgccgctctgctactggcagttcaacacgttcgacgcccgcaggttccccatcttctccaaccagctcttcacggcgtcgggccagaagtacgacaccaccaaggtgctcaccaaggacttcgacctcaacgtcgccgcctacgacaactacgggaagctctaccttagcccgctcttcgccatctccatcggctccggcttcctgcggttcacggccaccatcgtccacgtcctgctcttccatggcagcgacatgtggaagcagagcaagtcggccatgaacgcggtgaagctggacgtgcacgccaagctgatgcagaggtacaggcaggtgccgcagtggtggttcctcatgctgctgctgggcagcgtggtggtgtcgctgctcatgtccttcgtctggaaggaggagatgcagctgccgtggtgggggatgctcttcgccttcgcgctcgccttcgtcgtcaccctccccatcggcgtcatccaggccaccactaaccagcaaccggggtacgacatcatcgcgcagttcatgatcggctacgcgctgcccggcaagcccatcgccaacctgctcttcaagatctacggccggatcagcaccgtgcacgcgctatcgttcctcgcagatctcaagctcggccactacatgaagatccccccacggtgcatgtacacggcccagctggtcgggacggtggtcgccggcgtggtgaacctggcggtggcgtggtggatgctggacaacatcgagaacatctgcgacgtggaggcgctgcacccggacagcccgtggacgtgcccaaagtaccgcgtcacgttcgacgcgtcagtgatctggggcctgatcggcccggggcggctcttcggccagcacgggctgtaccgcaacctggtgtggctgttcctggtcggcgcggtgctccccgtgccggtgtggctgctgagcagggcgttcccggagaagaagtggatcgcgctcatcaacgtgcccgtcatctcgtacgggttcgccgggatgccgccggccacgcccaccaacatcgccacctggctggtgacgggcaccatcttcaactacttcgtcttcaggtaccgcaaggggtggtggcagaagtacaactacgtgctctcggcggcgctcgacgccggcaccgccttcatgggggtgctcatctttttcgccctccagaacgcgcaccacgagctcaagtggtggggcacggaggtggatcactgcccactcgcctcctgccccaccgcgccgggcatcgccgtcaagggctgcccggtgttctgaatcttccgacctgagcgtagtaagcagtgtttgtaacagtgtaaggaaatgtttgctacgggaaccatggattcaaccaagcatcaattaaccg

SEQ ID NO: 4505 - DNA, 1414 bp, Zea mays
  Clone ID: 700380962_FLI
gttgatcttagtactgctggaacttatctaaacaaaaacttttctgatataagcacagagcaaggttggagaacaacacacaaccacacaagtaaattacccatttcgtttatgggtaatataactagcagttccggatgggaatctggatcttctaccacacgatctaatcaaaaccatggatctgctggaggcaatcatagctctgttagtggagcaaacataatagttcctgataagatagggaataaaacaataatgcttggtagagaaaggagaaaacaaacctcaacttcttcccatattggtgaaagctctagtgctgctgacgaacctagaggtgatcttcaatcgtcaaaaatatcagctggcccaaaccatagcagtcatcagcataatattcctgtaataaacattgatgacatatcccctgaagctaggcctagttcgagtggattcactaatagaactgttgatcctaccatagaagcacaattggagtcggatgagttattggctcgccaactccaggagcagctctacaatgaatctgctcgttttgccccaacagaagagattgatgcaatcgtagcaatgtcacttcaacatgaagaagatactcatcggacatctaggaccttaaggaggttccaaaaccatactagaggtgctcgggctactcgtttgagttcttatcgaaatgctcttagggctgaattagcaacagcaaacaatatgatttcccgtcagcggaatactgctccaataaatttgggattgagagctgctttagcaagatatcctggtgctttgcacattcaaccaaacattgacttaaatgactatgatgcactgcttgctctggatgaaaataaccaccagcacactggtgcttcagaaagccagatcaataatttgccacagtcagtagttcagtccaatagcattgaagatccatgttctgtctgccttgaaaatccttctgtgggagatactatccgccatttgccttgctttcacaagttccataaagaggttatccccctgattgttatgtttcagtcactttcgttgaattttgtcgcatttctgatgacaaactgtttgcaagctacagtgtattgacgagtggcttaggagaaagaaactgtgcccagtctgcaagtttgggattaactgaagtttgccgtaccagtctacagtggagttctacttggtagtggcagcgacgaggtgctgcaatttctcatacgggatgccttcctgcagagatttttttttgtctaagataaaaaaaacaatgtattgctgtgatctgcgcttttgggcatcattttgtatgcacgcacgttttcttgctatttttgttgtcgtaatccaccaattcccatgaattggttaccagcatcttgtc

SEQ ID NO: 4506 - DNA, 1198 bp, Zea mays
  Clone ID: 700380989_FLI
acaccccacactcaactatatacgaaaaccgccggcgcctggcccctaggccctagtcacagacccttgttctttcttcgacgcgcccccgggcatggcgaaccgcagtgttgccatgggcgtggccgtcgcgttcgtggccatgaccgcgctctgttgcgcgccgggcgccgcggagttgcccaggctggaccacccggccaggagtgacggatcgctgaagctgctcgtcgtcggggactggggacgcaaggggactcacaaccagtcccgggtcgccgaccagatgggaagggtcggggagaagctcgatatcgactttgttatatccaccggggacaacttctacaagaacggcctcaagggcgtgcgcgaccaggcatttgaagaatcgttcatggatatctacacagctcaaagcttacagaagccatggtactcagttctaggaaatcatgattacaggggcaatgcgctcgcacagcttagcccagtcttgaggaagatcgacgaccgattcatttgcatgagatcgttcatcgttaacgcagaacttgtggacttcttctttgtcgacaccactccgttccaactggagtattggactcacccgggcaagcatcgttatgactggagaggggtggcgcctcgaggcaagtacattgccaatttgctgaaggatctggatgtggctatgaagaaatcaactgcaaggtggaagattgtggttgggcatcacaccatgaggagtgtgagtgagcacggggacaccgaggagcttctggaattactacttccagtcctcaaggacaatggcgtcgacttctacatcaatggacacgatcactgcctggagcacattagcagcagagacagtccactccagtatttcacgagcggaggcggttccaaggcatggagaggagtcttccatccaaacaaggacaagctccggttcttctacgatgggcaagggttcatgtccctccagctgcaccaagaccaggcccacttcatcttttacgacgttttcgggaacatattgtaccgatggagctcgagacatccccagtcctccatgtatctcgatgaggaatagattagattgattttgcaccattgatatgtacaaaacaccgcatgtcaactgtcatgtatgtgaaatgatgagtgttggacgcaaagaaggttatacacc

SEQ ID NO: 4507 - DNA, 623 bp, Zea mays
  Clone ID: 700380994_FLI
ccaatctgcccttgccgccgccgccgacggatccaggtctgtagactgctcactcctctacgctccgctccgaatggcccgcacgaagcagacggcgcgcaagtcgaccggcggcaaggcgccgcggaagcagctggccaccaaggcggcgcgcaagtcggccccggccacgggcggcgtgaagaagccgcaccgcttccgccccggcaccgtcgcgctccgcgagatccgcaagtaccagaagagcactgagctgctcatccgcaagctccccttccagcgcctggtccgcgagatcgcgcaggacttcaagacggacctgcggttccagtcgtcggcggtggcggcgctgcaggaggccgcggaggcgtacctggtggggctcttcgaggacaccaacctctgcgccatccacgccaagagggtcaccatcatgcccaaggacatccagctcgcccgccgcatcaggggcgagagggcttgagctgtcgcgctgctgttcgtcgttgtaatatttgaagatggcgggttcgtttcatgtcgtgcttatcgtggatgtgttgccctcactgaatggaatgcgactgcccttgtccgaaattaatgaatgcccttgttccttc

SEQ ID NO: 4508 - DNA, 454 bp, Zea mays
  Clone ID: 700381024_FLI
ctctgacaaagaaaatatagaaaatacagctttgaagcatgagcatgtcacaagcaaacctccatcgatactcatggtagaggcacgggtgctcgatttcaatgaatgctccacacctgtgaggaagaaagacgataagaaagtggaaatggttttaggaggacctgcaacatcccctgttacttcctcgcatctttggataaatatgcggtagccctttgaggtgagtgggagtggggatgcttcgcctatgctgttcagtatgtacatgtctgttattcccataatttccaccgttttgaaatacacattccaattagtactttattctttgtgcttggtaccctaaatgtcaattctaaatggaaatacatttttttgtagtgttaagatttgtaatgtgtcatttgattatgttaaatattaaacaaggcaatatatttaaattcagagt

SEQ ID NO: 4509 - DNA, 1130 bp, Zea mays
  Clone ID: 700381026_FLI
cgtcatcgcaaaatgcaggctctcctgctccccgcgcgggccgcgccgccgacgccggcgatgcttcggcagcgtgcggtttctgcctccgcgtgtgcgtcgcaggtctgccgccccctattcggtgccgccagttgcatctcctgtggggtccacggaagcgttcggcggcacctcacagtggcggtggcggcggccccgccctcgccttcgtcctcaccttcgtcgggaccgctctacccgacgcctccacccaccgagcaggaggtggagagggtcaagctcgagcaggttatgaggagactagagaaaacagcaaggtatttcaagaatttgggtaccctggggttctggtcccaattggtgtgcacaattatttctgctggaattttggcattctctacagttgtaacggggaaggtgacatcaccctttacattctatgcaactgctgctggtattgctgctgcttttatttcagtcttctggtcatttggttacatccgtctctctgaaaggcttagaaaaacatccaaagaacctgctaaggctcctccacgtgctgatgttgttaagagccttaaaaatggcatcgtggttaatattcttgggatgggcgctgctgttctcggcatgcaagctactgttggtgctttggtagcaaaagctctcacaacctctgcagtaccctattatcaggctgctggccaaagccctgtcttggctttagatgttttcctagttcaggcttcagcgaacaccatcctgtcgcatttccttggggtggcgagctccctggagctgctgcgctcggtgtcactgcctccagcagaagccgccgtcccggccccggcccctgcacgggcctgagccatggcccgttgggcaggtcaagaaaaaccttcaatccttggctttggctctagacagttgctatttcttgattgcatgtacaacttgcatcaagaatacatacacatcgatgccttccagttcacctggacgcaacatgttcgcgtaattcccgccgagtgtgagctcttgcatgagcactcgcgaaccacatgtggcgcttgtttgctgtgcaagtgcaagtgagtgcagtgaccggctctcgctcgttcttaatc

SEQ ID NO: 4510 - DNA, 1344 bp, Zea mays
  Clone ID: 700381041_FLI
acatttttgtgaattttaaccactttgttcttctgaacttcagagaaatagtgattctgtgctacccaaactgaaagacttgcaggccaatcctccttctttgcatgtctcagtatataatgagatcaagagttctcttggagaggcatcaaaatctcctgggtttactgtgatcgcgggagaaattgactcaaatgttgctgctgctgatgatattgattgggacatttctgtggatactaatgaaattgattgggacattggtgctgtggaacaacctggtgaagaatctggcgatggctttggatcgtatgaaattattgatgctaatatagagctggccggttctgaaaattataatgttggtgtctcagacaaatcaatgaacaaagaagatcttgcatcatctgagtctggtatttgctgggacatcactgctgatagttctgaagaaattgctagtatacagaatgcttcatctgtattagagcaatctcagtctcaaatgatagctgaagatagaagtttgttgctggaaaaagaatataggaataatattctggatgatttactcgaggtatgttgaccattcccactccctccccatcttttctagttcagatgctattgcataatctttcttattacctttccctttcatcttgtttgtactgaagaataatgttatttttagaaattcagttggtgactagtgtttgcgttgtatggtgagacaaggctgctttctggatgcaccctctcattgccattgtactgtatagttcattaatttatggtaactgaaacaggtaaaatcatttttgactcaacgcttaggggagatgaggaatgcagacacatcatctctacagcatcaagtgcaagctgtctcaccttttgttctccagcagcatgctcctgacagtttggagaacatgcttgtagagatctcgtcagcaatctcattgctaactaatcagaagactcttgaccttataatgatccttaactctaaaaggtttctggatagattagtttcaagcttagaagagaagaagcatcacgaagtaaaactacgggaaggtttaggtgatttatctgttaagcgtatggagctgcaaaacgcactgtcatcatcatggccaaagcaagaggcagcaattacaaaaacaagggaactaaagaagctgtgtgagtcgacactgtcgtctgtttttgatggaagaccagtgtatataattggagagatcaatactttactgagctcaagtgttagtcaattagctggatgactgtatttccgttcctggaccaaataagattgcaaaaatattatcttatggt

SEQ ID NO: 4511 - DNA, 656 bp, Zea mays
  Clone ID: 700381065_FLI
atctccctagcagcagatcctcgtgcaacgcaaagcgctagccttcctactgtcccgatggcccgcacgaagcagacggcgaggaagtccactggcggcaaggcgccaaggaagcagctggccaccaaggcggcgcgcaagtctgccccggcgaccggcggagtgaagaagccccaccgtttccgccccggcaccgtcgcgctccgggagatccgcaagtaccagaagagcacggagctgctgatccgcaagctgccgttccagcgcctggtgcgtgagatcgcccaggacttcaagaccgaccttcgcttccagagctccgccgtcgccgcgctgcaggaggcgtccgaggcctacctcgtcggtctcttcgaggacaccaacctctgcgccattcacgccaagcgcgtcaccatcatgcccaaggacatccagctcgcccgccgtatccgtgtggagagggcctaggcgtcgtggcggtggaggtcgaagtagtagtcgcagtttctgtcatcaccgtctggctagaaggtgtagagatgtgccgggttctggagtttgggttatcggtcgaatcatgatgtagttggttcttcacagctgtaatttaactatgacgatgccatggcaatgaagttctcagctatgagttcccg

SEQ ID NO: 4512 - DNA, 2113 bp, Zea mays
  Clone ID: 700381069_FLI
gttttctgttccctttcaccccgcgtgcgggcgctatccttcccgtggcgacgtctgggtgaccgctgccgcagccctacactaggttcctaggtattcgccgggcccttccccggcgacgagcacccaccatgtacatgagaaatcctttttcaaatttgtagcttaggctacctctgtggggatcttctgtgaagcaagagaagttacctagcacacaactcaaagttcagtagattattgaggatcaacatttcagccatctgtatgttagttaatatgatggccgatggtaacatctggttagaaagatagaaactcattattgcgctacatatggtagtgcccattcgacataagaactaagctggacattggtagatccaagttattaatggcgcacacttcctgtgatggtgtacatcatgttataagtgtagcacatggggaaactgcatcaacatcaaccagtcatcaagatatgtgcagtgactcggatgaaccacatcaggaagataggctatcaacaagcacacaaaccctgtcatcagagtcttcgccatcaatatcaccaactgcttatagcaccagaaatttatcttttcctagaagagatagtatatatggtcatggaagaagtccatggaattctggtttatggatctcgtttgaaattgtcatgtacattgctcaggttgtagctgctattgtcatcctcatcttttcaagacatgaacatccccatgctcctttgttcgcatggataattggatatacacttggctgcattgctagtcttcctcttatttattggcggtatgttcatcgaaacagacatttggatcaagaacctcagcagccacctacaacatatcctactttgactccttctcagtcatcagaaggacgcaaccatcgtaccagtggtattgttttgcatcttggatgtatctcaatttcttgcccaaggcttagtgtgctggcttatcacttcaagacaggtgttgactgtttctttgctgtatggtttgttgttggcaatgtgtggatttttggtgggcgcagtatttcatcagatgctcaggacgctcccaatatgtacaggttgtgtttggcattccttgcgcttagttgtgttggatatgccattccttttataatgtgtgcagcaatatgctgctgctttccatgcttgatttctgttttgcgtcttcaagaagatttgggtcaaaatagaggagctactcaagagctaatagatgcattgccaacctacaaattcaaaccaaaacgtgtcaaaaactgggggattgaccatgcttcaagctcagagcatcttgatgagggtggcattcttggcccaggaactaagaaggaaagagttgtttcagctgaagatgctgtgtgctgcatctgtcttacgaagtatggagatgatgatgagcttcgtgagcttccttgcacacacttctttcatgttcaatgtgtagataaatggcttaagataaatgcggtgtgcccactctgcaaaacagagattgggggtgtggttcgatctttctttggcttgccatttggccgccgccgtgtcgataggatagcggcaagaggtgtagctagctcaagattcagtgtatagaacaatgctgtttttccgcataaagagctctgctctgttgcaatggtttgattgattgtcaaggaaagcgctgtgtgcatgacttgaagacaatgacacctggtgggagacctgatgcttgtaggggcaaatttctaagaaatgtaacggactgaaggtgctgctatactctgatgaacattttttttccaagtatgtaaataaggaacacgaagttcgcttgccaggtataatgcaactttgcaagcaacttcacaggtgctctagcatcggccttggtgttctttccttccttctggttctgtgattctcttcataacggcaatgcactgcatgcattgtaaggctgtcttcagtagcttactcattctagtttctatcatcatatattctattttaaacttcaccttgtaaacagtgtaatttataatataaaatagttatttataatataaaatggtgttttatgcgatc

SEQ ID NO: 4513 - DNA, 1031 bp, Zea mays
  Clone ID: 700381103_FLI
gtcgatttctcaagcttgtttctttcggggtaagcgagaggcataggccatcatcagacgagagggagaaccagcgaggactgccaagaagatgctgaagagactgctgacgaagactaagagcaagaagaagaaggaggctgcctcctctgccataccgacgttggatcggctccatgagactctagagatgctggagaagaaggagcgtttcctccagaagaaatgttccgcggaaatagagaaggcgaaggattacacaaaagcgaagaacaagaacgccgcaatccagtgcctaaagaagaagaaactgtacgagacacagatcgagcagctatcgaatttccagctgcgagtccatgaccagatcataatgctcgaaagcgccaaggcgaccacggacactgtcgacgctctgcgctcggggtcatctgctgtcaaggcgatgcagcaatcagtcaacgtggacgacatcgagaaggcgatcgaggaggcgaacgagcagacggagagcatgcgggagatgcagcaggcacttgcgacgccgattggcgcttccgctgacttcgacgaggacgagctagaagcggagctggaagagctggaggaggaggaggaggaggagggggagatcgaggacgagctgcctgagccgccggcgaggcggtccgtggaaccatcggcgaaagcggcggcggcgtcttctagacagggcagtgatgtgagcgagctgaccaggcttcaggcagagatggccctctagctgtctagcagtgatgtgatgtgagcgagctcgtcgttgcgcctgtattgtacacacgtgttttgctgtaaattcatcttgttctagaagacaagacacggcatagatgagagaatctagtcggtgtccggcggacgatgccagccggcagaagcagtttgactttgacggtctcggattgcggtccattgttccaacagatacgatgcgatatcattattcttatactctatcatgtaaaatgcaagaattgccaagatgttctaag

SEQ ID NO: 4514 - DNA, 581 bp, Zea mays
  Clone ID: 700381117_FLI
gttggcttctcctccccctccggttcgggttcgggttcgtgaggttctccggggttcggtttcgtgggtgagcggatcgagatggcggcgtcggatgttgagtaccgctggtgatccggttgatgcagcagcggggcctcgcccacaactgccgctcccgcgggcgccgtgatggcggcggcggctacggcggtggcggcggctacggtggtggcggcggcggctacggtggtggtggcggcggctacggcggtggcaaccgtggcggcggctacggcaactccgacgggaactggaggaactgagcggtggggcccgcgcggccaagttatcctgttcgctaccgtgttgtttaccctagtccagagtgtttatcttcgttcgtctcgtgtttgttgttgcccatctgtgtttttgattgaaggtcgctctgtgtcagttgttagtgctgtgttcatcctcggctccagcagacccatgcatcaaccagcatggactgcggatcgatgggtgctgttacccccgtcaggctttattctaagttaaatcctaaggaaaaaaatggtgcttcttggtgctgc

SEQ ID NO: 4515 - DNA, 2087 bp, Zea mays
  Clone ID: 700381118_FLI
cttccttcccaggtccggtcagctcgggactcgggagcggcagctcccaaccatacgtccatatccccctcccaacaaaaaaaaaactcccatcaatggcgatctgaatcaaccaaggcatctggaagcttggacatggagcggatcctcaagtccgccagggagtcgggctccctgaacctctccaatcgctccctcagggagatacccaaggaggtttacaacaacttggacactggcagccaggatgagaaatggtgggagggagtggacctccaaaagctcattctggctcacaataatcttgaggtgttaagagaagaccttaggaacttgtcttcgcttgttgttctaaatataagtcacaacaagatatcttcccttccagcagctatcggagatctcccgttgctaaaatcactggacatgtctttcaatcaaataaacactctgcccgaagagattggcctggctactgctttagtcaaggttgacttctcaaacaattgccttactgagcttccacctaacctcgccacatgcccggacttgtccgaactcaaggcatcaaacaacaacacatccagagtaccagatgtacttgctggctgttccaagttaagtaaattggatctagagggtaacaagcttgtggcactttctgaaaacatgtttgtgtcatggacaatgctcacagaattgaatctcgcaaagaatctacttacagccatcccaggtagcattggagcacttccaaaactaatccgcttggacatgcatcagaataaaataacatcgattcccccttccataaaaggttgctcttcgctagccgagttgtatatgggaaataacttattgtcttcaataccagctgatattggcacgttatcaaagttaggcatacttgatctccattctaatcagctaaaggagtatccagttggagcctgcaacctcaaattatctttccttgatctatcaaataactcattatctggtctaccagctgaactaggtaaaatgactaccctaagaaagcttctgcttactggaaatcctatgaggacacttaggagttcattggtttctggaccaacaacaacattgctgaagtatctgcgcagccggctttcatccgatgaggaagcatcaggatccagaagcaccccaactaaagatgaccaaattgctgcagcaaggcgcttgtccttatcttcaaaggaactggacttgagtggccttggagtgaccagtgtaccagctgccgcgtgggagacaagtgatgtggtgaaactggatctttctaaaaattcaatagaagatctaccaaatgagttgtcattatgctcatcacttcaatccttagttttgtctaataacaagataaaaaggtggcctcacacagtggtttcctcccttccctgtctgtcttccttaaagctggacaataaccccttggtagagatatcatccactgatcttgtgcctctgtccaaacttgaagtacttgatctaagtggcaatgcttcagcacttcctgaaccttctgcagtttctgcattaccacagctgcaagagctttacctaagacgaatgaaactccatgaatttcctaatggtttgctgggcctaaaactgcttaggattcttgacctgagtcagaatcaccttacaactgtgccggagggcatcaagaatttcactgcactcattgagcttgatctgtctgacaacaatataacagcactcccagcggagctgggattgcttgaagctaacctgcaagtgctgaaactggatggaaatccgctaagaagcataagacgaactctgttggagcgaggaacgaaagcagttctcaagtacctcaaagaaaaattgccgtctgaataatatttatagaacaaactattgttggagtaatggaataaaatgtttttttgccactgtatctcagttttctggactgaattttgtgcaaaagtatctggaccttgtgtgagaagagagctttgtgagtgtgttgttggatatactggttatagtccacatgttttattggaacaaaaatattttctctgttc

SEQ ID NO: 4516 - DNA, 1943 bp, Zea mays
  Clone ID: 700381131_FLI
atccaatcttgcatccccatctctgtctttgctcctccatggccatggccatggcccgaccttgtgctttccttctcttcttcctagttcttttctcctacgacggatccggtcctgggagcagcaggaggactaggaggagtggcgtcgcgcaggccacgcagagagtcttcctgtatccacaggctcccaaggtctcctccatcgtgagcagcaagtacaggaccgcgtaccacttccagcctcccaagaactggatcaacgatccaaatggaccaatgtactacaatggtatctaccaccagttctaccagtacaacccaaacggctcgctctggggcaacatagtctgggcgcactcggtctccacagatctcgtgaactggatccggctcgcgccggcgatagagcggacgactccgagcgacatcaatggctgctggacaggttcagccaccatcctaaagagcggccggcctgccatcatatacaccggcgccgacaccgagaagcgtcaggtccagaacgtggcgttccccaagaacctgtccgatccgtacctgcgggagtgggtgaagccacacgacaacccggtgatccagccggtcggacgagggctgaacccaggccagttcagagacccgacgaccggctggatcggcccggacgggctgtggaggatagccgtcggggccgaggtcgacggccacagcgcggcgcttctgtacgagagcgaggacttcgtgcgctgggacagagtggaccacccgctctactcctccaacgcctccgccatgtgggagtgcccggacttcttcgcggcgatgccgggcgagaactccgggctggacatgtcggctgcggtcccggatggcgccaagcacgtcctcaagatgagccttgacggctctgacaagtacatggtcggcgtctatgatctgaaaggtgacgcctttgtgccggataccgtgatcgaggaccggaggctgtggtcaaggattgactacggcaactactacgcttccaagtcgttcttcgactcgaagaaagggaggagggtcatatggggctggacgaatgagacggacagttcgtcagacgacgtcgccaaaggatgggctggaatccatgcaattcccaggactatatggttggataaagacagcaagcagctgctgcaatggccggtcgaagagatcgagtcgctccgaggaaaacaagtcagacaccaaggcctggagctcaggaagggggatctgtttgagattaaggaaattgacactctgcaggcagatgtggagatagatttcgagctcacatccataggcagtgccgacccttttgacccttcctggctcttggacatcgagaagcagtgccgggaagcgggcgcgtcggctcatggcccgttcgggctcgtggttcttgcttctgagagcatggaagagcacacctccgtgcacttcagagtgtactacagatcacaggagaagcacatggttcttatgtgcgccgatctgaggaaatcgtccttgagaccggagctgtacacgccagcctacggaggcttctttgagctggacctggagaaggaaaagacggtggtatctctgagaactttgatcgatcgctctgcggtggagagcttcggtggaggcggcagggtgtgcatcatggccagggtctatccggcggcgctcgtcgacgacggcggcactcgcatgtacgcgttcaacaatggcactagcaccgtcagagtgccccggctagaagcgtggagcatgaggagggcacaggttaacaagggatgaggaggaacacaaggccatttgatagctagaggagaggaacagagcatgggcacatgaattaaacacacactgctggtttaatttgctggaattaatcaatcaatcaatcaacaaacacacgaagattaaatc

SEQ ID NO: 4517 - DNA, 2157 bp, Zea mays
  Clone ID: 700381136_FLI
ggctggattccctaatgtgattgaagcagcacatcatcctgttgttacactctcctggtctataataaatttttccaggcagtgtttagatccaggaattagggcaaaatacttcagtccacgactaatggaggctgtgatctggttcttggccagatgggttgcaacctatttagtgccacttgacgtgagtagaggaaaagtaagcagagaaattgataatgtgggtacaaatggatcccaacattccagaaaactgctaaacagttttgcttgggaaaataaccaaggagagcttgttcttgattttgttgttctcatttcaatgttagctcttactacctatcagggagaaaatgagttgcagacactgacatgccagaagctacttgctacagtcgttcgccggaaacacacatgcacttatcttgttcaactggattcatggcgtgatcttacaagagcttttgcaagtggacggtctttgctttcattgagtggacgtttacaaaggtctctagcagaaacacttgcctctgcagcttcctgcatcaaagatcctgaagcatctgcacagtacctgagggatctcatgggaccagtggcagggtgcctggtagaaaatgctagcaggagtgatctaaaatctgtggcacagcaagcagatgttatttacatggtctgttgcctattggaacgactaagaggcgctgctagagctactcaaccccgaactcaaaaagttctatttgagatggctcatactgtgatgaacccacttttgactcttctggaggtctacaaaaatcattccacagtcgtatacatgatactcaagtttgtggtggactttgttgatggtcaagctgtattcctggatgctaaagagacatcagctttggtgagcttttgcttgcaactactccagatatactcctctcataacattgggaaggtaatgctctctctttcttcaagtctgcgtaatgagtcacaagcagaaaaatataaggatctgcgagctttgcttcgtcttctgacaaatatatgttcgaaggatttggttggctttctgtctgattgtggcggtgaaggttcacctgatatcgcagaggttatctacattggtcttgatattgtgacccccttgatatctttggatcttctgaaataccctaaacttagtcgtgattattttgtgcttatatcgcacttgttggaactgtacccggaaaaggttgctcacttaaatagtgatgcttttacaaggattattggaagtcttgacttcgggctccgtaatcaggatagcgatgttgttgagaggtgcctggcagcagtaaatgctcttgcttcatacaatttcaaagaaagattaggagggagaggaagactgaactcgcagctcatggaatctgaaggatctaatggcaaactgcaggaaagcatatcaagtcacttcttgagacttctgttgcaaatacttctttttgaagatttcagatcggagttagcaggttatgctgccgatgctttgcttcctttattgttctgtgaacaggagctatatcagaggttggtccatgagttgttggataaacagcagaatccgaccgtaaaatcaaggctggcaactgcgttccataaccttacaagttcaaacaatctctcaagctcactcgaccggccaaacaggcagagattcaggaaaaacctccttagcttcatggcggatgtatcgggcttcatgcagatcaagtagatgcgatggcagggaacaggtgatgtttgaccggtcaattaaaccccgaggaagcactgcaccactgtggtaggggtgcatgtgggcaccacatgtctgtggattgatgagagcgaagactgccacgacaagtctagtagatcttgaagagctagtgtcaccagaaaagacagggagatgagctagtcttagggttggcattcatagcgcatttgctggacaagatggaggcgtccctggccacgagatcgtcgtgtaaatgcgtttgttagacgcacagaaacggtggggattttgtggtggcgactcgttttgttcaattcccacaggcagaaggtagagatgttaagttgatgtaaataccgtttgatttaaacatgccttattcgtaggag

SEQ ID NO: 4518 - DNA, 1523 bp, Zea mays
  Clone ID: 700381143_FLI
ccagatccgggaggaccgcaaggggtacaaggccggcgcgctgcgggcggggatgaggcacgcgtacgtgcgcgactgcgagtacgtggccatcttcgacgccgacttccagcccgacccggactacctcaagcgcaccatcccctacctcgtccacaacccggagatcgccctcgtccaggcgcgctggagattcgtgaacgcggacgagtgcctgatgacgaggatgcaggagatgtccctggactaccacttcaccgtggagcaggaagtgagctcctccgtctgcgccttctttggattcaacggcaccgccggcgtgtggcgcatctccgcggtgaacgaggctggggggtggaaggaccggaccacggtggaggacatggatctggccatccgggccagcctcaagggctggaagttcgtctacctcggtgacgtccaggtgaaaagcgagctgccgagtaccttcaaggccttccggttccagcagcacaggtggtcgtgcggcccggcgaacctgttcaggaagatgctcatggagattgtgacgaacaagaaagtgacgatctggaagaagatccacgtcatctacaacttcttcctgatacgcaagatcatcgcgcacatcatcaccttctcgttctactgcgtcatcatcccggcaaccatcttcgtccccgaggtccgcatacccaagtggggctgcgtctacatcccctcggccatcaccctcctcaactctgtcggcactcccaggtctttccacctgcttttcttctgggtcgccttcgagaacgtcatgtccctgcacagaacaaaggccacgctgatcggcttgctggaggccggcagggccaacgagtgggtggtgacggcgaagctcggcagcgccatgaagatgaaatcggctaacaaagcggggctcaggaagcagttcatgaggatatgggagaggctgcacgtcacggagctcggggtggcagccttcctcttctcctgcggctggtacgatcttgcgtacgggagggaccatttcttcatctacctcttcttccagtctgtcgcgtttttcatcgtcggcgtcggctacgtcggcaccatcgtcccgcagtcgtagcggaagcgtgtccagatcatccgcttctctctggttttcgcattgtgtcttgggtaagtttcgtagtggatgaccggtttgaggtaaagatcatgcatgcggtcctctcttccatcgtctttttttggggaccggccgtgtgtgcttcgtcgaccttcggctgcatgcgcggtgttttactgtaaaataggaaagcagtgttgcaagatcgctgcaggagaatttagagattggtgccacatgggcaggagatgtcctggtgtttctgcttatatgctatatcaactatgtgatgtgttttaagggggggtgcaggatggctgcttccaatgtactagtaacatacagagaaacaggttcagacatgtgttcagaaaaaaaagagtcaactattcagccttct

SEQ ID NO: 4519 - DNA, 1130 bp, Zea mays; identical to SEQ ID NO: 4509
  Clone ID: 700381147_FLI

SEQ ID NO: 4520 - DNA, 1233 bp, Zea mays
  Clone ID: 700381174_FLI
agagattgcaccttgcaatgaacccagaaaatctacacacagaaggattgaaaaggacccctctattgaggaatttgaggtgaagcttaaagttgctaatgagagattgacaaacattgatgaaaacatcaacaagctaagtgggaccgagagagaagaaatgggaaatttctgtggttctgattggacaaaagagcaggacatggcattgcgcaaagcttacttcagtgcccgaccatccccacatttctggaagagagtttcaaaaatggtgccagggagatctgctgaagactgcttcaacagaatttataatgacctctcaacaccgactccaattgcaccacgtcccagaacaagtaaaacaacattttctcctataggaaatctcacattgtctgatccaaagcttccaaatatcttggaacctacagtcggaaggcaaaagaccgctaaacaaaagagtctagtagcacagaagacagttaggcatttgttgcagaagcattgccgcattgaccaagctcaagaggccgaccacttctcaatttttgaaagctcaccaagtgccttacaattgaacttatcttttgaagattctcctggtactcctgacagttatatgaattcagattctctaggcaagcacagtggaagttcttcagcacggaagaaaccattttcaaggttaagaactaagccatctgaaccgagcccagcagttctaaagcctataaagaatgctatcttacatgagaagtacattgatcaattggcacgtagagaaggcacaaaaaggcctcgcagaaggactccagcaggctctaaaactgctgattctgggaagtctctttctgagcagcaagctggtagtctgaaggctgctaaaaatgctctcatctcagaagcaacggacttcataagcagttttaaggcgctgcaagccaattcccttgcacatgttgtggagaatagcgaagacgagattgaatgtgatgccagtgattgtagctatgatgataaagaatgaggaggtgcttacagtcttgatgcccagcggcacttagcaatcatttcctttatgtcaactgactttagtcatcacttatcagtgcctgttgctgcaataaggctaggcagttgtcagggctgtctattctgcctgatgctgtatttagttttgaacctcttagtgccctcagagatgttagttagttgtgaaagtgctacctt

SEQ ID NO: 4521 - DNA, 1453 bp, Zea mays
  Clone ID: 700381188_FLI
cattcgtacgcgtgcttgttgtctctgtcagccatcaactctccagtgagctgcgagcctacaaggctgtgggcagtgccagcctcaacctcgacctcccccagtcccccaccgaccaccggcctcctttcccgcaggcacgggtgcacggcacgcggtttccactcgcttcgtccgcgttcggatcgccctcagagtaacagtctagcagagcaagcatgtcgtcgtcggcggagaacgaccccacggtgacggtgaccgagcgcggaggcaaggacaagcacgaggacggcggcgacaaggagcagggcggcggcggcttcatcgacaaggtgaaggacttcatccacgacatcggcgagaagatcgaggaggtcgtcgggttcggcaagcccacggccgacgtgtgcggcatccacatcccgcacatcagcctccaccgcgccgacctcgtcgtggacgtgctcatcaagaacccgaacccggtcccgatcccgctcgtggacatcgactacctcatcgacagcgacggccgcaagctggtgtcgggcctcatcccggacgccggcaccatccacgcgcacggccaggagaccgtcaagatcccggtgtcgctcgtcttcgacgacatcaagagcacctacaaggacatccagccgggcagcatcatcccctacctcgtccgcgtcgtgctcctcgtcgacgtccccatcatcggccgcgtcaagatcccgatccagaaggacggcgagatccccatcccttacaagcccgacgtcgacgtggagaagatcaagttccaccacttctccttcgaggagaccaccgccacgctccacctcaagctcgagaacaagaacgacttcgacctcggcctcaacctgctcgagtacgagatgtggctcggcgacgacagcatcgcctccgccgagctcacacagaccgccaagatcgagaagcaggggatcaccaggatgcaggtgcccttcagcttcaggcccaaggacttcggatccgctgtctgggacatgatcagggggaggggcacgggatacaccatcaagggaaagatcgatgtcgacactcccttcggcaacatgaagctgcccataagcaaagagggtggaaccacccgcctcaagaaggaggaggaggaggacgacgacgatgacaactgaagtgaggactgctggggggcgctgctgttacctttcacgaaacgcagcgaagcagaagatgcggggatcgtcgtcgacctgatacccacacccttagcgctggttaagctcttgcctttagcttatggtgctctgttgttttgcattgtctgaacatcctctcacttcctgagtgtacgttcagtttgaggtttcctgtgttgtccatctgaattctttcaaactttgcggttggaactggatgaagaataaaattccaacccgccctggttctt

SEQ ID NO: 4522 - DNA, 601 bp, Zea mays
  Clone ID: 700381224_FLI
atttatgcaaagaggcgtatatatgccggtgaggaaatcacatataattacaaatttccattggaggaaaaaaagataccgtgccattgtggttctcggaggtgtcgtggatcaatgaactaagaaggccatcttttgaggttgctgcaacacttaagattcttggctgtgtgcaactcatcaatcaggatttacatcaatatcaaaatatggagtgcacgaacatgctggacagcaagaacaaactgccgcattatacttatttaagctatattggtcagactaattccacggtatcccaaggatggtgcaagaggaagcccatactgcgctgccctgtggaggtcgcgagcatgggaaatcagttgaggatgggctgagctagtaaagggttgttttctgacaaggccagtactattgtttttttttgacatacctgggtggagttgcaaactcttgtacaggcgcaggctttacttattacattgtttggattggggatatagttcacatggtgcatacgaaacggttagattggtttaaattctctacctcgtccttaaatcatttatcatactaattagttattgaaagatgaaac

SEQ ID NO: 4523 - DNA, 942 bp, Zea mays
  Clone ID: 700381301_FLI
gagagaaagaaagaaagaaagggaaggcggggggaggccggccaaggcaccaccacaccaccacccgacgaattcaagcatgaggccgcagagcgcagagcagggctgccgccgctgccgctgaggagcggctacagagtgctatacctattacacagcggcaacaggcacgcacgccaccgctcccgatgttgcttcagttggtgaaacagcttgctcctaagattgttgtggctattgaccacggcagtgaccggggtgacctcccgttttcgcagcacttcatgaattgcttccagtcctgtatgttccttctcgactcactcgatgctgctggcaccaatgcggatgctgccagtaagatcgagaggtttctgatccaaccgagagtagaggatgcagtgcttggccgtcggaaggctgaaaaggcaatggcttggcgggcagtttttacatcggctgggtttgctccagtgccactcagcaaccttgcagaggcacaagctgactgcctcttgaagcgggtgcaggtccgaggattccatgtggagaagtgtggaatgggtctagcactctactggcagcggggcgagctcgtgtctgtctcggcgtggcggtgctgatcatagcaacctcatccgtcaaccatcgtcgtcgtcgcgcctacactattcgcaggcatgtttaactccggtaatatgcgttttatcttgcaaacattgcaaagaaactattgtcatggttgttccacgcctctgattgctttactgctgtttttggagtattagctaggcctaatgaatgttgcaatcttggtgtgggtgtccccctacaatgtaacatgttggtactagggtctcaacgctgttcgtgctctcttcttggttagccggaggctactttggcatatttgtggcaatggtgttcgttattttactaggt

SEQ ID NO: 4524 - DNA, 1203 bp, Zea mays
  Clone ID: 700381330_FLI
ggattcagacagtggacattgacacagaacttccagtgtattgtccattggaagtgacagttgctgaaacggattattatgatgagaccaactattgtgaggtgacaccttgtcttctgccagaacgctcagtgcttaaaagcattcgagtttgtgggcctagatattggcctcaggtgataaaacttgcacctgaagacaagccatggtggagatctggagacaagacaaatccattcaatgggggagtactctacataaagcgaaaagttggatcttgctcctactctgacgatccaattggatgtcaatcgttaatttcacgggcaatgcatgaggtctgtgatgcaccatctgctagttgcagtaatcaaccaaacagcactaatggtagctacttcagagttgatcagctagtaagcactttctcggccaatccaagcttgattgcttttgcaaaactctgctccgtgtcatggaagagcagatgcaatagcaattttcaggagttctgttctcaagtgctatatgaatgtatgagcaaagatagaccatcactgttacaggcctatatcagtttttacacaacaatagagttaatgtgggagcatttgaagactgggaattttcctttttataattcccttttccttcccaacttgaaggtcgctttggcctacaacgaagcattagttgattctagaatcacaaatggaggaattattcattcgacattcttggagtcacttatgaagcgagtgggagacatctttgcggagctgccaaacctcaaggacaacctccaccgatacttgagcacgggcacatggcctgacacacaaaacgacgtggtggttctctcgtggtacctccaatggtacaatataccacctgcccatgttgtggcttctgcagttgagaaggtcagaccgagagtccctgccggtgtatctatgctcccactgcttcgcatcctgctgccaaccacacaccttgtgggactgatggagatcgagaaggtacagattgtcatggaatgctaaaggatgagcgtggaaaattcaatcaaccttctctgcatgcgggttacttgtgatgaacggtagcaagtattgcttagtgcacttgtgatgaaatctgccagggactaagctgttctgaattaagtttgagacaaaagaatcccataatttttattgtgct

SEQ ID NO: 4525 - DNA, 818 bp, Zea mays
  Clone ID: 700381343_FLI
gtgcaaggcttgtatgttgcaaagcttgtgcgatcattctgtaggtcatccagtgattctgaagaggaagacatttttgagtacgttgcctccacacttgtcaatatatctaaggttgaagctggaaggagaatattgttggagcctaagagaggtcttctgaagcagattattcgacaatttgattcaacaaatcaacttagaaagaaaggggttgctggtacaattcgtaactgttgctttgaggctgatactcagcttctgagtttgctttctttagcagaatatctttggccagctctacttttgcctgtagccggaaagaagatatatagtgaagaagacagatcaaaaatgccacttgagctatcgagtgcactctctcatgaacgggaagttgttgaggattctgaaattcggcagcaggcattagaggctatttatatgatcgtattgcaggatggtggccgaaggtccttttggtcagttaatggcccacgaattctgcaggttggttatgaagatgaaaaggacccgaaagtgatggaagcatatgaacttattggttccctgcttgttgggaagggtgaagatgtacaagataacaagaaggaacaaggagagaagcctcaatgagccccgccgctgataaaaacggtgctgtatttttgtttgtctagaaaacatccctcgccgtgtgcaatagcaatagtatgatatcccaacttgtcaactgttgcaactgcaagagctctgcagtgttgcttttgtaattgacgaatgtatctggaaaatttgcaggtattggccgtcttttc

SEQ ID NO: 4526 - DNA, 1543 bp, Zea mays
  Clone ID: 700381361_FLI
attcggtcgagtacagctacatctcttggagctatatcctatcttggaaactatacaaaagtatctttggcctcgcctttgtaaactcgatcagcagacactgtatgagctgcattatcagatgattacatttggaaaggtcttttgtaccaaaagacagccaaattgcaatgcatgcccaatgaggagtgagtgcaagcattttgcaagtgcatttgcaagtgcaaggcttgcacttcctgctccccaggaggaaagcttagtgaagttgagcaatccatttgctttccagaatagcagcatgcatgctatgaattcgactcacctacctcgccttgaggggagtatccattcaagggagtttcttcctaagaactcagagccaataatcgaggagcctgcaagtccaagagaggaaagacctccagaaaccatggaaaatgatattgaagatttttatgaagatggtgaaatcccaacaataaagcttaacatggaagcttttgcacaaaacttggagaattgcattaaagaaagcaataacgaactccagtctgatgatattgcaaaagcattggttgctattagcactgaagcagcttcgattcctgtaccgaaactaaagaatgtgcttaggcttcgaacagaacactatgtgtatgagcttccagatgcacatccacttttacaacagctaggacttgaccaacgggaacatgatgatcctaccccatacttattggccatatggacaccagatggaataaaggaaataactaagacaccaaaaccatgctgtgaccctcaaatgggaggcgatttatgcaataatgaaatgtgccacaattgtactgcagagaaagaaaaccaatctagatatgtcagaggcacaattctggttccttgtcgaacagctatgaggggtagtttcccacttaacggcacttactttcaagtcaatgaggtatttgctgaccacagatctagccacaacccaatccatgtggaaagggagatgctatggaacttgcaaaggcgcatggtctttttcgggacttcagtacccaccatattcaaaggtttaagaacagaagaaatacaacaatgcttctggaggggatttgtctgtgtgcgaggattcgacatggagactagagcaccaaggcctctgtgcccccatttgcacattatagcaaggccgaaggcccgcaagacagcagcaactgagcaagtactctaatcagcaaagatatcagttttatgaacatcatgtttattgtgatatgacatcaatagctctcgacctgtgcatggaatcatattacttcctgcctggcgatggccattgtttagggaatttaagccatggatggggtccgagactgttagttctgagacgagaggactaatgaagcatcaggaagcaccaataattttcacttttttgtttcagatctactgtatgtaaattatcatctagctgttagtccatgtaagatgccattgctatcctttctgagacaaactaccttatcaacatttc

SEQ ID NO: 4527 - DNA, 481 bp, Zea mays
  Clone ID: 700381390_FLI
gaaaatgtgaagataatcaattttgataatatccttctgtctcccttactgcttcttggacattatcaaaattgattatcttcacattttctccaatgcgaagataatcaattttgataatgtccaagaagcagtaagggagacagaaggatattttatcaaaagtggaattgtcacggtgattaaagatgctttaattcctagtggaacaatcatataaagtcagccaacaccatgtatataaggttgggttgcatcatatggtgatcgccaatgcgcatcaagttctctcatcccttgcgagaccatgcttatttccattgcaaaatcatcaagctctgcatcaacttgttgtggataataatgaaataataaatggtgccattccatggcaacatttttctgtcactagtatgaggcactgttctaaatgtactgttgagtggaatttgaatatgtatgcttttgcaatcgcacacct

SEQ ID NO: 4528 - DNA, 1159 bp, Zea mays
  Clone ID: 700381403_FLI
ccttcagacctgacctctcaaatcaaaccgggaccgggtggcctcttgccctcttccgttccgtctcattctcatccccgacccccgcaccgcagcgtaaaccctagtccccggcggcgaccttgcggcctccgctgcgctctgactggtgcgcgtttagacgaggagctgcggcggccaagaccaatcgaccatggctacccgtatccagtttgagaacaactgtgaaattggtgttttctccaagctgacaaatgcttactgtctggtagcgattggagggtcagagaacttctacagtgcctttgaggctgagcttgcagatgccatccctgtggtcaagacctctattggtggcactagaataataggccgactttgttttggaaacaagaatggacttctattgccacatactacaaccgaccaagagcttcagcatctgaggaattgcttgcctgatcaagtggtggttcagcgcattgatgagaggttatctgcccttggcaattgcatagcctgcaatgaccatgttgcacttacgcaccctgaccttgacaaggagactgaggagttcattgcagatgtgcttggggtcgaggtgtttaggcagactattgctggaaatatccttgtggggagttactgcgccttctctaacaggggtggtttggttcatccccatacatccgttgaagaccttgacgagctctccacgctcctccaagttcctcttgtcgcaggaactgtgaacagaggaagcgaggtcattgctgcaggcatgacagtgaacgactggactgccttttgtggctcggacacgacagccaccgagctctcagtcatcgaaagcgtcttcaagctgagagaagggcagcccactgcgattgtggaggacatgaggaagtctctgatagacagttacgtgtaactggggggccagcagatgtgggtcagagtttgcctttgctaaaagatgtattgcaagctatagtcgaattatcagtagcacaacataaccctctgatatgttcgtggtttatccgtggtttctgaattgtagacttctgcgttgaagctcgtgctactgtttgttttccattgtttgttcacaccaacagctatatgcagatacatggcttctcagtgttacgccggc

SEQ ID NO: 4529 - DNA, 829 bp, Zea mays
  Clone ID: 700381459_FLI
ctctcaggtgataggcatgcacttcttcaaccctcctccggtaatgaaactgatcgagattatccgaggagccgatacgtcagatgaggtgtttgctgcggtcagatctttctccgaaagactcgggaagtccgttatatgctcgcaagattacccaggattcatcgtgaaccgcatcctcatgccgatgatcaacgaggccttctgggctctgtacaccggagtggcaaccaaagaggacatcgacgcagggatgaagctgggcacgaaccacccgatgggccctctgcagctcgccgacttcatcggcctggacgtctgcctctcagtacttcgggtactccacagcggcctgggagatagcaagtacagcccctgccctctcctcgttcagtacgtcgatgctggccggcttgggaagaagcgtggagtaggcgtgtattcgtatgggcacaggccttcgtccgtcaggccgaagtcgtctctgtaggcgtgagagcaaactgttgggcgaataaaaccaggtgcgtgttgcaattgcacgtcagagaaaaagggagcacagcctagttcagaggtactcagtcggacgcttcaggtcgtgtagattcgtaatggcagggtttgctgctctatgtagaaaagatggttcagtgtttttaatctgataagtggaagtcatgaaacatttccgcagtttgcgttctgctcgagagggtgggagaaacagaaaagctatacttcttttgtattgtaatcctctgtaaactacaaacagacagatctcactctctgaaccggtaaaggaaaccaatgagtttctattgtg

SEQ ID NO: 4530 - DNA, 2136 bp, Zea mays
  Clone ID: 700381522_FLI
gtgattcacatgtctaactcccgaaaagaaggcagaaggtcctttttatagctttcctcagtctgatgtgtgcttccatccttcgctttcgaaatctcccttgtgtacaccattgcaccaccaccctttaatcctttactatccagtccgttattccgcgagtacgttgatgatccctccttacggcagtaaggattctgcaaaagtgtgcttcagctatgcagttcagcagcgtgcttcccctagagggaaaagcgtgtatgagcccagtgaggagaggcagtggaggttatgggagtgagaggatgaggatcaactgctgcagcatcaggcgcaacaaggcactgaggaggatgtgtttcagtgcaaggggtgctgtgagcagcacccagtgtgtgctcacatcagatgctggcccagacactcttgtcgtccgaacatcctttcggaggaattatgctgatcctaacgaagtcgctgccgtcattttgggtggtggtaccgggactcagcttttccctctcacaagcacaagggccacccctgctgttcctattggaggatgttacaggcttattgatatccccatgagcaactgtttcaacagtggcataaacaagatatttgttatgactcagttcaactcagcttctcttaaccgtcacattcatcgtacctatcttggtggggggatcaacttcactgatggatctgttgaggtgctggctgcaacacaaatgcctggggaagctgctggttggttccagggcacagcagacgccgttagaaaatttatctgggtacttgaggattattacaagcataaagctatagaacacattttgattttgtcaggagatcaactctatcgtatggattacatggagcttgtgcagaaacatgtcgatgacaatgcagacataactttatcatgcgctcctgttggagagagtcgagcatctgactacggattagttaagttcgatagttcaggccgtgtaattcagttctctgagaaaccaaagggtgctgccttggaagaaatgaaagtggataccagctttctcaatttcgccattgattccccagctgaatatccctatattgcttcaatgggagtttacgtttttaagagagatgttttgttagaccttctaaagtcacggtatgctgaactgcatgactttggttctgaaattctgcccaaggctttgcatgagcacaatgtacaggcatatgttttcactgactactgggaggacattggaacaatcagatctttctttgatgcaaacatggccctctgcgagcagcctccaaagttcgagttttacgatccgaaaacaccattcttcacttcccctcggtacttgccaccaacgaagtcggataagtgcaggattaaagacgcgatcatttcacacggctgcttcttgcgtgagtgtgccatcgagcactctattgttggtgttcgctcacgcctaaactctggatgcgagctcaagaataccatgatgatgggtgcggatttgtatgagaccgaagacgagatctcaaggctactggcagagggcaaggtgcccattggcgtaggggagaacacgaagataagcaactgcatcatcgacatgaatgccagggttggaaggaacgtctccataacaaacaaagagggcgtccaagaagccgaccggccggacgaaggatactacatccggtctgggatcgtggtagtcctgaagaacgcaaccatcaaggacggcaccgtcatatagagactaactttggccttacgcatggcgtgcaaggttacaggttagtcatcgtcttgagagttgagacttagtttgaggcgcgcgcccgaccttgacttgagccgttggagggacaagaacatgaggaagaagaagggctggtggtgccggatgttgccatggacgacgagaaatggtttggtgcggtcgcatcggttccagtagctagctcttccgatgttattaatatgtatctagtggagtagtgcgaacagtgcaataagctgggcgagcaaagccgcggcaactcttggcttggggagtgcatcttgtaaataataaactcggacgcagcaaatgaaacatgcccctcatcttcttc

SEQ ID NO: 4531 - DNA, 812 bp, Zea mays
  Clone ID: 700381533_FLI
gtccccgagtcgacaggccacaaatcccaattccaaaaccttttctccgtcccatcgccggcgatcttctccttcgccgccaatggatctctccgctgtccaggctgccctctccgacaagtcctactccaccctcgcctccctctgcgacgaacttctcctccaggccgcgtcccagggattcaccaccgacgaatggccctactctgtccacctgcttgcccacctctacatcaatgacctgaacagcgcgcggttcttctggaagtcgttgccgcaggaggtcaaggacacgcggccggagctcgccgctgtctggaggattggtcagtgcctctggaaaagagattatgctggcgtcaacacggctgcacaggggttcgagtggggtcctgacctcgctgacttcatcactgccttcctagagagctacagacagaggatattcaagctgttgacttctgcatattccacaattagagttgctgatgtggctcatttcatggggatgagtgaggaggatgcgacaaactatgctgcgcaaaacggttggagtttggatgcagcggccaagatgcttactgtcaaaaagccaaagtctcagaccaaccagaagcttgatgctagcaaactgcagcgtttgactgagtgtgttttccaccttgagaactgatgttcactgtcaatcgtgttgtgtccctgtttcttctctgctccacattgtaagaagcatgtttaccatgtgacagctatatgcctgagcgacttggcccctttcggccgaaaaggggtgatctctgaatttgcatctt

SEQ ID NO: 4532 - DNA, 1428 bp, Zea mays
  Clone ID: 700381538_FLI
cataaatcaggaaatattgacgatggaagcaatggcgacgtagctgctgaccattatcatcgatacaaggacgacatagaaatgatgcattcgattggtctcagctcctacagattctcattgtcgtggtcgagaattcttccaaagggtcgcttcggaggtgttaatcaggcaggcgttaaattctacaatagcctcatcaacggactgctagaaaaagggatacaaccatttgtgacgatcaaccactatgacatacctgaagaactccaagaaagatacaattcttggttgaacccagagattcaggaggacttcacctacttcgttgagctttgcttcaagatgtttggtgaccgagtaaagcactgggtcacattcaatgagccaaatcttattgtaaagcttgcatactccattggggcatttccacccaaccgttgttccgagccatatgggaaatgtgattcagggaattcatcaactgagccctacattgcagcgcataacatgatattagctcatgcaaagacggtcaacatctacagaaagaattacaagtccaagcaaggtggctttgtaggaatttcattacatctaagatggtatgaaccactaaggaatatcacagaggaccacttggcagtaagccgagctctgtctttcgatgctccatggatcttggatcccttgttctttggtgactatcctcaccagatgcgccaaatcttaggtccaaacttgccaaaatttacagaaggagagaagaaactactgaagaaccaaattgacttcatcggggtaaatcactaccaaacattctatgtcaaggattgcatatattctctatgtgatatggacgcctacccttctgaagctttagtttctatatcaacagaacgaaatgggatacccattggaaaaccgacacctgttgcaaacacctatgtcgttccaagctccatggagaagttggtcatgtatttaaagcagagatataaaagcatacctttgtacatcacagagaacggttatgcccaaatagccaatattagcactacagcagaagaaataattaatgatattgaaagatcaacttacattcgtgactacctcacttacttgagctttgcaataaggaaaggagcagatgtgagaggttattttgtgtggtctttgatggataacttcgaatggatctctggttacaccgtaaagtatggtctttgtcatgtgaatttcaagtcactaaagcgaacaccaaaattgtctgctaaatggtatagcaagtttatcaagggctatgaacagatagagatggcctctgaagaattgcctaagcatatggtttcctagtacagaaatacagaattctcaaagtccttgtttctacattactcaatgatttgttaaaaatgtttacaccgt

SEQ ID NO: 4533 - DNA, 1439 bp, Zea mays
  Clone ID: 700381565_FLI
cagccaggcacgcaccagcaacaccccccacccgccggctcggagcgggggcccacccgaatcacacagatcgggacgccggaggaggagcaacgccgtcccgcatcaccggagcaacgcgggcgcggagaggccagccagcgcaggcgcagttcaagctttggattcccggatcccacaccaccggtctctctcggggagtgtaatccagcgagcgttgagttgaaagccgcgcaagtggagatgagtactctgaagaaatccgacaagaaggctgccctcgacttcgcagcatggagtttcaatgtcaccacatcggttggactcatcatggtcaacaaggccttgatggctacgtatgggttcagtttcgccacaacattaaccgggcttcattttgtgactactaccttgatgactatcttatttcgttggttaggcctgagtcagccatcccacttacccctagcagatctagttaaatttgtgatattttcgaacttgtcaattgttgggatgaatgtgagcttgatgtggaactctgttggcttttatcagatagcaaagctgtgcatgatacctgcatcatgtcttctggaggttgtttttgatcatgtacattattcccgggacacaaagctgagcataatggtcgtgcttataggagttgcagtctgcacggttactgatgtcagtgtgaatgcaagaggtctaattgctgctgttatagctgtctggagcacagctttgcaacaatactatgtccattttctccaacgcaagtactccctgaactcattcaacctcctgggccacacagctccagcccaagctgggtcactgctgctagtgggaccatttgcggattacttgttgacaggcaaaagggtggatcagttcagtttgtcatcgcttgctctgtttttcctggcactctcatgcttcatcgccattggtgttaatctgagccaattcatctgcatcgggcggttctccgccgtatccttccaagtcctaggccatatgaagaccgtacttgttctgtcccttgggttccttttctttggcaaggagggcctgaaccttcaggtagtccttgggatggtcctggccgttctcggaatgatatggtacgggaacgcgtctgctaaaccaggtggcaaagagcggcgcagcatcctgccggtgaggtctgcgagtctcaagggaagttccgaagaaaaggccggtgccgagaaatagtcttgctatatctgactgcaaacattttattagatggggaatttttcgttccgaaggttaaatctctggtgaggtgacgcgagtatcacagattggaagctctgcattatgtctgacgcgcacaaaacaaacgcgtcccttgtagagactctggattgttatagttacaggtatactgtaaagcttcattttttttt

SEQ ID NO: 4534 - DNA, 537 bp, Zea mays
  Clone ID: 700381585_FLI
taagcttttatgaacttctggaggccattgtcgatcagccaccaccttctgcacctgcagatcagttctctccagaattctgctcatttatctcctcttgcatacagaaagatccggctcagaggatgtctgcttcagaactcttgaatcacccttttttgaagaagttcgaggataaggacttaaacctggggattcttgtggagaacctggaacctccaatgaatatacccgaatagcctgtcgtttttagtgatgaagcctttgttgtgccttcagggtttggcctcgaagcctcttggcatctgctcctcaactgcagcctccctacctgaatatgctataacatcattgtatgattcaagccccttatctgagcataagagtagagggaactatgctgcattccgtgtatggtcaccttattgtagctattgttgcgacgggccttgtgattttgagtcttgttttaacttttgcagtcttatcggctgtggattcaaaatgaacgaactgaatattcaaaacatgtttgcc

SEQ ID NO: 4535 - DNA, 1562 bp, Zea mays
  Clone ID: 700381617_FLI
tcccaccgtcgcaagccagccacctccctgagaggcctgaccgtgatttcggcgtggcatccaaaggcggtcaagattcgagaggccggaggaaccaagcgtagggcctccgaccccacgtcgtcgtccgcgcgcgccgcccgccgtcgcagggagatgggggccgattactacaaggtcctcggcgtcgaccgcggcgccagcgacgacgacctcaagaaggcctatcggaagctcgccatgcgatggcaccccgacaagaactccaccaataagaaggaggcagaaaccaagttcaaggagatctctgtggcatacgaggtccttagtgatcccaagaaacgtgcaatctatgatcagctaggggaagaagggctcaaggggcagccgcccccaggagcaggaggtcctggcacatctcccttcttccctggcggggttcattccaccgctcaccattttaatccgaggagcgcggacgatatatttaaagagttctttggatcccctggcatgggtggcatgagaacggaaccaggatttcaaaggtcagtgtttggcaacgatatcttctcttcgcgcttccgcgctgagggttccaccagtatgcagcagccattgcgcaaggcagctgcaattgagaatccacttccagtcggccttgcagatctctacaagggtgtgacaaaaaagatgaaaatctcaagagagactattgatgccagcgggagaatctcaaacacagaggatattctgacaatacaagtaaaggctggttggaagaagggaacaaggattacatttcctgacaagggaaatgaagctccaaatatgaaacctgctgatattgttttcatcattgatgagaagccccatgatgttttcactcgggaggggaatgatcttgtcgtgactgagaagatctcactggtggaagcactgactggctataccgcacgtgtcactacgcttgacgggcggagcctatcactgcacatcaactcaataatccatccaaagtacgaagaggtgatgcctggagagggcatgccaatgcccaaggaccccacaaagaagggaaatctgcggattaagttcaacataatgttcccctctaggctgacttctgatcagaaggccgggatcaagaggctattgggttcttaggccgccgcctcaaatgacatcttctttatgatgaaagttgtttgtaaatattgccagtgatttgtttgtaacgggatggtcacaatttagtttttttttaaggtggtgcccttggttttgctgttgttctcatttttaaccttagtcgtatttttttggctcaattttgcctttccagtgctatacagcagaatggtaaaactgataaaaaaatacgactaagggtaaaaataaagaagatggtaaaactaagggtatgaatttaaataggttttctggtgggtgggtagttgatgaattgtaaatcccaaacaaaccggccggcccttagcaaccacaacaaggctgaaccttcaccattttattttagtcaggcagagtgttgtgccctttgc

SEQ ID NO: 4536 - DNA, 1973 bp, Zea mays
  Clone ID: 700381636_FLI
cgcatttgagtacgggaccaaattctcacggtcacttggatggggcagtgatgatggttctgaagagtccatttttggaaccggggatgcagatgatgtcaagcccaagagctttcttgtgtgtgatgaccggcactctgagctgatcccctgcttggatcggaacttgatatatcaaatgaggctgaagctggatttaaacctgatggagcactatgagaggcattgccctccacctgaaaggcgttttaattgcttgattcctccaccacatggctataaggtccctataaaatggccaaaaagtcgtgatgtagtatggaaagcaaacattccacacactcaccttgcaaaagagaagtcagaccagaactggatggttgaagctggtgaaaaaatcaagtttccaggtggtgggacccattttcaccatggagctgacaaatacatatcaaatattgcaaatatgctaaatttcaaagataacaatataaacaatgaggggatgcttcgtacagttcttgatgttggttgtggagttgctagtttcggaggataccttctttcttctaatgtgatagcaatgtctttggcaccaaatgacgtgcatcagaatcagattcagtttgcactcgaaagaggaatccctgcatatcttggtgttttgggaacaaaaaggcttccatacccgagtagatcatttgaactagcccattgttcacgttgtaggatcgactggcttcaaagagatgggattcttctgctcgaactagacagattgctacggcctggaggttattttgcttactcctctcctgaagcatatgcacaagatgaggaagatctccgaatctggaaagaaatgagtgcccttgtagaaaggatgtgctggaaaattgcagagaaaagaaaccaaactgttatttgggtgaaacccctgaacaatgattgttacaagagacgagcacatggtacaacgccacctctatgcaaaagtggcgatgatccagattcagtatggggagtgccaatggaagcttgcattactccgtatcctgaacaaatgcacagagatgggggaagtgggctagctccctggcctgctcgattaacaaccccgcctccccgtcttgctgatttgtatgttactgctgacacatttgaaaaggacacggaaatgtggcagcaacgagtagaaaaatattggagtttgttgggcccaaaggtaaaaccagacactattagaaacatcatggacatgaaagcaaattttgggtcatttgctgctgcactcaaggaaaaagacgtatgggtgatgaatgttgtgccacatgatggaccaaacaccctcaagataatctatgatagagggctgataggcagcaatcatgactggtgtgaagccttctcgacctatcctcgaacatatgatcttctccacgcatgggcagtcttctccgacctcgataaaagaggctgcagtgctgaagacctgctcctcgaaatggaccgtatcctcaggcctaccgggtttgccatcgtgagggacaagggcactgtcatcgaattcatcaagaagtacctccacgcgctccactgggaagcagtagcggctgcagatgccgagcccagctcggaatcagaggagaacgagatgatcttggtgatccggaagaagttgtggctaccagaagcaggctcgcacacgtgattcccttcccggcgtctgcagctcagaagcgaggcgccagctgcaccagccatgatttatttctagccttaatgcacacatggagatagatttattatttacgaggatacggaaaatatgtggcaggcctggattaaaaaaaggctattttttctcattctcgacagatatgtgacttgatgtttgttctctagtttggttaggaaataaacattctttttcgtcttaatgttgaggctcatttaggtgtttgatgtccatc

SEQ ID NO: 4537 - DNA, 1228 bp, Zea mays
  Clone ID: 700381665_FLI
cgtttaaggatcttgtgggaagtgcatattatgttgctcctgaggtactgaaacggaaatatggggcagaggctgacatatggagtgctggggtcattctttacatccttctgtctggtgttcctcctttttgggcagagaatgaggatggcatatttgatgctgtcttgcgcggtcacatcgatttctcttctgacccttggccttcaatatccaatggtgcaaaggatttggttaagaagatgctgcgacaagacccaaaagaacgcctgactgctgctgaaattttgaaccacccatggattagagaggatggagaggccccagataagccacttgacattactgtcattggtagaatgaaacagttcagggcaatgaacaagctcaagaaagttgcattgaaggttgtggctgagaacttatcagatgaagagattatgggcctaaaagaaatgttcagatccctggatacagataacagtgggacaattactcttgaagagctaagatctggtttaccaaaacttggtacaaaaatttctgaatcagaaattaaacaattgatggaggcggctgatgttgatggaaatggtaccattgattatgcggagtttatatcagccacaatgcatttgaatagattggagaaggaagaccacatactcaaagcttttgaatatttcgataaggatcacagcggatacataaccgtagatgagttggaagaagctttgaagaagtatgatatgggagatgacaaaactataaaagaaatcattgctgaagtagatacagatcatgatggaagaattaattaccaggagtttgttgccatgatgaggaacaacagccctgagattgttccaaatcggaggcgcatgttctaactgtcatggacaatcacattgaatactttcaagaacaatctgcccttagacataatctttgtcccattttctttttggaacagccgttaagaagactccttaatttgagatccatgtctctgctgcccggacctgtttgtcccaaaatagggtggtgttatagtgattcgtacttgatgctttgagcttcatggactcttgcgtggcaatgtttatccccattgtacgtctggttgttctgctgcttcgatctgaggctttctttaggtgtaaacggatatctgaattattaggataaatttaatattttaaaatagatatgtatgaaatttgatgtt

SEQ ID NO: 4538 - DNA, 1506 bp, Zea mays
  Clone ID: 700381673_FLI
caaatccccctgtcccgctaggattcccccgaaaccctcccccaaaaccccagagcggagaagagcgcaagatgttcggcttcgggcaccacggccaccacggccagaacccgccggcgcacggcggcgtgcaccagcccaccttcaagatcttctgcaaggccgacgaggggtactgcctcaccgtccgcgacggcaacgtggtgctggcccccgccaacccgcgcgacgagcaccagcactggtacaaggacatgcgcttcagcacccaggtcaaggacgaggagggcaaccctgcgttcgccctcgtcaacaaggccactgggctcgccatcaagcactccctcggccagtcccacccggtacctgtttgtactcctgttcttctatccatcggccaggacgagggagggcttgatttcattttggttcttgtatccatttgttcaggtgaagctggtgccgttcaacccggagtaccaggacgagtcggtgctgtggacggagagcggcgacgtgggcaagggcttccgctgcatccgcatggtgaacaacatccgcctcaacttcgacgccttccacggcgacaagggccacggcggcgtgcacgacggcaccaccgtggtgctgtgggagtgggccaagggagacaaccagagctggaagatcctgccctggggcgacgaagcctacgccgcgggaggcagcagcgccgccaacgcgccccgcttcggcggcggcggcgagcccaccgtccgcatctactgcaaggccgacgaggggttcagcgccacggtccgcaacggcgccgtgtgcctcgcgcccaccaacccgcgcgacgagtaccagcactggatcaaggacatgcgccacagcaacagcgtcaaggacgaggaagggtacccggccttcgcgctcgtcaacagggtcaccggcgaggccatcaagcactcccagggcgagggccacccggtcaagctggtgccctacaaccccggctaccaggacgagtcggtgctgtggacggagagccgcgacgtcggccacggcttccgctgcgtccgcatggtcaacaacatctacctcaacttcgacgccttccacggcgacaaggaccacggcggcgtgcgcgacggcaccaacatcgtgctctggaagtggtgcgagggcgacaaccagcgctggaagatcgtcccctggtaaatgtgctgttctgtggctgcactggtcatcaccatgatctggagctttgaaggcatagccacctgtggtcagcagctgctgccgtgttgctagaataaagttggtggcgatcgatcgatcgatctttggtgatgggtgtccctccctgtgtgtttgtgtttagttccagtcgtttgtgaggaagtcagttatgtttgagtgagaggggtacttcgctcttcggttaactctgtacttgtcatgaggagagttttcatacccggagtgtagaactctgtactgtactcggatccttccttttcc

SEQ ID NO: 4539 - DNA, 1085 bp, Zea mays
  Clone ID: 700381679_FLI
aaagattttagctttcaagatgctgatgtccttaaaccagacatacttgctcctggcaatctcacatgggctgcatgggcgcctaatggaacagatgaatcaaattatgctggtgaaggatttgcaatggtttctggaactagcatggctgcgccgcatattgctggcattgcagcactgataaagcagaagaacccaaagtggagcccctcagcaataaaatctgccctgatgacaacggccaatacactggacaaagggagccatcctcttagagcgcagcagtacaccgcatcagaaatgatgacactttcacgggccacaccgttcgattgtggcagtggcgctgttaacccaaaaggcgccctcgatcctggccttgttctagacgcaagccatgaagactacatcacgtttctgtgctcgatccccgacgtcaaccagagcgaagtatcaaacatagccggctcggcttgcaactccaactccaagggacaacgccccttcgacctcaacatcccctcgatcgccgtctctcagcttcgaggcacggtggtagtgaagcggaccgtcacgagcgtgtccgacgaaaccgagacctacaccatcatgacaaggatgccgccagaggtcgccctggaggtgacgcctccggcggtgaccgtggtccccggagcatcacgagagataactgtgaccctgacggcgaggtccgtgaccggcacctacagtttcggtgagattgccatgaaaggtgaccgcggtcacctcgtcagaatcccagtcgtagctatgggattcaagtaggtagaagacgactgtgacatctcctagggagtagaggataggaagagcgagttgtgcctctgtaatctgaggtcttgagctgcagaggaacgttgtataattttttcataggttgtagagaataagagttggcacaatgctgtaagtgttatgcatgccccctccaggttgtaaaatatatttgggtgccctaaatcctctgacatggtgactagaggacctcttgtattgtagtccagccttgttctgattctctaatgcatgaaggtttgaatctc

SEQ ID NO: 4540 - DNA, 1293 bp, Zea mays
  Clone ID: 700381680_FLI
caattcgcttcgaacagggcagaggtgagacttgagagaaggaagaaggccatgtcgtcggcggcgcagcagcagcagaaggcggcggcagcggagcaggaggaggtggagcacgggccattccccatcgagcagctccaggcttctggaatagctgcattggatgtgaagaagctgaaagattctggtctccacactgtggaggctgtggcttacactccaaggaaagatcttctgcagatcaaagggataagtgaagctaaagctgacaagataattgaagcagcatccaagatagttccactgggatttacaagtgccagtcaacttcatgcgcagcgactggagataattcaagttacaactggatcaagagagcttgataagatattggagggtgggatagaaacaggatctatcactgagatatatggtgagttccgctctggaaagactcagttgtgtcacaccctttgtgttacatgtcagcttccactggaccagggtggtggtgaaggaaaggctctatatattgacgcagagggtacattcagaccacaaaggctcttgcagattgctgacaggtttggactgaatggtgctgatgtgttagagaatgtggcttatgccagagcttataatacggatcatcaatctagacttctgctggaagcagcttccatgatgatagagaccaggtttgctcttatggttgtagacagtgccacagctctgtacagaactgatttctcaggaagaggggaactatcagcgaggcaaatgcacatggctaagttcctgaggagccttcagaagttagctgatgagtttggagtagctgtggttatcaccaatcaagtagtggcccaagtggatggatctgctatgtttgctggaccgcagttcaagcccattggtggaaacatcatggctcatgcttcaaccacaaggcttgctcttcgcaaggggcgaggggaggaacggatctgtaaagtaataagctctccctgccttgctgaagccgaagcaaggtttcagttagcttctgaaggtattgcagatgtcaaggattgagaccatacctgctttacaggcatcttcagatccattggtctgctatttgctttgtcattccttgggccaactttcgtgttgcctcaccttgatgtacaaaacggtttcgttcacatatgtgaatgcacgcctgtgactgatttaggcgtcctgttgtaaataaaacgatgcctgttgccctgttgtgtgttgcatgtaatcgacaactctacatatcac

SEQ ID NO: 4541 - DNA, 1378 bp, Zea mays
  Clone ID: 700381685_FLI
atcgactggagcagggtggtgtcgcagtacgtgcgcgacgagacctacgagggcatcgaggccccgcactgggccgacctctccgaccccaacgccggccgcgccgccgtcgacgacgaggcctggttttgccgccccgattgccagcatccgaagacggccgaggatttcttcaagctgagccccagccccaagggcaagctgctgcgatcggtttccgccatgctgccgttcgccgaaagggacgccaacgccaccagcctcagggacggcagtagcaatctcaagtggcggggtggcggcgccgttgctgcctccacgccgccgaagccaaaggcagcgcccaagaagaggttccaggaggatagcgagaaccatgaccctgcgctggccacgccgcccccacggcaggcgccaagtaggccgccgttcggcgcccctcggtggaacaagaatgccaaggaggccatcaagtccagtgcggagaagcggccggacaatgctgagaaggaggcgctgctcaataagcacgtcccgccgaggcagctcaagagcaccctctcagcgaggaacctcttctctggaaaggatatacttggccagatttcggagttctacgatgagctgaagcggatggttggtggtggcgtcggccggccagtcacagacacacaggaggagcacagctcagacccagtgaatccgagctatttgatggagaaggtggctcctgatgagacagtgaaggaggaggcgagacaagaaacggtgaaaaagagtccaagcccaatgaagggaaagaaagtggggctgaaggtggaaccagggaagcaaaggtctccctctgtgctgaaggaggtgagggctacgccgccgactccacagcggtttctatccccatcgccaaaccgcattaagaatgttaaacctggagggatcacagcaggctcgccactcaaaaaggcaccaaaggagaaggggacacctagtaaggacctggagagcaaaaaagatgctgtgaggcaaccctttggtgttaaggatatgaacaatacaagagcatgtgatgcagaagggagctccagcagcatgttttggttcttgaagccctgcactttccttgtggagtagcgtcataacactacaattttttaacgaacaacacttgatatagttagaatccattacttcattcatttccaaatattctctgttcctatttgatcgattcatttcatgggtactctatccgggaagtaaacaaaaagaatcatgtatagtcatacaggttgaaagtcttctccatatgtataattcgagatatagcaaaacgtggttctgctgctttgtcgtttgttcaaataaactgcattttttt

SEQ ID NO: 4542 - DNA, 766 bp, Zea mays
  Clone ID: 700381713_FLI
ccgcaactgccgccgccactcccacgctcgcagccatgccgcccaagctcgacccgtcgcaggtggtggaggtgttcgtccgtgtgaccggcggcgaggtcggcgcagcgtcttcgctggcccccaagatcggcccgctcggtctttcccccaagaagatcggagaggacatcgccaaggagacggccaaggactggaagggcctccgcgtcaccgtcaagctcaccgtccagaaccggcaggccaaggtctccgtcgtcccctccgccgcggcgctcgtcatcaaggcgctcaaggagccagagagggaccgcaagaaggtcaagaacatcaagcacagcggcaacatcagcctcgacgacgtcatcgagatcgccaggaccatgaggcacaggtccatggccaaggaattggccggcaccgtcaaggagatcctcggtacctgcgtcagcgtcgggtgcaccgtcgacggcaaggaccccaaggacctgcagcaggagattgacgacggcgaggtggagatcccgtccgcttaagaaggattggtgtccaggactgtgttatctttgctgctgaagccattctctgcctagattttctcatatttatttgaggtgggggtggacgtggacgtggaactatggaagttatcacagcggagttttgcttagaaactttgtcatgctttaagtctgagacaatttctgtcaaattttatgaacattcctaggtacaatcgaagttaccagtgcctgagttttgtggg

SEQ ID NO: 4543 - DNA, 1259 bp, Zea mays
  Clone ID: 700381722_FLI
gttttagcggcgcacagaggggaagagaaccagcgagagagagagagacggaaagaggaagatgagtcaggagcctgaggatcctggtgaagttcctccgtgagacagcgggtcacgtggtgacggtggagttgaagaccggcgaggtgtaccgacggtccactcaagtgcgaggataactagaattgccagctcaagaacattaccttcaccgctaaggtatactctctctgcctgcgctaccttcggatccgagatagaaccccacgggttctgttcccctgagtatttttcttcatttttgttgattaatctgcaagatggggacatttcgcacctggagcatgtattcatcagaggaagcagagtgagttaatggaaaaactagatttatttcgtgatgcaatgttgttgagttatggtggcctaattatttttgtgactgatgattcctgtactgcttagtgtcttactgcgagaaaaaacaatggtgatatggtacataatttgcttgttttgtcgaatgtaggacaaaggatcaactattggagttggctgtggtcgtgctgttgcaatgcgtgctcagagttcaaaagttgttcaagatggcagtaatccttacaccttggaagggacagatggctagaaattttagcaaaacttcagcgtacgtataggtaaattatataagctgaactgacttgacaaattataatctctaaattattttgtttgcaggcttttgtatacgaaattaaaaatatagaactttgatatatagaaaaggatctgagtttagcatatgtcttttgtatatgtaagcttttatattaagctctcacattgcaccgaacacatgtagctttgttccatttaagggcttgttcggttagctctcaatccatgtggattgagcgggattggatgagtttaaatcccaaacaagtcaaacttcttcataattttttccaatcccatccaatccatgtgtattgggaataaccgaacaagtcctaattgatttataagatgtatgcattctcttatctgttctttgtaatctctcctaaaagaagcagatgctaacagcaagacatggggagggaaggagaacggatgcagctactgaatgcatagcttgcagtagtagttgctactgcatctgatccagttcctaatgacatttatttggtcccctcatttatgtgtgatgacagttcatatttttttattgtcaagtacctcctccattctatttt

SEQ ID NO: 4544 - DNA, 1974 bp, Zea mays
  Clone ID: 700381725_FLI
gcaaagataaatgatgcaaagaaacttcctgatagttctagaagtgggcatagcagcccggagtcattgacttgcgttgcaaatgttcttgttacagtgggtgatagaggttggagggagtatgatacccagatcacaatggattccgatggtcagagtgaaaggaggatatgcgtgaaacttgctgaagggaccaagtatgctcacaaggtctgtcaagttttgcagcctggggccacaaaccgctatacacatgccatgatgtggaaaggtggtgctgaatggtgcctggaatttcctgacagaagccagtggttgattttcaagcaaatgcacgatgagtgctatagccataacatcagagctgcttctgtgagaaacattccaatccctggtgtccatttggttgaaatccatgatgataatgatgtggtatcctttgtgcaatctgaagcttatcttgttcacatcggaacagatgttgaaattgctcttgatcaatcccgtgtgttatatgacatggacagcgatgatgaagagtggatatcaagctggcggaaatccttagtaagagacaacaccaccacacttcagtttgcagaagatttgtttgagagggttatggacaaactagagaagtttgcatatagccacaactgtaatggactcagcattgatcagatgaaggaactggagactgatgatgtacctctgcacactattgaagtgatacatgcatattggcaagacaagaggcagaaaaggggaatgccacttattcgacattttcagtcggctatgtggaagatctacgagcagcagctgcatgaatgggaatcaaaagtatgcagaatgcagagttcgtcaaatgggtaccaagaaaagaaattgcctcccaagcctgcattgtttgccttctgtttgaggcctcgtggactccatgtaccatacaaggggccaaagcagcgttctcataagaagcttatgtccacaggctgccatagcttttcaagagagcatgatggcttttaccggcaagtatcaggcaggagatacaatgaatgcactggggatgggaggataagcgaatcgtatgacactggttctctttactccccaacagggtactctcccaggttctctacaagaacagattctcctcgggcattcgagtcctcagaacgaagctccacaccaagattttccaggaacaacagtagcaccaaaaggagcgcagcccttgctttctccgacgaccaccagccatcaccttcctgccgcccccagagagcgaaacggagcgcgcacgaccactggaatgctgctatccacgattggcacaactcgaagcacctcttcccgggctcctcccgcgtcgacgtcgaggagctgaagctgcgggacgccgcgggcgcagcgcagcacgccgccgccatggcgaggctcaagagggagaaggcccactgtctgatgcagaaggctgacctcgccctccacagggccacggtagccctcatgattgccgacgcgatcaaatcatctggcagggacacgacccgggacggccgaagggattcgaggaacgaggagcgctgactcccctatttttttgggccttttgccgtgagcccttggcgcatgcatacagcttgatctcgactcatcgtttcctgatggtaggagtgtgttcgttccatttggtcgagccagtagttagcatccattttgttttctcctttgaatctccagtgtcctgtacatagtatttttttccccttcctttttgccctttttagacctcccggttaatcttttgcccggtgaagaatgggccagggtgtaggttcagctatctgttggtacaatctagcgtgttgtctgaatagcggctatgttgtctcatggtcgagtcaccccatagactggcttcgtttgggcctttgggagagatgaatgaaaggcacacagtatagt

SEQ ID NO: 4545 - DNA, 2206 bp, Zea mays
  Clone ID: 700381747_FLI
cagtgcgccacccgcacccaccaacgaggcaacgaaacccagtcggaagctagaccggcgacaagtgcagcgctcgccgcgatggattctgactacggcgtgccgcgcgagctgtcggaggtgcagaagaagcgcgcgctctaccagcccgaggtgcccccctgcctccagggaactactgtcagggtggagtatggtgacgccgcaattgcagctgaccaggcaggcgctcatgtgatcagccatgcgttccctcacacctatgggcagccccttgcacattttctcaggaagacggctgttgtccttgatgctaaggtcatatctgaacacccggtggtcagggttggcattgtcttctgtggcaggcaatccccaggaggccacaatgttgtttggggactctatgaggctatcaaggcccacaaccaaaacagcaaactcattggtttcctcggtggatcagatggtttgctagcgcagagaacattggagatcactaatgaagttcttgcttcatataaaaatcaaggtggatatgacatgcttggtcggacaaaggatcagattaggacgacagagcaggtcaatggtgcaatggctagttgccaggctttgaagttggatgctctggttataattggaggtgtcacttccaacactgacgctgctcaacttgctgagacttttgctgaggcaaagtgtgcaacgaaggttgtaggtgttcctgtaactttgaatggggacctcaagaaccagtttgttgagactactgttggctttgacaccatatgcaaggtgaatgcacaacttatcagcaatgtctgcactgatgctctatctgctgagaagtattactacttcattcgtttgatgggacgcaaggcttctcatgtggcattggaatgtgctcttcaatcacacccgaacatggtcatcctaggagaggaggtggctgcttccaaacttacaatttttgatattacgaagcagatttgtgatgcggttcaggcaagggcagaaaaagacaagaaccatggggttgttcttattcctgagggtcttgtggagagtattcctgaactatatgctctgcttcaggaaatccatggcctccatggcaaaggtgtttctgttgagaatatctcttctcagctttcaccctgggcatctgcactctttgagtttttgcccccttttatcaggaagcagctacttctccatcctgaatctgatgattcagctcaactttctcagattgagacagagaagcttctagcccagttagttgagactgagatgaacagacgtttgaaggagggcacttacaaaggaaagaagtttaatgcaatctgtcacttctttggctaccaagctaggggagcactgccttccaagtttgactgtgattatgcctatgtcttggggcatgtgtgctaccacatcatagctgccggtttgaacggttacatggccacagtgacaaatgttaagagtccagtgaacaagtggcgatgcggtgcggctcctatttcgtctatgatgactgtgcagcgatggtcgcgcggcccttcagccacccaaatcggaaagcctgctgttcacatggctagcgttgacttgaaaggaaaagcatacgatgtattgaggcagaattcttccaggtttttgttggaagacgtctacagaaacccaggtccgctccagtttgaaggaccaggtgccgattcaaagcctatctcactgtgcgtcgaggatcaagactacatgggcaggataaagaaattgcaggaatacctggagaaggtgaagagcattgtgaagcctgggtgctctcaggatgtccttaaggcggcgctgagcgccatgtcttctgtgacggagacactgaacatcatgacctcatcgtccaccggccagactgcactgtgactcgtttggtgccgttttgtggtgcggatcagaatccccactttttccatggtgtcgattgacaaagttaggagcagtaatcctgtggtgcggatcagaatccccactttttccatggtgccacacgggtcattcttttgtagcttcttgggagagttctatcagttttgaattcgatagtttattatgaagaggcttgttggtgagtttgagctcgaataatttttgaaacagacggattgcggaatcttaataaaccaaaatttgtgactgc

SEQ ID NO: 4546 - DNA, 224 bp, Zea mays
  Clone ID: 700381752_FLI
caaagtgctctcacaccttccatcagccttgtgtggacagatggttcattgaccatggttcatgcccagtatgtagacaggatgtgtaggtagatcatgatcgattctgggttatcatgcctttgtaaagttgctaccctcgtcatatagaagaaagatacagtacgtagcatgtaaaaagtcctgcacttgttcctattatgaaaaatggtttacacatcagt

SEQ ID NO: 4547 - DNA, 2749 bp, Zea mays
  Clone ID: 700381758_FLI
gccagggcccaggaggccagaagccgcacacgcggtcacgcggaccgcggacgactgccgccgccgtcgtcgtcgattggctcgtgagtcctgctcgctgctccttcctacgccgtgccaccgcctgctgtttcgctcgctcgtgcttggctgctcctgactgcaccgcgccgccgccgccgcagttctgctctccatcccgacacatcgcgccgcttcaagctaaagtgccactgcgccaccatccatcccggcatctcgcgccgtttcagtctcaagagcagatacgcaggtatggagccacgcactgagggagatgcttccaggaacttgcgccaaggtcgattgctagagccgccaccggtacctgctgtgaggacttctccagaaggagtgcagaggcacacaggtcaggatgtgattgctagtagaagtcaaagtgcagcagcatctgagacgggctcttctttgccatgtgaagatggaaatgcaacggctgaaactattggcagcagcacccatcctgtgcacattggtgtgcaaaaccaagacattgaacaagagcaagttcatgagactggaaagagatacaagaggttgacatctgatgtatggaattactttaccaagaaaaaagagataatagaggagaatgggaagaagcgtgagcaaatttggggttattgcaacttcccaaattgtaagcggcgatatagagcagagggccgccaaggtacaactgcatttaagaatcatttgaggtccgcacacagcatagttcgaggccaacaacaacttaaatttgagaaggaccttggtaataacattacccatatccagcctttcatgtatgatcaagaagttagcgtgaagaaacttatcatggcaataattatgcatgattatcctttcaatatagtagagcatggatatttcgttgatttcattaaatcacttcatcctagctttccaatcaagagttgtaatgctgttggtaaagaagtaatggatacatatttggaagagaaggagaaattatatgcacatttaaaaactgtgcattgtcgctttagtgtaaccatggatatgtggacatcatgctcgaataaatcatacatgtgtgttactgttcattggataaatgatgattggtgtattcagaagaggattattggtttcttcaatgtcaaaggacgacacactggtaaaaagttgtcagagacctttactgaagctatggttagatggaatcttgataagaagctattttccttgaccttggataatgctagtgcgaatgaattggcagtcaaagatataatttcagatctaaaagatggccaggcttccttagtttgtgatggtctgttttttcatgtaagatgtgcatgtcatatactaaatttagttgctagagatggcctgaaagtaatttcgaaaacaattgacaagatcaaagctcttgtactagctgtgaagggatctccattgcagtggaaggaacttatgaagtgtgctagcgagtcagaattagatacaaagaggggcatctcacttgatgtttcagcaagatggaattcaacttatttaatgctgcgggatgccttgtactacaaggatgcttttgcaaggcttaagtcttcaaatcgtcatatgtatgtaaaaaattatccatctccggatgagtgggacatggcactaaaaatctttcaatgcttgaaaaaagtttatagtctcgctgaaattctctctggcacttcatatccaacagcaaacttgttctatagaggtttttgtgacataaaagtattgctagatgactggtgttctagtgatgatgccaccatcagtgaaatggcaattgccatgagtcaaaaaattgagaaatattgggaacattctaacttggctcttgctgtggcatgctttcttgatcctcgatacaagaaaaaagttatagagtattacatgaagaaattccacggtgatgggtaccatgtggaacttgaaaaaattgttaatgtggtaagagggctctattgtttttattctagctctacacctgcaccagcaaagagtacatcaccggaaccagctaatagtgcatcagatattttaatggcaagtgtatctgatgaactggacagttttctgtatggtacaaatgaacctactctagttcggtccaatgagttggaaaagtacatggcagatccacttttgcgtcttggtggtccatttgatggcccatttgatattttagcgtggtggaagagcaagagggaagtgtatcctattctttcacaaattgttcgagatgtgatggccatacaagtatcaacggttgcatctgaatctgtttttaatgctgctggccgttttgttgatccttatcgtaatcgtcttgagccggagatggtagaggcattgatatgcaccaaagattggatagctgcagaaagaaaagattctaagattgttggttcaattgtgagtgaccttgaaattgagactttatctaccgtcatggctaacaaaataagagctgtggatgacaaggacatagaatggaaggaccaggagcatgatggtgagaacgaatatattgatagtgatcttgatgttatggatgaccacaatgaactttgagctatagctgtaggcttctagtttcagcttaatgtctactgcctttgagttactatgttatgtgtcttgggacttttataaactattatcgtgattgtgc

SEQ ID NO: 4548 - DNA, 1024 bp, Zea mays
  Clone ID: 700381776_FLI
aactaataattactttagattagaaagcaagaatcgagtcgagaagatggtgcagttcggcaagtggctgaggaggcagatcgagcggagcctcccggagtggcaggaccagttcctgcgctacaaggagctgaagcggtgcgtcaaggcccgctccggcggctgcccgccgttgcccgcggaggaggccgagttcgtggccgagatcgacgcggagaccgagaagatcaacgccttcttcctcgaccaggaggaggagttcatcatccgccaccgggagctgcagaaccacatcgagcgcgcgctgggccgcggcaggcccaggccggcgccggcgctgcacgaggccgaggtcgccgccatccgcagggagatcgtcaacttccacggcgtcatggtgctgctcctcaactacagcagcatcaactacataggcctggccaagatcctcaagaagtacgacaagcgcaccggcgcgatgctgcggcttgccgtgatggagtcggtgctgcagcagcccttcttcaagacggagacggtgtcgcatctggtgcgggagtgcgagtccttgatggaggccgtgttcccggaggcgcgcgatcggggccaggccgccgccgcggcgctcgccgtcgcggaggcggagcagggcatcttccgcaacaccgtggccgcgctcctcaccatgcaggacgtccgcgcggggagctccaccagaggaagccactcgctgccgccgctcaacctgccggactccgactggctccggtccttcgacccgccgtttccgatcccgacccgatgacacatgttggcttgttgctcgctcctagttggcttgcgccagcctcctcgatctcccttccttttcgtcttcttggcccggtacatgctgtgcttgccttggttttccatttttcccgctttctaagctctaattaactaatgtatgtagagtgcagtagtgagactacagtaaataaatgtaatttactggaatgacagccgagagaacgtacaagct

SEQ ID NO: 4549 - DNA, 956 bp, Zea mays
  Clone ID: 700381777_FLI
aggcgatcgcatattcgcacccacccatcacacgacaaaatccctcaccctcgtgagtcctgacgccctcgcccgtgctcgcagttggtagggttgtagccatggcgtggagcgccgccgccgtctccaggttcgccgccgcctccccacccgcggcacccatctccgtcaggcttggagccgccgcttctcgctcctccctgtccttctccagtgggcgccgacgccccgtggccgcgtccctctcgacctctgccaccgttgtaaaggaggctgttcagacagagaaggcaccaccagcactaggcccttattctcaggccatcaaagcaaataatcttgtgtttgtttctggagttcttggcttgaatcccgagaccaggaagtttatctctgaaaatgttgaggagcaaactgagcaggttatgaaaaacatgggcgagatattgaaagctagtggtgctagctattcttcagttgtgaagacaacgatcatgttggctgatctgcaggatttcaataaagtaaacgagatctatggcaaatatttcccggcgccagcacctgcacgatcaacctaccaagtggcggcgctgccactgaatgcccggattgagattgagtgcatcgctgctctctaatcagatcatccaaccactcattaaatcatcaataagcacccaggaatttgtggtagaggtacctgtaccagttcagtgtctgaaaactgcgggtaacaaacctttgtgtcccggataagtgatgtgtgtgtgtgtgtgtgtgagtgaacagtgcatctagtaggagaattgttgcgtggtttgttacttggattcttcgctctttagacaagaagtaccatggcatcaacatcaatagcctactgttttcttcccaataagaatgaattggcttccccaacagatcatggatatagtcgtgcgtaatattgtttt

SEQ ID NO: 4550 - DNA, 1131 bp, Zea mays
  Clone ID: 700381786_FLI
ccgcctttccatgaccacgccgctcctgctgtgtgatcctaggacgacgcgcctcccgactgccctcgcacgctaggagtggggaggggaggctgagcacgagcacgacacgagcgccgccaacgccaacgccaagacgagctcgcgaaggaccatgccgagatccaggggcaacgagccgccgctgcgggcgtcgcagcgcgcgccgctgcacctcaagacgacggcctgctccgaggcgaatggcgcgcaccaccgccccgtcgccgaccggagcagccccaaggtcggcgaccggcactcgccgcgcagccctctgcccgagaagaagcgtgcggccgggacgcgtgtggcggagctggaggcgaagctggggaaagtgcaggacgagctcaagaagctgcgggagcagctcgcgtccgctgaggccgccaagaaggacgcgcaggtcgcgctcgaggaggccaagaagcgcgtcggtaccaagggaagcccggcctcctcatccaccaccaccacttcgcctccctctcccccttcgccaggtgtcgaaagcgcgaagaagcccgaggagctgaagctgccgcagccggcggccgaggaggagagcagcgtaaacgcgccggcgaccgatgtgtttgaggtcgtccgggccgagtccggggacaaggagaaccatagcgcgacggccacgggcgctgaggactgcgaggttgtgagctgcggcgaggaggcggcgctggccgagaaggaggaggaagaggagacgaagaaaatgatcgaggaggacaacagcgcggcggcggaaaccgacggcgccgagaaggagagctgggaggtcctggagctgaaggcgaagctggcggagaaggacgcggagatcgccgccctcgcggcagaaaacgccgagctcaagaagcggtccggagaggccgcggaggcggcgaagatggtcgaagaggacgcggcggcgaaggcggcccaagccgagcgcgatctgaaggatggcgcggcgcgggaggcccggacgggcgagcagctgagggcgtcggaggccgcgcgggaggcgctggacgccgagctgcggcgcctgcgcgtgcagaccgagcagtggcgcaaggcggcggaggc

SEQ ID NO: 4551 - DNA, 730 bp, Zea mays
  Clone ID: 700381803_FLI
ctactgacgccgccgccgccgccgccgcgctctctccgtcggactagtcagaggatccgtcatggcgaagaaccccaaggtgttcttcgacatcctcatcggcaagtccaaggccgggcgggtcgtgatggagctcttcgccgacaaggtgcccaagacggccgagaacttccgctgcctgtgcacgggcgagaagggcctgggctccgcggggaagccgctgcactacaagggctcggccttccaccgcgtcatcccgggcttcatgtgccagggcggcgacttcacccggggcaacggcacgggcggcgagtccatctacggcgccaggttcgccgacgagaacttcaagctgcgccacacgggacccggcgtgctctccatggccaacgcggggcccgacaccaacggctcccagttcttcatctgcaccgcgcagacgccctggcttgacggcaagcacgtcgtcttcggcaaggtcgtcgatggctacgccgtcgtggacaagatggaggctgtcggttctcagtcaggtgccacggccgagagcgtacgcatcgaggactgcggccagcttgccgacgactgagggcctcgctgtgtccgattgtaaccaaatgaatgatcaataaatttctttctttcattcttttgtttctgtggagatggataccggcctgtagttaattaaccaatataaactatggatggatggggcggtgatttgatc

SEQ ID NO: 4552 - DNA, 2216 bp, Zea mays
  Clone ID: 700381811_FLI
cgcgccgcctccgagacagccgccgcaaccatggccaccaccgccgccgcgtctaccgcgctcactggcgccactaccgctgcgcccaaggcgaggcgccgggcgcacctcctggccacccgccgcgccctcgccgcgcccatcaggtgctcagcggcgtcacccgccatgccgatggctcccccggccaccccgctccggccgtggggccccaccgagccccgcaagggtgctgacatcctcgtcgagtccctcgagcgctgcggcgtccgcgacgtcttcgcctaccccggcggcgcgtccatggagatccaccaggcactcacccgctcccccgtcatcgccaaccacctcttccgccacgagcaaggggaggcctttgccgcctccggctacgcgcgctcctcgggccgcgtcggcgtctgcatcgccacctccggccccggcgccaccaacctagtctccgcgctcgccgacgcgctgctcgattccgtccccatggtcgccatcacgggacaggtgccgcgacgcatgattggcaccgacgccttccaggagacgcccatcgtcgaggtcacccgctccatcaccaagcacaactacctggtcctcgacgtcgacgacatcccccgcgtcgtgcaggaggctttcttcctcgcctcctctggtcgaccagggccggtgcttgtcgacatccccaaggacatccagcagcagatggcggtgcctgtctgggacaagcccatgagtctgcctgggtacattgcgcgccttcccaagccccctgcgactgagttgcttgagcaggtgctgcgtcttgttggtgaatcgcggcgccctgttctttatgtgggcggtggctgcgcagcatctggtgaggagttgcgacgctttgtggagctgactggaatcccggtcacaactactcttatgggcctcggcaacttccccagcgacgacccactgtctctgcgcatgctaggtatgcatgggacggtgtatgcaaattatgcagtggataaggccgatctgttgcttgcacttggtgtgcggtttgatgatcgcgtgacagggaagattgaggcttttgcaagcagggctaagattgtgcacgttgatattgatccggctgagattggcaagaacaagcagccacatgtgtccatctgtgcagatgttaagcttgctttgcagggcatgaatgctcttcttgaaggaagcacatcaaagaagagctttgactttggctcatggaacgatgagttggatcagcagaagagggaattcccccttgggtataaaacatctaatgaggagatccagccacaatatgctattcaggttcttgatgagctgacgaaaggcgaggccatcatcggcacaggtgttgggcagcaccagatgtgggcggcacagtactacacttacaagcggccaaggcagtggttgtcttcagctggtcttggggctatgggatttggtttgccggctgctgctggtgcttctgtggcaaacccaggtgtcactgttgttgacatcgatggagatggtagctttctcatgaacgttcaggagctagctatgatccgaattgagaacctcccagtgaaggtctttgtgctaaacaaccagcacctggggatggtggtgcagtgggaggacaggttctataaggccaacagagcgcacacatacttgggaaacccagagaatgaaagtgagatatatccagatttcgtgtcgatcgccaaagggttcaacattccagcggtccgtgtgacaaagaagaacgaagtccgcgcagcgataaagaagatgctcgagactccagggccgtacctcttggatataatcgtcccacaccaggagcatgtgttgcctatgatccctagtggtggggctttcaaggatatgatcctggatggtgatggcaggactgtgtactgatctaaaatccagcaagcaactgatctaaaatccagcaagcaccgcctccctgctagtacaagggtgatatgttttatctgtgtgatgttctcctgtgttctatctttttttgtaggccgtcagctatctgttatggtaatcctatgtagcttccgaccttgtaattgtgtagtctgttgttttccttctggcatgtgtcataagagatcatttaagtgccttttgctacatataaataagataataagcactgctatgcagtggttctg

SEQ ID NO: 4553 - DNA, 1735 bp, Zea mays
  Clone ID: 700381837_FLI
ctccgctgggccaccagctttgaccgccgcctcccttcccctccgctactgcgacctccccaccccactcccccgcaggagcggcggcggcggcggcggcgaggtcgtaccccacatcggcgagcggcggcggcaccgccggaggcaaaggcaagatgttcgggcgcgcgccgaagaagagcgacaacaccaagtactacgagatcctcggggtgcccaagtcggcgtcccaggacgacctcaagaaggcctaccgcaaggctgctatcaagaaccaccccgacaagggcggtgaccccgagaagttcaaggagctcgcacaagcctatgaggttttgagtgatccagagaaacgtgagatttatgatcagtatggtgaagatgcccttaaggaaggaatgggcggtggaggatcccatgttgatccatttgacatcttctcatcattttttggaccctcttttggaggaggtggtgggagcagcaggggaagaaggcaaaggaggggagaagatgtagtccacccacttaaagtttctctggaagatctttacaatggcacctcaaagaagctctctctttcgcgcaatgtcatctgctccaagtgcaagggcaagggctcgaagtctggtgcctcaatgaggtgccctggttgccaggggtcaggcatgaaagtcactattcgtcagctgggcccttccatgatacagcagatgcagcagccttgcaatgagtgcaaggggactggagagagcatcaatgagaaggaccgctgcccagggtgcaagggtgagaaggtcgttcaagagaagaaggttcttgaggttcatgttgagaaggggatgcaacacaaccagaagatcaccttccctggtgaagctgatgaagcgcctgatactgtcactggagacattgtattcgtcctccagcagaaggatcactccaaattcaaaagaaagggtgaagatctcttctatgagcacaccttgtctctgaccgaagcactatgtgggttccaatttgttcttacacatctggacaacaggcagcttctcatcaaatcagaccctggtgaagttgttaaacctgaccaattcaaggcgattaacgatgaggggatgccaatttaccagaggcctttcatgaaggggaagctgtacatccatttcacggtggagttccccgactcgctggcaccagagcagtgcaaggctctcgagacagtacttccaccaaggccttcatccaagctgacagacatggagatagatgaatgcgaggagacgactatgcatgatgtgaacaacatcgaggaagagatgcgcaggaagcaagctcacgctgcccaggaggcgtacgaggaggacgacgagatgccgggcggagcccagagagtgcagtgcgcgcaacagtaagcagactatcatcaaggcaattgggaggggtggtgcccttaaagcatgggagtgatctctggttttgctgtcgccgagctgggaaataggaagctgaatcgacctcacaagcggggaatgtatccttttttgctgcaacataaaaaatgctacccaggcatagctgggtaccttttaacttctgtttgtgggatttgctagagtgatggtttcgatatatagggggacttgaatgtctggaatgctacggtataacgcacatttgggtgcaatgtctgttgcattgctgtctgaatgacatcgttggtacatttattttc

SEQ ID NO: 4554 - DNA, 1277 bp, Zea mays
  Clone ID: 700381851_FLI
ctcccgtctccgtcgtctcgtctccgctcctcacctcgccagccatgggcaagatcaagatcggaatcaacggtttcggaaggatcggcaggctcgtggccagggtcgccctgcagagcgaggatgtcgagctcgtcgccgtcaacgaccccttcatcaccacggattacatgacgtacatgttcaagtacgacaccgtgcacggccaatggaagcacagcgacatcgccctcaaggactccaagacgcttctcttcggcgagaagccggtcaccgtctttggcatcaggaaccccgaggagatcccgtggggtgaggctggtgctgagtatgtcgtggagtccaccggtgtcttcactgacaaggacaaggctgctgcacatctgaagggtggtgccaagaaggttgttatctctgccccaagcaaagatgcgcccatgtttgttgttggtgtcaatgaggacaagtacacctccgatgttaacattgtttccaatgctagctgcaccacaaactgccttgctccccttgctaaggtcattcatgacaactttggcattattgagggcttgatgacaactgttcatgccatcactgccacccagaagactgttgatggaccctcagccaaggactggagaggtggcagggctgccagctttaacatcattcccagcagcaccggtgctgccaaggctgtcggtaaggttcttcctgaattgaatggcaagctcactggcatgtccttccgggttcccaccgtggatgtgtcagttgttgacctcactgtcagaatcgagaagggggcctcttacgaggaaatcaagaaagctattaaggctgcttctgagggcccactcaagggtattatgggctacgtggaggaggatctggtttccaccgacttcaccggtgacagcaggtcgagcatcttcgacgccaaggccgggattgccctgaacgaccacttcatcaagctcgtctcttggtacgacaacgagtggggctacagcaaccgcgtcgtcgacctgatccgccacatgttcaagacccagtagagagagatatttctgcctccctatcgtgggtcgtccccaatggcctttggtcgcagaccatctttgctgcttgtctatgctgagaataaatgtgaacggtgcccctggacgctggatccatgctggttttggacacgttgtctttttgtgtttaacttatctgctaccgtcctgtaacgaattcactaagttctagttcttttgtgctttgttaagaat

SEQ ID NO: 4555 - DNA, 907 bp, Zea mays; identical to SEQ ID NO: 3703
  Clone ID: 700381860_FLI

SEQ ID NO: 4556 - DNA, 697 bp, Zea mays
  Clone ID: 700381887_FLI
gcctccgacatcctactttcgtcctcacgagtgaccgataatccgccggcgctaagatgttggtttatcaagatctcctatctggcgacgagctcctgtcggattcattcacctacaaggagctcgagaacggcgtcctgtgggaggtcgagggaaagtgggtcacccaaggtcctgttgatgtagacattggtgccaatccatccgccgagggtggtgaggacgaaagcgttgatgacacagccgtgaaggtggttgatattgttgacacattccgtctacaggagcaacctccttttgacaagaaatcatttgtctcttacattaaaaaatacatcaagaatctcactgctgtgttggagccagagaaagcggatgagttcaaaaagggtgtcgagggtgcaaccaagtttctccttagcaagctgaaggaccttcaattttttgttggtgagagcatgaaggatgatgcgtccgtggtattcgcctattacaaggatggtgccactaatccgacattcctctatttctctcatggtcttaaggagatcaagtgctaggcttgcggcgagattagttacccatgttgggtactatctatgtactattgttatatccacaactatagttgtcctggttgaattgaactcaaaagggtttgtttgagaaaaaactgtccaagattggattgcttgtt

SEQ ID NO: 4557 - DNA, 1191 bp, Zea mays
  Clone ID: 700381948_FLI
cagatagctctgaattaaatgatagaaagagtgatatggataatagcgacgtggattcaaggccaagaaagaaaagggcagaaaaggctaaagtcaccaaaaaacagaaaatagttacaaatgagaggaaactgtcaactccaaaggctaaaaaggttgcaaaacaagatttgggtagcagtactgaagaacagggtggcaattcagcagaagaggataattctcattcatccgctgaggaagataataagagaaaacggcaacagactccagcttatgggaaacaagcagagcatctgaaatcgataatcaagtcttgtggaatgactattccacctactgtgtatcggagagtcaagcaagctgctgagaacaagcgtgaggcctgtttgataaaggagttacaggatatacttgaaaaggaaggattgtcaaaaaatccttctgaaaaagaaattaaagcagtgaagaagagaaaagaaagagcaaaggaacttgagggcatagacatgagtaatattattactagttcgcgtcggagaagtacatcaagtttcatacccctgccaccaccgccgcaaatagaagtggatagtgatgatgatgaagacgatgacgatgatgcagaaggcaatgatgcagaaggcgatgatgatgatgcagaaggcgatgatgaagacgatgcagaaggcgatgatgatgatgcggaaggcgatgatgcagaagacgatgatgaagttgatgaggagaatgtcaaaggtcgagatgaaggtgataatgatactgccgaagctgccaacggttctgctgatgatgctgaaaaggagaacaattgattccggccccagaataggttcagcttcatgttggcttcggcaagttggcctcgttcgtggatgtctggatgtagccagttgctcaggagttctcttctgacgtttatttatgtgtgcgtgatgggaacatttgttggcttcagctttgggtgaaacatgaggaacatattgtccttgtagtgatgtgcaatgtcacattcgtcctcttagcatcttgttcgcgattgtgtagattacaacaacagtcgcaaaacatataagttagcagtaatcaagtactgattggtttattagtttctgatatagtataaacctcgtaggtgaaagattggaattactatgcgcttcatgcttt

SEQ ID NO: 4558 - DNA, 846 bp, Zea mays
  Clone ID: 700381953_FLI
gtcgtctcctgcgccgacatcgtcgcgctcgccgcacgtgaatccgtcgccctggtacatacagtatactatatactgaactgaataattagttagttgccttacctgatcagtcatcaccatgcatgagctgctgcatgcagggtggcggcccggcgtacaagttgccactgggcaggcgcgacgggctggcgccggcatcgaacgccgccgtcctagcggcgctcccaccgccgacgtccaaggtgccgacgctgctgtccttcctggcgaagatcaacctggacgtgacggacctggtggcgctgtcgggcgggcacacggtgggcatcgcgcactgcggctccttcgacaaccggctgttcccgacgcaggacccgacgctgaacaagttcttcgcggggcagctgtaccggacctgctcaaccgggagggcctcttcacgtcggaccaggacctgctgaccaacgccaccacgcgccccatcgtcacgcgcttcgccgtcgaccaggacgccttcttcgaccagttcgtctactcctacgtcaagatggggcaggtcaacgtgctcacgggctcccagggacaggtccgcgccaactgctccgcgcgcaacggcgccgctgctggtgacagtgacctgccgtggtcgtccgtcgtcatcgagacagtcgccgacgccgccggtagcctcgtgctagaaacgacgacgacgtcgatggcaatggcagcatgctctgcagggagagcgctggcgcgggcaccagtagatgatccctgtccgcgcgggcccgggctcagccgaccaatcgatgtcaaccgcggcagcagtagcatagctaaggc

SEQ ID NO: 4559 - DNA, 916 bp, Zea mays
  Clone ID: 700381959_FLI
ggccgccgagcggggcgcacatgcggagcctctccctcgacgccgccttcttcgacggcctctcgctgcagggaggcggcggcggcgggggggtaagagggggcgtggcggggcacaagaggagcggctccatggacggggacacctcgccgttcgagggcgagtcggcgccgccgtccgtgctgccggactacgccaagaaggccgtgcccgacgacaagctcgccgagctcgcgctcctcgatcccaagcgcgccaagaggatcctggcgaaccggcagtccgcggcgaggtccaaggagaggaagatcaagtacaccagtgagctggagaggaaggtgcagacgctgcagacagaggccaccacgctttcggcacagctcacgcttcttcagagggacacctctggtttaaccactgagaacagggagctgaaactccggttgcaggccatggaagaacaagctaaacttcgagatgctctaaatgatgccttgagggaagaagtccagcggcttaagatagccgcagggcaggtccccaacatgaacgggaatcccttcaatggaggactatcacagcagcagcagatgccaagctatttctcacaaccacagcagatgcaatacttcagcggccaccagggccagcatcaccatccgaagcatgacccccagaattcttcaaacggcggtggccagcccttgagtgactccatggatttcatgtgaggactcaggggagacagctcaggagtgttgcctgagatcacataccaacttcaactaaagtaatgtaaatgtagctgatgtataccatattcagtgttatgatatgaaccattgtagtttagctagctgttccttgtaccattaatcaaaagttcattcatggtgacaaacctatcatcgcttta

SEQ ID NO: 4560 - DNA, 1423 bp, Zea mays
  Clone ID: 700381963_FLI
caaccccagtttctctcatcaaatgcctgagatccatcaagaaacacgcctttgttgcatctccctatcctgtcatcataacacttgaagaccacctcccctctcaactccaggagaaagttgccaagatggttgttgaagtatttggcaacatactgtactacccgccagacgacacccatgagctcaaagaattaccatcacctgaacaactcaaaggacgtgtcctcctctcaacaaagccccccaaggagtacctcgaaaccaagcttagtgactccacgaaggagggtgatgctgacctccatcttggcaaaggaaccggtgatgacgcggtgtggggaaaagaagtaccagattttcggaccgagatccagtctgctgaaaaggacgacgagaacgacgacgttgatgatgaggaagaacaaaaactgcagccccatatagctccacagtataaacaccttattactatcagagcagggaagccaaaagactctctagctgatgccttgaagagtgatccagaaaaagttcggcgtctcagtttgagcgagcaacaacttgccaaagcggcaaaggatcatgccacggaaattgtgaggttcacacagagaaacatactgaggatataccccaagggcactcgagtcacttcatcgaactacaatccgttcgttggttgggtgcatggtgctcaaatggtggcattcaatatgcagggatacgggagagcgctgtggctaatgcacggattttacaaagcgaatggcgggtgcggttatgtgaagaaaccagatttcttgatgcagacagaaccacaagtcttcgacccaagagaaccccagcctgtgaagaaaacgttgaaggtgaaggtgtacatgggcgatgggtggcgaatggacttcaagcagacacacttcgatcagtactctcctccagatttctacacacgggttgggattgctggagtcccagcagactcggtgatgaagaagaccaacgcgatcgaggacaactggaccccggtgtgggagaaggagttcagcttcccgctgactgtcccggagctcgctctgctgcgggtggaggtgcacgagtacgacatgtcggagaaggacgacttcggtggccagacagtgctgccggtgtcggagctgcggcccgggatccgggcggtagcgctcttcgaccgcaaagggatgaagtacaaccatgtgaagcttctcatgcgtttcgagtttgcctagcctgaccctgaccatgcatgccccccccccccccccctcctgttgtgtgaatggatattgcagtctcagtgtgcttcctttgtacatagattgcttggcttggatgatatgtgcaacagacaattccttcagttgttatgatcaaataataaagaggcagcgtccttatgaac

SEQ ID NO: 4561 - DNA, 977 bp, Zea mays
  Clone ID: 700381966_FLI
cccagcacgacgagacagtcaccaacgacgagattgctgggtagagatgaggactgtgtgcacacggatgggaaccatggcgccaccctcatctctacccagcacgacgagacagtcaccaacgacgagattgctgctgacctgaaggagcacgtcatcaagccagtcatccccgagcagtacctcgacgagaagacaatcttccacctcaacccgtctggccgcttcgtcatcggcggacctcacggcgacgctggcctcactggccggaagatcatcatcgacacctacggtggctggggagcccacggcgggggcgccttctccggcaaggacccgaccaaggtggaccgcagcggggcctacgtcgcgaggcaggctgccaagagcatcgtcgccgccggcctcgcccgccgtgccatcgtccaggtctcctacgccatcggcgtgcccgagcccctgtcggtgttcgtggacacgtacggcaccggcgcgatccccgacaaggagatcctgaagatcgtgaaggagaacttcgacttcaggcccggcatgatcatcatcaacctcgacctcaagaaaggcggcaacgggcgctacctcaagacggcggcctacgggcactttgggagggacgaccccgacttcacctgggaggtggtgaagcccctcaaggcggagaagccgtcttctgcatgaggcgcctcctctgttttggaagaagcttttggtctggtctggtctggtctggtgtgcctgcgctctatcatgcttttttatggctcctacttgtgattcttgatctgccccttgcttatcatttgtactgtactgtcactgtcctaataagtggtacgtgtgcggggtcgtattgtgtctgcttattcacctagaggattatttctggttttgctgcttatgtaatgcttttaaaaccatgaaagaagctacaggctcctacagctgctttgagaagt

SEQ ID NO: 4562 - DNA, 964 bp, Zea mays
  Clone ID: 700381984_FLI
gtcgcgcggcgggcctaccagcgtcgtcatctacgacatccacgcgctccaggagaggttctacttcggggacgacgtcctgccatgcttcgagacagggatcccgctcctgctgcagcgcctccgccagctcccggacgcagaaaatatcaccattgcctttccagatgacggtgcgtggaagcggttccacaagctgttacagcactttccaatgatagtctgtaacaaggttcgggaaggtgacaagagaatagttcgtataaaggaaggactacctgaaggccgtcatgttgttattgttgatgatttagtgcaatctgggggaactcttagagaatgccagaaagttctagctttgcatggcgctgcaaaagtcagtgcttatgtgactcatgctgtgtttcctaagcagtcatatgaacgtttcatggcgtctagttctgctgggccaggtgacagatttgcttacttctggatcacggactcatgcccacacacagtaaaagctattgggcaaagacctccatttgaggttctgagcctcgctggctcaattgcagatgctcttcagatatgagcgtacactggtagatgggcatgggcttggattgttgatgcccaccagattgaaacttgtactatgaggtggaatgctcccgcttttcctaaatgtaagagttggtttccagttcctggaaaagcaaataatgtgtagtaagttaagtacctgaaggttccataaacagccctgtggtttgtaataaaatcaggcattggatactcaattgttgacagctgtgtatttgtcaatgttcacttctgtttgaagtgcgcgagaccagtgctttactttcctgacccgtcggagtatcggtttagcaacttcaggtactgggctttgttgtgaacaaatagtgcaatgtaactgaacatgaacctaattgaatttctattagattgg

SEQ ID NO: 4563 - DNA, 883 bp, Zea mays
  Clone ID: 700381991_FLI
cggcctctccttcccggtctcctccgcccgttgccttcgtcccctccatctccggctgcgtcgccggcgagcccgacaccgcgaatcggatccgccgacaaggtgagagggaagagatggggctcacgttcaccaagctgttcagccggctgttcgccaagaaggagatgcggatcctgatggtgggactcgacgccgccggaaagaccaccatcctctacaagctgaagctcggcgagatcgtcaccaccatccccaccatcggattcaatgttgaaactgtggagtacaagaacatcagcttcactgtctgggatgtcgggggccaggacaagatcaggccactgtggaggcattacttccagaacacgcagggtctcatctttgttgtggacagcaatgatagggaccgtgttgttgaagcaagggatgagctccaccgaatgctgaatgaggatgagttacgtgatgctgtgttgcttgtttttgctaacaagcaagatcttccaaatgctatgaatgccgctgagatcactgataagcttggactgcattcacttcgccaacgtcattggtacattcaaagcacttgtgctacaacgggtgagggattgtatgaaggcctggactggctgtccagcaacattgcaaccaagtcctaaattgtcaagcgaggtttggatcatctaggagcttttggatgatgatgatgatgatggtgctggatatttagggttgggttggtatttccgtatgtaagatgtatgcccctgagctcggcagtttttgagctctgcttaagattctcacagttaaattgttttatgtaatttgggccttgagatgtttctgaaccaaacagctaaaagagttcagttgagtt

SEQ ID NO: 4564 - DNA, 456 bp, Zea mays
  Clone ID: 700382010_FLI
gcaagatttataaatcacagctgccaacctaaccttttcgtccagtgcgtcttgagctcacacaatgatgttaaactggcgaaagtgatgcttttcgctgctgacaccatacttcctcttcaggagctatcctatgactacggttatcgattggacagtgttgttgggcctgatggaaaaattgtgaagctggcctgccactgtggtgctcctgattgccggaagcgcctctactaacctgcagtgtgtttctttctatttggattttggaggaaacagcttatattgtaggaaaagcagtcatggtacctatgtagttgacatgctctgataatatatagcaaaagaggagcaacttacttatgaggtgtttactttgaggaatgagctagtgtatcatcttctcactactcaatatttttgtttggtttatggaataaaatgatttgatccatc

SEQ ID NO: 4565 - DNA, 1031 bp, Zea mays
  Clone ID: 700382092_FLI
ctaggaatgggggccaagtcagtcttcccagtgacaattggggaggtcttccttctgctcatgggatggacaacatttcaagccttgggtcagggaaccttggtcgtggaactggagataataactttggtttgccttctggtagctatggcaggaacaactcaactggtacaattggtgagcctttttctgcagcaggcaatacatatgaagtaaacaatcgatatacatatgggagcagctctatttatggtggcacagcctggaggttcgcatcatctgaggttgacatgccttcttttgttcatgatattggaaatgttgatccgactattaaatgatacatgtcagcaagtcacatgggcaactaccctgttaacaacaatcagccaagcagaggcatcagttcctagggggcggcgagtattacacttgggggtagtagaaggaagaaacacccattcagccaggcaatcccggcgcacacggctgtgaatcggtcggtgatttgtcaggttaatacacaggttagtttttgtgtagctaacccagcggcgtggtttgcgaacaccgacatgctagaggtggaagctgctaggctagctagaggaaaggagcgcggatggatatacagaaacatttcgtgaaggttttgttttgtttcttgttttttgttttgtttttggcggggggtggtggtcatgttctagttttggttcgtacgcgcgtggtgaggccttttggagttttgaatgagatgtagtagtaattgttgcggcacatattttagaagtgaagccatgttccaacagaagctggaaagagatgtctgctgtatacgggtgagcatgtataccaaccaaagggatgctgtattatacattagcctgtgtgtgtgtgtgcgtgtttttttttggtttgatccggtttttagccatttgtcttttttttcactctggagattttgctgacttgctctgaattattatgcatgcagtggtgtttattttgttctcttcatgtggtgtgat

SEQ ID NO: 4566 - DNA, 702 bp, Zea mays
  Clone ID: 700382101_FLI
cgacgagctgatcgccgaactggaccagatgtttgacttcgatggtgagctgaagagtccttgcaggaactggttggtcgtctacactgacaacgaaggcgacatgatgctggtcggcgacgacccctggaatgagttctgtgacatggtccacaagatcttcatctacacaagggaggaagtggagaggatgaacccaggtgccctaaactcgaggctcgaagactgcctgtctgactcgctgggaagagggctggcttccaaagagccccggagcggcccctcgacttcggctgtcgattctgagaaccgcgctaacttgtccagtcagtgagcccttttgaaagtggtgaagaagacaaaaggccacgtgtcagagtgaccggaagaacgagaaaggggtgtgtttcagtggtgtgtagtaggtaggtaattttgtgtgtatgcctccgggtaaaagccccgcggtacccagtttgtagatggtgcttctcctggtgctagtttcccgtcgtaagctggatttttttggggggtgtgtgccctgctctgtgtgctgacccgcctgggggtaagttgtagcagagcaggagaaagcaggcaagaaaccgctggtgcgcctgcttggccaatccttttccttgcggagcgctgtaaatagccttggatctgaagcgtagtaatgtattgtcatggtactcg

SEQ ID NO: 4567 - DNA, 1711 bp, Zea mays
  Clone ID: 700382138_FLI
aactgcccgcgttcccgtgcccgtactaaaaataaataacggactgccatctcctcgtgcactccgccaaccgccgccgccactcgccactctcacgtctcgcccatcccgccactgctgctctccagagtccaggcgacccaggctgcgcggtcgctcggtgttgttagtcccgaccgccgccggccatggcatccaacggcatcgccccaagagatgtatgtgttgttggcgttgcacgcacccctttgggtggtttccttggtgccttgtcttccttgcccgcaacaaagcttggttctatagcaattgaagctgctctgaaaagagcaaatgtggatccggccctcgtgcaggaggtctttttcggaaacgtcttgagtgctaatttgggacaagctcctgcaaggcaagccgctctgggtgcagggataccaaacactgttgtttgcaccactgttaacaaagtctgcgcatctggcatgaaagctactatgttcgccgcacagtcaattcagctgggtatcaatgatattgttgtggcaggtggcatggaaagcatgtccaatgccccaaagtacattgctgaagctaggaaagggtctcgttttggacatgacacacttgttgatgccatgcttaaggatggactttgggatgtatacaatgactgtgccatgggaatgtgtgccgaactttgtgctgacaatcatgccctcacaagagaagaccaggatgcttttgctatccaaagcaaccagcgtggaattgctgctcgtgacagtggtgcttttgcatgggagattgttccgattgaagttcctgttgggagaggaaaaccacctgtacttattgagaaagatgaaagcctggataagtttgacccagcaaaactgaagaaacttcgcccaagtttcaaggggatggtggtaccgttacagctggaaatgcttctagtataagtgatggggcggctgcattagttttggtgagtgggcagaaggctcaagagcttggcctgcaagtccttgcaaggatcagaggatatgcagatgcagctcaagctccggaactttttacaaccaccccagcacttgcgataccaaaggctatatcaaatgctggattagagtcatcccatgttgatttttttgagattaatgaagcattttctgctgtcgcacttgcaaatcaaaagcttcttgggattccttcagaaaagattaatgtccatggaggagctgtgtctctagggcatcctcttgggtgcagcggtgctcgcattttggtcacccttctcggtgtccttagggaaaagggcggcaagatcggtgttgctggtgtctgcaacggcggaggtggagcatcagctcttgttctcgaactcgcataagaagtattggcttgaagcactggatatgtagctaattcagtcgcattcatctatacatgatgaagtattgaaaaaaaagaccctacgatatctatgccgggtgccactgtctgcttaattcaacagaatatgattgtgcaatcattctgccgtgctgcttttgctgaccttaggaacacggcggcggaggcgcaatcattctggcaattagcaccagctagctccctgaggggcgaccttgtactctttacattgatgtatgtgtagtgctggacattcttaagttaattcggcaataaagtgtgttgtgcttctgct

SEQ ID NO: 4568 - DNA, 832 bp, Zea mays
  Clone ID: 700382180_FLI
agtcgggaggcgctaaagttggtggtggcgttggaggaaacgcgggaggaagtggcaaggcgtatacaggaaccggtgccgatgcgggtgtttccggtggaggatccggtggcgtcgatgctggtgtctccggaggcgccaaagttgacggcaacattggaggaaaagcgggagggagtggaaatgcatatactggagctgatgcaggtacaagtgtttcaggtggaggatccggtggcgccagtgcaggtaccagtgctaccgtgggtgctggtgtctccggaggtgccaaagttggtggtggcgtaggaggaaatgcaggaggaagtggcaacgtctatactggaaccggtgccgatgcaggcgtttctggtggaggatccggtggcgccgacggtggtattggagctaacataggtgctggtgtcttcggaggcgtcaaatttggtggcggcgccggaggaagtgtaggaggaagtggcagtgctgctgcaggtgcttctggagggagtaaatcatcggggggtggctcagattttggatatggttcagcgagcaaggagttatagaggatgatgaccactcaccaccgtaagatcgatatgatccgtcccaaggaatttattcctgccctttttgttatcgcgtgttgttttattaccacgcaccagtcaatagtgtggaggcaatatacattgattccccttgactggacaatacaaagataaccttatgtatttcatttttgcttacttaacattgccatgtaaaccagaatagctgaggcttattctcatgataaacatgacatttattttacggcttcatcttg

SEQ ID NO: 4569 - DNA, 2902 bp, Zea mays
  Clone ID: 700382219_FLI
ggttggttatacagttcctggtggtgattattgaaattgtatttaactattttacaatatttagaaagcctatttggtttcaatagagttcatgtatcttttcattcttgatgaaattctggtatagagtttgatgtttgaagcacccaaatgtaactatgtttatgaactagcgagtgatgttttagtcaaacatgaactagcgagtgataaatattcgagaacggaaatagtattatataattcagtaaaaccatttgtagtacaggaacaccatatttgtttgataaaccacataaactaagaactgaaacgaagggattttaccaaagataataaagagcacaaaatgatttaaagaataaggtgtaaaatcttaccaaagaaaaaaatgaaactttagaaaattaaaaactatgcttctgttttatcagattgggtggggttactggtcaaataattacatcgggcctgggttgcattatctgatgacgtcactgtcttggcatgttttattcccacaatgtagtgatcatgaacttatacattgaaatcctgacgggcctcgagaggccaggaggtggagatgagttcaacaagtactacatcttgtcagctctctcctatccgtggattggtgagttagtttggatgtttgcactggtattgttatccatcaaccccaaaccaattgcagttccttttagtcatgtcatgtttaatttccctaaaaattgcgtactgcatttcatatatatgtatcaaatatggaccctaaaactgaagcaggcgttccttttcaattcgtgttgcttcttcatttcctttatcagtaagggcatgtccagatccattagcactaaaatttagcagctaaaattagtacgagtgggtctaaacggacctgctaattatttgttgaagggcgtgaagggctgctattagtttcattagcagatttggagttgctaatatgtgataataattcatatgcatcttctactcactatctaactacctattagcaggtgagtgcaaacagcttcctgctaaaagttagcaaggaatcggttgatacttattgatgtacgtgtttgttcattattattgtaccatgtttggttggaatgtttttaaaagaatgttgaattctaaacaatatgagttattttatattctatattcttttggtttctgaaagggtgcctgaaatatcctatagatgtctttagtagagggtccaaataatggcctgcaaggtttcttgaattggatcgcacaaaattccatctgcttcagaattgagctaagcgcatcctaacatcttgactcctaataccgactaagaattactagcatttcatctcgaaagatcactctgtcgaccaatccaaggaaggcacctgaagcttagggaggacacctcacaagtcacagctgcccgtgttgcatctgtgtgattttgtaatttgaatgagcaaatctatctggcgtcagtgcggggttgggtttcctagagggaggaacatcgtgggatgcaggtcccaaggaacaccagatattttgaggcagaccgtggcgaggtgcccaagggcagcgcctagatcttcttctggatggtcaagttctggaacgataatgtggcagaggagatgccctggtcttcgtgttatgcaatgacatgtctttccctaatgcaccgaagcttggatgggtccgttgaaggttgtgttgtttagatgtcaaaaattgattggtgactatgatagggtagtcaggtggtggctataattcctagagatgtgtgagggcacatatctagaggacgtccacaccatgcctccaccccctggccctagccgcctcgcgtcgtcagtgcctccctcgcctcacccccatcatcgacgttggaaatcgccccgaccctggctcccagatcggcgttcaccctagatcccccggcgcgatgcggcaaccacgtggtctccccttcaaggaagtggaatgggggccttgaccaccaccactcgtgtctctagctgtttttgttatatcatttcatttttccataatagtgaatttgtttgtgaggtatagtctttgttggcttaaaatggtaattttttgtatttttcacatgagataatttatgccgagctgagcaattgtcgtttatcttagtgcaactgatgctggagctgaagttagcgtctgtttctaatttctaggtttctgtgtttcaatggcctcttgaaaattgaaaatggcctcttgtaggttgaaggatgtatgcatggaatagaagtcagataacacttttgtgcaacaggctgaagtcattcttgttgatgggaaattaatagaggctaatgctgaccaacttgctaaggtttaaatgcaggttggagaactcccttgtttaggcttttgtcttgcttctgcagaaggagagatgacgtgtttcatctctgcatgacatgatggcatgtgaggcagcagtctctgctccgcaacccttgtcatggcttggagttggtattctaggaaggggcacaattttattagggtagccaccagagttgaggtcccttttcaatggacgaacttggtgttgtggacgacatctgctattgtagctaggcgcatacatgttttcctataaatgctagctctgcaatcaccaaaggaaaacacaagagtactcttggaggaaagtttagcattcaatttaaaaaaccttaccaactcatgccttatttgaatgcaataatgcatgttctgttgccatgctgttgcttggacacatgcttggcatggctattttctggttatgtcacaactcatatctcccatgtaaatttatggctatgatatgcatcaaacaagcttatattttgctctc

SEQ ID NO: 4570 - DNA, 225 bp, Zea mays
  Clone ID: 700382290_FLI
cccatgctggcgtggccgctgttcgccgaccagaggcagaacgcggtgctgctgtgcgacggggtaggggccgcgctacgagtgcccggggccaaggggagggaagacatcgccgcggtggtgcgggagctgatgaccgcggagggcaagggcgccgcggtgcgggccaaggtggaggagctgcagaaggccgcggccgagggccttcgcgacggcggcgccacg

SEQ ID NO: 4571 - DNA, 2137 bp, Zea mays
  Clone ID: 700382291_FLI
cctgtcctgccctgcctttccccccgcatgctctcgctcgctctctcgttctcgtggttctcccgagtcccgtgccgctcgagtgcgccgtctgcgtctctagtggcgacgactgggcgaccgccgccgccgccctacgcaaggtgcccagctctccattttcggtcccttcgccggacacgagcacccgccaggataatatgttgtccacgcatgaggcaaatgctgatcagtttgatcttctttcttatggtaatctaaggggactagaggctagtagaagttctgaggaatctaattttggaaatgacttaaaggatggttcttcagtttcttctgagaacttcggctcctcttgtctgcctggcgagagctatcaatctgccacagtagatcatgaaaaacgacctctttctgatgtcaagacatgccaaattgcttgcaaacgtccaaagcaaacagatcactgtacctggttatattcctttgaggaacaccctttgaccagtgaagtgggaatatcttctccagctttatatgatggattggttgagatcaaacaaccaaatgacattcctgcaattaatggtgccacaacctgcagtggtagttcagtgatcccttgccgtaatcatgatcaatcaattttagtggaaaacttagacatacctgattgggcgacttccttccctggttattttgaagactgtgggccagttgttacatatagccatgttgatgacattggttcgcctagaaagggtgtgccaattggacctgagcaccaggctgacattccagaatggaggcccctaaactctatgattgtacctggtgcttcagagttttgtgctaatctggattgtagttctgcttccacttcagagtctgttcccagaggtgatgactatgtaagtgacaagtggatcaggtactgtgttgttccggtgacatgctgctcatctcctgttgactgggctggagacagcaaaatagattgcaactgcagtgacgagggttctatgaggtgttccagacagcatattattgaagcaagggataaccttaaaatgatcttgggacaggacaggtttcgtgagttaggtctttgtgaaatgggagaggatgttgctctgagatggactgatgaggaggagaagctattccaaagagttgttttcttaaatcctgtctccttgggcaagaacttttgggaccaccttccggatgcatttcctaataaaactagccaggagcttgttagctactattttaacgttttcatgctcaggaaaagggctcagcagaacaggtctgacgtgttggctgtggacagtgatgatgatgaactgcatggtgaacctctagctgagcgggtggaaggggatcctgcagttgagtcctctacacatgaacattctgtcagcaattctctgcccatggatgatgaccataaagagtttgaaggagcacagtttgatggatctttgtgtgagaagtcagtatacaatgcagtcgagtgcagacatctaccaaatcagatgcctgcagattcaaatacggtgaacactgcactagatgtttgtgaccaagataatggagctcagtgttcagagtttcacatgtcactgccgagcgatacttcaaacagtcttggggatcaaagtgcatctgtataggagatgttgtgtggacaaggctctttggccgtcgagatgtccaaccaagaccatgaacaacaatgaaatggacaacacattcagtttggatctgacatctacttcagatgggtgctgttttgccatggcttggagttgtaaattcagcttcatctggagttgatagttcatgaagttgtacattcttcaactactatgtacttttcgcggcattttgttagcacacttggaactcaactgagcttccacggggttttgctgcccccaccccctaccccccatccccattcgagaaatcaaccttgttgtatgtaccatctgttgtattttcatcgctgtatgtccattctagaaactgaacatgtagattgtaagagttgccactgtctggattacccgcggtggttttcgtttgcagaccgagtgctttcggaatcgattcatgcaaataatgtgct

SEQ ID NO: 4572 - DNA, 1476 bp, Zea mays
  Clone ID: 700382301_FLI
gctccctgggccgaacaattccggactgggctaccgccgtccaccgcagccactttcgacccgcgtgcgttctttctctctctctcttccggcgactgggcagtgagctaccgccgccgccctacgccaggtgctgaggtcttcgtcgatctcgagctcccacaagggaagctgtccaggatgggatacaaccgccacaggcgtggccggggatcatcctcatcgtcttcgcgccgcaccaagcaagaagcctcgtgtgatgatgaccttgggacatcacttccaaggcaagaagaaggcacagaagacgaactcaaaggttcaagaattcagcttgcaatgtgggactttggtcagtgtgatgttaaaagatgcactggtcgtaaactttcaagatttgggcttttgaaggagttgagagtgaccaatggttttggtggtgttgttctcagccctgttggaacacagtgtgtatccaaggaagatcatcctattgtgcaaagaaaaggattggctgtggttgattgttcctgggcacgtttaagtgatgtcccttttgtgaaactacgttgcggtgctcctcgtctcttaccatggttggtagcagcaaatcctgtgaactatggccgcccatgtgaactgtcatgtgtggaagctttatcagcagccctcataatatgtggggaggaagatacagcacatttgctgcttgggaaatttaaatggggtcacgcattcttgtctctaaacagagatctcctgaaagcatactcccaatgtgaaaatggagctgagattatcaatgtgcagaagtcatggttatcaagtaactcgagtgttccaaagccacctgtaaacggggcagaggaatcacggcaaaacaaggaggagggatctgaaggtgattcagacgatgacttgccccctctcgagaagaatatgaaccacctgaacctcgaagaagacgaagaaagcgaggaagagagtgaaagcgagtaaaattgtggtctgaaagtgctgccatggtaactttacgactgttttacaagtgaatttcagttgccttgcctgctacgaagcaaccgttgtaggtgcttcagtgtctaatagccagaataagcttcagtggccttttcgcccagatgttgaatgcatggttcgaaaagaaatccttgtacgcctttaatagtgtgtacctatagcactagctttgaagataaatgatgagttgaacacattgagatcatttttctttctaggagaatacacataccgctagctggctggttacatgatgaattgggctggtgtgttgcccgtacttggtttttattagtttgtttcatatatcagtccatgtagtatatgaaaatgacttgagaaacatcgatcatgaagatacatgcaattgtagaaggcttagtcttatcttaatctccagttctctacaatataaagcactagtttttacggttc

SEQ ID NO: 4573 - DNA, 519 bp, Zea mays
  Clone ID: 700382302_FLI
aacacaaccacaaggagcaagaggtagacagagctgctcgctgagagtgtgctgtgctttgctcatcgaccgaccgatcgatctcggcatggcggactgggggccagtgctgatcgggctggtgctcttcatcctgctctccccgggcctgctcttccagatccccggcaagggccggatcatcgagttcggcaacttccagaccagcggcctctccatcctcatccacgccgtcatctacttcgccctcctcgccatcttcctcctcgccgtcggcgtccacatttacctcggctagctcgtcgccggcgggctgagcgaggctagctgctggcgcgcgttggcccggcccggcctggctttatttgacatcaatctgggtggctggattaggtactgcgtggtgcggaggcatatactactatatatatacatttacatgttcatctccatctgcttgctagctgtatgttgatttatttagctactactttatcaacgacatcctcgagtccagat

SEQ ID NO: 4574 - DNA, 2026 bp, Zea mays
  Clone ID: 700382305_FLI
ctcggttgcacagttgctgctgtttctgcatccaatctgccctcacgtaaatgggccaagaggtatccgataaaactggaaagcaaggaatctggtatttgcagggggagcaaggtatgctatgtttatgcagacacctcttgggagaaggaatcatggtgtaaagcactccgtcttgcttctactacggacaaggacaaactcaaatcccatgaaatgctgacccaagagttccgcagttacatgtcctctctgaaagctggatacccttcctttctgggaccctcgacactctccagtcaggaacatgtgcttgtggacaacactgtgaagaatgatggaccttcaaaactccgaggttttctcaaacgattggtgggaaagaaggcatctgccaaggcttctcaggagagcaaaacaggtccggcgccatctaaacaagatacaagccaacccagtactcctagctccactatgagtttcaacagccagctaccagcttcccccagtgcaaaggtggatgaaaagcttgccgatgacggtacactttgttggaacctcctaatctcccggttgttttttgatgctaaaatgaatgatgagatgaacaaagccatcagagcacgtattcagcgaacattgtcgaacaccagaactccagcctacattggtgagatcacgcttactgacctcaaccttggcaagctcccaccatctctgcacagaatgagagtcctcccactggatttggacgaatcgtgggctttcgaagttgacttcgagtgttctagtggaatactgctgcatatcgaaacaagacttgaggttcaggcgccagagctggaaaaggacattatgaagactgatattagaggcaatcctaatggggacgcgagttcagatttccttgatagtattgagcaatatggtaaccaattcgggccttcagaagtttcggattttgcagcagaggtcaacgatgaagcagataccttaaggaaatcaaagagcgctgggtgggcatcaacatatatgtcaaggtggagaagtatcttgaattcaatagcggaccaggtttcacaggtgccgctatcattggcgattaaaatttcttcagttcgtggaacgatgcggatacatctaaagcctcctccgggtgatcgagtttggtatgggtttacgtccatgccggagatagagtgggagttggaatcatcggttggggataggaagataagcagcagttacatcgcctcgcttatcggcaacaggatcaaggcttcggttcgtcagatcttggtgatgcccaactgtgaaagctttcctatttcctggatgatagcagatacggatgactgggtgccccgcagaattgcaccttttatatggctgaaccgtgagcccgctgataggcgtgctgcagacacaactagagagatgatgccaggggaagcttccacatccaaggccattgcaaagaacaagtcgagtccgctgccgtctacaaaaagaatcaccaacggttcctggaacaagacaaagatacgtgttgatgggcaagagcaagagcaggcagaagcatcaacgagctcgcagtcttggctggtttcagcaaatggtgatgcaacaagggaacagctgaggatgccactgctgagcagcagcggagacgagagagcaggccctgtggaggagcagcaagcatcaccttctgctgctgaggaggagggagatgcgaagaagaggaagaggcgtgcacgggtgatggatctaggaaggaggatgggcgacaagctggaagagaagggcaagcgtttcgtcgggaagatgcgggagaacgcgaggaacaaccgcttgctattgccggacttggagcaggccaccacccctcctgctcctgctcctagttaggcattttaaggatgttactcgacaaaatgaaaattaatcagttgcagcgcctagcaacagctcctaattaggagcacttgtattatgtaaaagaaagaaagaaaaagcttatgag

SEQ ID NO: 4575 - DNA, 2123 bp, Zea mays
  Clone ID: 700382382_FLI
tgccagttcccccgcgccaatgccggatccggccggcggcgccgggctggcatgttccctctaactgcccctgtccgccgccgcggctcccgatgctcgtgtggtcttcgggagcaggagagggagcagcggccgtcgtgggcggcggctaggagcgaagatgcagatccggctgtcgccgagcatgaggagcatcaccatctccactagccatggcctgctagacttgatgaggctcaaggtcgccgcgcgacacttttcctaccgcaccgtcttccacaccgtcctcatcctcgccttcctcctgcccttcgtcttcatactcaccgccatcatgacgctagagggcttcaacaagtgctcctcactagattgtctaggaagacgtttaggtccgcgccttcttggtaggggaaacgatggttccatgaggcttgtgagggatttatatgtgatgcttgataaagtaaattctgaggaagcacctcttgacttgaaggttccagaaacttttgatgaatttatctgggacatgaagaataatgattatgatttaaggtcatttgcttttaagctgaaggctacgatggagagcatggataaggaattgaggtcatcaaggctatcagagcagttgaacaagcactatgctgcaattgctattcctaaaggcctttattgcctttcattgcgtttaactgatgaatactcctcaaatgcccttgcaaggaaacaattaccgcccccagagttggtgccttgtctttcagacaactcctatttccattttgtgttagcatcagataacatccttgcagcctcagttgtggtcagatcaacaattagatcatcactgaagcctgagaggattgttttccatgttattactgataaaaagacctatcctgccatgcattcatggtttgctttaaattctctcagtcctgctattgttgaggtgaaaggtgttcatcaatttgattggttaacacaagaaaatgttcctgtacttgaatcaatagaaactcagcgcgctgccagagatcgttaccatggaagtcgccgcccaataaccagtgctaatgatagcccaagggtttttgctgccaagcttcaggcaggaagtccaacatatactaatgtgctcaatcatattcgaatatacatgcctgagttgttcccaagcctcaacaaagtcgtatttcttgatgatgatgttgttgtccagcatgacctatcaccactttgggatattgatctatctgggaaggttaatggcgctgttgagacttgcagaggtggagatagttgggtgatgtctaagaggttcaggaattatttaaacttttctcatcccctcattgcaaaaaactttgatccttcagagtgtgcttgggcatatggtatgaatatttttgacctgaatgcatggaggaagacaacaatcaaagacaaataccatcattgggtcaaggagaacctgaagtcaaacttcacactttggaggctgggaacattaccaccaggccttatagcatttaaaggccatgttcacccaattgatccatcatggcatctgttaggtttggggtatcaggaaaagacagatatcagtagtgttgaacaagcagcagttatacattataacgggcaaagtaaaccatggctggagattggttttaaacatcttcagccattttggacaaaatatgtgaactactcaaatgaattcttaagaaactgccatataatggagccacagttgtagattgtcgtgacaaaataaataaaaagcatatatcaagtgaaattaaattcgttattttggaagtcaacatcagagagtttatgaagggtaactggggagctcagtaacccccctccatggtcatatgcgttgatggtgaatatccaatgaacagagcatctttcccctcataggaccccttcccttttaatttattccatttgtatcatagctcatgaaattatgatattgtttaggatggttcttttgtattcgatggagcaatatatgagttgaattgatggtagtcccatcattattgtaattgattaagagtatacacagttcatgtgaaaagcatggattttgattatgc

SEQ ID NO: 4576 - DNA, 656 bp, Zea mays
  Clone ID: 700382415_FLI
atgctatccttggatcgatctcgtctttgtcgttgacttgcgcaggttgtcgatggccaggacatctttcaaaatggagcacgacctcgagaaaaggcagtccgaatctgccaggatcagggataagtatcccgacagaattcctgtgattgttgagaaagctggcaaaactgatgtccccgagattgataagaagaagtaccttgtccctgctgatctcactgtcggccagtttgtctatgtggtgaggaagagaatcaagctgagcccagagaaggccatctttgtctttgtgaagaacaccttgccaccaactgcctctttgatgtctgcaatctacgaagagaacaaggacgaggatggcttcctttacatgacctacagtggtgaaaacaccttcggctctgcctagagcaatcgcccctgccactgtaaataaacgagcatgatggggctgctgctattgtaaacctgtgtatatacctcagtctctagtatgctgctgccggattgcttcaatggcttcaatgacacccttagctttcaactgtttggatttctcctgtgacattgaattccttcggtatcgaaacatttgatcatttcactattacttcacttaccttatctcatcagatgcgtgattgctgtttatc

SEQ ID NO: 4577 - DNA, 2461 bp, Zea mays; identical to SEQ ID NO: 3706
  Clone ID: 700382427_FLI

SEQ ID NO: 4578 - DNA, 786 bp, Zea mays
  Clone ID: 700382462_FLI
tgcataagctcacaacagagctgcattcgagctactggatcaacctatttgcagacgaaagcgggtcatttcccgaggtgaaagcagactatatcgcatccacgtcatggcaaagggcactccagatacctgacgatgctgttaccttcgacgacaaggatcctcttgtagctagagtggtcagccagaaggaaaccagccagacacggactgtgtggagccctggttctgaattctctctttgcaattgctcgtggtcgatgcagggtaacctatgcaagcacgtgctaaaggtcaacatggtctgcggagcacgcaaagactttcagccctcgctgtcgttccagtcgttccagcatgttctgcttgatctgtggcagaaaccattggacgattcgttctcgcttgacctctcggtagcgcgggtcatgcagatgcaggagaagatcaaacatgtggctgagctcgccacctccagtggtatcgcccaagttgcagggaagttgccgatgcaatggacaaaaaagagagggagaagagtaggcgtcaagcccacaagcgcgctgctgcttcctcgttctaagggcagtttgcagaaggacttgaccccgaagaacagcaggaagaggaagaggctatctagatttaaagggtaaaatgcgccgtcttttcttgtggcgtctctgtaattagagtattagacgactactttttttgttttttgtttattttttgcctgctgtattccatttcctcaattacctgagaacttgctcagcgacttcc

SEQ ID NO: 4579 - DNA, 2155 bp, Zea mays
  Clone ID: 700382541_FLI
tatttgcaagccacaagccaagccaagcaaaaccctaagaaacccaccctccctccagtctcctcgacccccgccgccgccgccgccatcacaacccagagcaccccctccccaccccaccctgtcccgatggctgcggacgccgccgctgcggcgatgtccgcgacttccctctgcgacgatctcgagcccgccaccgtgcgcacccgcatccgcgatgtcctggccgcaggtgccgcgcgtgccggggaccgcgtcgtggtcggtgggtgggtccggacgggccgggagcaggggaagggctctttcgccttcctggagctcagcgacgggtcctgcgctgccacgcttcaggccatcgttgacgccgccgtgcacccgctagcgcgcctcaccgccaccggcacctccgtcctcgtcgagggcgtgatcaaggagccgcccgaggggaccaagcagaacgtcgagctgaaggtcagccgcgtgcttgaggtcggcgaggtcgatgccgccgtctacccgctgcccaagggcaaggtcaaactcacgctcgagaagctcagggacgtcgttcatctccgttcgcgcaccaacacgattggagcggttgctaggattaggcaccagttagcctatgcatcacacaggttctttgatgagaatggatttctctatgtacatacaccaataataactacgagtgactgtgaaggtgctggtgagatgtttcaagtgacaactttatttagccaggctgagaaaactgagaaggaattgagagagaacccaaaaccttctgattctgaaattgaggcagctaaagttcttgtcaaggaaaaaggtgatgtggtcgcacagcttaaagctgcaaaagccagcaaacaagagatatcaactgctgtcgatgagcttaatagggcaaaggaaattgtttcaaaactggaggagaggttcaagttaaagcctgggattccacgcaaggatgatggttcaatagcttttgaaaatgacttcttcaaacgtcaagcttttttgacagtgtctggacagcttcaggttgagacatatgcatgtgctcttagtagcgtttatacctttggaccaacattccgggcagagaactcacatacgtcacgacatttggcagagttttggatggttgaaccggaaatcgcatttgcaaacttgcaggatgacatgaactgtgcagaaaaatatgtacagtacctttgcaagtggctgcttgaccattgccaggaagatatggagtttatggtgaaaaattatgataagagtgcaattgaacgcctggagcttgtttcgtcaactccttttgtgcggatttcatacacaaaggctgtggagctcttgaaaaatgttaccgacaagaagtttgacaacaaagttgaatggggaattgatttagcctctgagcatgaaaggtatttaacagaggatatatttaagaagccagttattgtctataactatccgaaaggaataaaggcattttatatgagactcaatgatgatgacaagacggtggctgcaatggatgttcttgtgcctaaggttggtgaattgattggtggaagccaaagggaggaacggttagatgttctgaaacagaggatacttgatgctggcctgcctttggaaccctatgaatggtacttggacctccgtcgctttggatctgtaaagcacagtggttttgggttgggttttgaaaggatgattctatttgcaaccggaatggagaacatcagagatgttatacccttcccaaggtacccaggaagggctgatctgtgatctttggagacattggttaaacagatgcgagttgaattcaacacgcgactagtgattttgatatgttttcaccgttaagtttctacttcctaatttgcacattttaattataaattgtggaactggtacggttgtcaaaaatcatgtaattttctggttgtattttattatatttgtatctctgatcaaacttctgtctttgctagttgtgctcaacaggcaatgtttttttctaaatgaaaaaaacaggtcaaaactgaattgtttaattaattgacatttcagtgtaagggatgcgagttctcgctatttaggataaagttaatattttttactgact

SEQ ID NO: 4580 - DNA, 657 bp, Zea mays
  Clone ID: 700382572_FLI
cccgcataaagatccacaccacttgagcagcagctagctcaagggaaggagaaggctggaagtggaaagaagtgggttcttgcttgagctgagctcttgctgcccttggatctgtttgggagtggagaacgcagtatggggcgcgggaagatcaagatcaagaggatcgagaactctaccaaccggcaggtgaccttctccaagcgccgggccggactggtcaagaaggcacgggagatcggcgtgctctgcgacgccgaggtcggcgtcgtcatcttctccagcggcggcaagctctacgactactgctcgcccaggacctcgctgtccaggatcttggagaagtaccagaccaactccgggaagatactgtggggtgagaaacacaagaacctgagtgcagagatcgacagagtcaagaaggagaacgacaacatgcagattcagctcaggcatctgaaaggcgaggacctgaactccctacagcacagggagctgatcgctattgaagagggcctccagaatgggcagaccaacatgcgcgagaagcagatggactactggaggatgcacaagacgaatggaaagatgctggaggacgaacacaagatactgacttttaggatgcaccaacaggctgttgatctgagcggccgc

SEQ ID NO: 4581 - DNA, 1145 bp, Zea mays
  Clone ID: 700382655_FLI
ggcacaacgtgttctgggacgaccagaactcgcagatgcagtgggtgaagcccctcaaccttgcgcagctcaaggcagccatgcagaagcggctcaagtccgtcgtgtcacgctacgccggcaaggtcatccactgggacgtggtgaacgagaacctgcacttcaacttcttcgagacgaagctgggccccatggcgtcggcacagatctaccagcaggtggggcagctggaccgcaatgccatcctattcatgaacgaattcaacacgctggagcagcccggcgatcccaaccctgtgcccgccaagtacgtggccaagatgaaccagatccgcggctacgccggcaacggtggcctcaagctcggcgtcggcctcgagagccacttcagcacacccaacatcccgtacatgaggagctcgctggacacgctcgccaagctgaagctgcccatgtggctcaccgaggtggatgtcgtcaagagccccaaccaggtcaagtacctggagcaggtgctcagggaaggcttcgcccaccccaacgtcgacggcatcgtcatgtgggcagcgtggcatgccaggggctgctacgtcatgtgcctcacggacaacagcttcaagaacctccccgtgggcgacctcgtcgacaagctcatcgccgagtggaagacgcaccgcgcgtccgccaccaccgatcacaatggggcggtggagctccacctgcccctaggcgactttaagttcaccgtaagccacccatctttgaaagccgctgctgttcaaaccatgaccgtcgacaattcggcgtcggcgtcccagcataccatcaacgtcaagtcctaggagacgacatcaggcactctgtggcggatctttaattaatttcttctttatttttcattctggtgaataaataggtcccaaagagagagataaaaggagaaggaaaggagacgtggcagcatggccacgttagtgattttttgttcggtgatttttttttgtaagctatatatagatagagagtagtcatttttaagttattaattatatagttgcaaatgcgcacgttaatggttgtcaatagctttgtcacatctatatggattcctagtaatacacataaacattacagatctttgaact

SEQ ID NO: 4582 - DNA, 571 bp, Zea mays
  Clone ID: 700382663_FLI
ctcaatctggagttatgactgcagaaactggtacttaccgttggatggccccagaggtcattgagcacaaaccctatgatcacaaggctgatgtttttagttttggaattttgatgtgggaactactcacagggaagattccttatgagtacctgactccactacaagccgctgttggtgtggtgcagaagggattacggcctacaattccaaagcatactcacgcaaagctttccgagcttcttcagaaatgctggcagcaggaccctacccaaagaccagacttctccgaaatattagaaactcttcagagaatagcagaggaggtcggagaggagcacgatgggaagcacaaggacagaacactgggtggtttcttttcggctttgagggggcggagccattgagacacagtcgaagacttttaataataaaaatgtacatggcctcggtccgtcctttgaaggacctgagctacaaccagtgcagtgcctgttcctcgcacgtcagcaccagtacacagaaatacagacctgctgtgcagctgcagttgactgaagcggcaattttt

SEQ ID NO: 4583 - DNA, 2200 bp, Zea mays
  Clone ID: 700382684_FLI
cccaactctctgattctggcttattactgagagagaatgctagtaatggtggtcctggctacactaggtccaggcctgttgataatgtcatttattcccaatttatatcaactatgtgtttttttgctaaagatccttacccaagaattgcaactattggtcggagagcactgtcccttataggtgttgaacaagtagtcatgaaaaatactagatttaatagtggaggtgcacatcggggagagacatctgcttcaaactttggaatggcacgctcttcatcctggcttgatatgaattctggaaacaacttgataaaatttaggacccctcctgttagccctcctcagcatgattttcttccaggattacgccgagtgtgttctatggagtttggacaacatcctataagttcacctgatggcttagctgttccccttttaagctccgctgcagctaccagtaatgctgaactaagtatactccctcaatcaacaatttataactggagttgtggtcacttctctaggcctcttttaattggctctgatgataatgaagaggcaaatgctagaagggaagagagagaacgacttgcactagattatatcgctaagtgccagcgctcctcttgcaagatgacaaaccaaattgctagttgggatacgaggtttgagttgggaacaaaaacagctttattgttgccattttctccgatcgttgttgcagctgatgaaaatgagcaaataagagtgtggaactacgacgatgcgctgccagtgaactcttatcaaaaccataatttgtcagacagagggctatccaaacttttgctgattaatgagcttgatgagagcttgcttttagctgcctcaagtgatggaaatgtacgtgtatggaaaaattttactcaaaagggaggacaaaaacttgtaacggctttctcatccgttcagggacatcgaactgctggtcgcagtattgtgattgactggcagcagcaatctggttatctttatgcatctggtgacatgtcttccatcttgatatgggatcttgacaaggaacaacaactcagcactattcagtcatctagtgatagtgccatttcttcactgtctgcatctcaggtctgctctggacattttgctgctggttttgctgctggttctgtcaggatatatgacgttcgctctcctgatagggttgtctatacggccaggccacacgcaccaagaacagaaaaggttgtaggcatagggtttcaacctgggtttgatccttgcaagattgtaagcgcatctcaagctggagacattcagtttcttgatgttagaaggtcagcagaaccctacctgactattgaggcacacaggggttcacttacagcattggcggttcaccggcatgccccagttgttgctagtggctcagccaagcagatgattaaagtgtttagtcttgaaggagagcagttgacaataattcgctaccagccatcttttatgggccaaagaataggcactgtgaactgcctttcttttcacccatacaaatcactcctatctgctggtgctggtgataatgctcttgtctctatctacgccgaggaaaattacaagtaaggtgaggcctacatctcatgacaatgcagccacaagacaaccggcaggcctggtgtttttttggccaagtgatgctcccccgcagcatggtccagctacaagatccaagatggcgtgaagaggctcccggtgcgtattgcctgttgttggacgacgtgtgcaatttgtaagatagagccaagattcgttagccgcctccttgcagaaggtttgtggaacccctaccctgatcatgtcattgaacttggaggctccccccaaataattaatcatacctaggttaaccaaaatgtaaatagacaccgcgtttcgggttgtcggtggtcagcattcctccttttgaagatgcttgtgatgatatgagaaatcaggtttggtaggggctgctgcctgggcaagtggggtttgtgcatatgggcccaggtagtatggttgcacatgtctgctcacagatgctgttgaatggaaggaatgttgtctagtcgcttgcattgtaaccattggagattgtccatttgtatgtatggatcttgtctgtacatctgtaatccgtgcgatggtgtgttttatggaac

SEQ ID NO: 4584 - DNA, 2651 bp, Zea mays
  Clone ID: 700382713_FLI
ccatttttctcctcccactgattttgcattttagcccctcaggaagctccgatttcggccccgctccggcggaccgcttccgttcgtgctctgctccgaccgagcttgccgcgccgtgggggacagctgcgaggactctcgttcggcggctctggttctcggcttggtcccgtttcttccccaacaaatctcgtgatttttggttcagatttggcttctcggcgcccgtctgggtctttctcgtgcgtttcgcctttggtttcgccgatttggtgccggattcggtgggttgcggccgagtagcctggatctcgggcgccggtctagcgctaggagccctcacactgtggatttcctgccggaggaagcttttcaagggagctagtagctagtagctagctgcctttgggagcagtagctcttctagtctctgaaggtttcaccatacgcggtggagagcgctattagcttgaggagtagatttcgtgtagcggtgagcaaagtttgggtgtcaagtctggtggtggaagccttcaggcttgagattttctccctcacgacaccgaaggagcacgccggctctggaaggaatttcctgccatcccagaggctgccgatttcctccctcccgggaagcaagcaagggctttcttctagacgagctcttctggttccttaagtttgtgggccgtggctatttaatctccaactgcatccccagatattcaccaaattctgtgagactgggaactccgggattggtttggataaggtgttctgggaatggggaaccaatgcccaaacgggacccttgggagtgactactacaaccgccccgcttccaggttcgctgatggttgccttgaggacgatcgctactctgacttgaagaagtttgacaagccatggcctgaggtgaactcgtttaagcccactgctgttggtattttgaagaggggattggatccaacgtcaatcactgtccttgaaaggaagacggccgacgtaagggaacattatatcatcggtcggaggcttggtcaaggccagtttggcacaacattcctctgcaccgagatcagtacagggtgtgagtatgcatgcaagacaatcccaaagcgaaagctcatcaccaaggaggatgttgaggatgtgcgccgtgagatccagataatgcaccatttgtcaggccacaagaatgttgtttccatcaaggatgtatacgaggatgggcaggcggtgtatattgtgatggagctctgcgccggtggggagctctttgatcgaattcaggagaaagggcattacagcgaacagaaggctgcagatctcataagaatcattattagccttgtggctatgtgccattcacttggggttatgcaccgtgatctaaagccagaaaacttcctcctttgggataaagaagatgacctgtcaataaaagcaatcgattttggtctatctgtgttcttcaaaccaggtcaggttttcactgagctggttggaagtccatactacgttgctcctgaggtactacacaaacggtacggaccagaagcggatgtgtggtcagctggagtgatactgtatgttttgcttagcggggtgccacctttttgggcagagacgcaacaaggtatatttgatgctgtcttgaaggggcacattgattttgactcggacccatggcctaagatatctgaaagtgcaaagaatctcataaggaagatgctctgcccttgtccttcagagcgtctgaaagcccatgaagtactacgccatccttggatctgtgaaaatggagtggctactgatcaggctcttgatcccggtgttctctctcgtctcaaacaattctccgcaatgaacaaattaaagaagttggctctgagagtgatagctgaacgactttctgaggaggagattgctgggttaagacaaatgttcaaggcagttgacgttcaaaatagaggcgtaattacttttggtgaacttagacaaggtttaaaaagatatggtagcgaattggagaatagagaaattagtgatataatggaagtggctgataatgacaataatgtgaccatcaattatgaagaatttatcgctgcaactgtgcctcttaacaaaatagaacgtgaggagcacctgatggcagcttttacctacttcgacaaagatggaagtggttatatcacagtcgacaagctgcaacgagcttgtggagaacatgacatggatgacactttccttgaagagataattttagaagttgaccaaaacaatgacggtcagattgactacgccgaattcgtagcgatgatgcaaggcaacaaagttggacttgggtggcaacaaatggaaaccactttgaatgtaaccttgagagatgcacctcaagtacactgtcactgacgcgctcgccatgtacagattttgttctcttctcgtgttcatcgtttctccacacgacctgagagttccggtcgacatgacatgtatcacgaggagagagcaaatcaatcgattcatttagtggtatttatcccaaataaagtgtgggctggcaggcagaatatggtttgtcatgagagacactagtatgggtttatatgtataaatatatagtagtggtggtatattggttt

SEQ ID NO: 4585 - DNA, 752 bp, Zea mays
  Clone ID: 700382715_FLI
cgctggtcctcgtggccacggccatagccgccgctcccggcgttgggtttgtcgtcaccggccgcatctactgcgacaactgccgcgccgggttcgagacaaacgtgtcccacgccatccaaggcgcgacggtggagatggagtgccgccacttcgagtcgcagcaggtccacgacaaggcggaggcgacgacgggccccggcggctggtacaggatggagatcagcggcgaccaccaggacgagatctgcgacgtgcgcctgctcaagagccccgaggcggactgcgccgagatcgaccactcccgcgaccgctgccgcgtcccgctcacccgcaacgacggcatcaagcagagcggcgtccgctacgccaaccccatcgccttcctccgcaaggagccgctccccaactgcggcgagctgctccgcgcctacgacctctacaacgagacgtccgagaattcctaagcgtccaaacaaaagttctctcgctcgctttttttttaaaaaaaaatcccatatacatatagcacatttgtttcggtttgttgatgcgcgcatgcatgctagcagacatctttcctaaaaaaatttaaataatttccatctcgcattattttagtagctaccattcatgttttctgagtagttgtataaatgctaccaccgtcatcttttgtacccggccggaacaaacgaaaaacacactatctatgctgtgttgtgaattcaattcttgaccatcttctctat

SEQ ID NO: 4586 - DNA, 1283 bp, Zea mays
  Clone ID: 700382758_FLI
catggatcaggttgaccaagcggggatgctgaaacaatctggctgtgtgcttcctgcattgagcgatgccattgacagtgtgctttcctcagctgatcatttttcaaatgactctgagaagctcaggcaggctttaggttttgattatctgaatgaagccaatgctagcagcaagagtattgcacctttcggggttgcacttactggcagccatgcctttttaaatggcaatttctctgcttctaggcccacaaatggtcctttgaagatggagctcccttcactccaagatactgaatctgatccaaatagctggctcaagtatactgtggctcctgcaatgcagcctactgaattagtagatccttacctgcagtctccatcagcgaccccttcagtgaaatctgagtgtgcatcgccgaggaacagtggtcttttggaagagctgcttcatgaagctcaggcactaagatctgggaagaaccaacaatcatcggtccgaagttcaagttcttctgctggcacaccttatgagactaccacggtggttagcccagagtttgatatgggtcaggaatattgggaagaacagcccagttctttcctcagtgaatatgctcattttagtggaaattctttcactgaatccactcctcctgttagtgctgcgtcacctgatatcttccagctctccaagatttctcctgcacaaagcccttcaatgggctctggcgagcaggcgttagagcctaaacatgagtcggcagcttcacctcgtcctgaaaacttgaggcctgatgcattattctctgggaacacagccgatccatccattttcaataatgccatagccatgctcctgggcaatggcattgatgccgagtacaaacctgttcttggtgatggaattgtgctcgattcttcgtcatggaacaacatgcaacatgcttttcagatggcgggattcaaatgagttccatgcacttgtttgtgatgctgaagggcttcttgttgcttgttttggggtcagtaccagcgaaggccgcattgattgtgacgctgcattcctgacagagggcgtgcaggtgcagcagctaccatatgtgatcttcatgctaatagtccttttgtctaataaagtgcatgaagataaaccggatatttttttttttgctttgtattagagaaccgtttttgtcaaccctgtcagtattctgttggaaatgtgtcatgatttttgtttgaacaatttaatatctgtcattggtactgtgctgtgtgcc

SEQ ID NO: 4587 - DNA, 1572 bp, Zea mays
  Clone ID: 700382769_FLI
gaggaagaacccagccaaatcctcagtcctcaggctgctcacagttcgtgctatccgctcgcgctcccggtagtctgcctgctcggcaattcggcatggcgctccaggccgcgacgtccttcctcccctcggccctctcggcgcgcaaggaggggtcgtcggtgaaggactcggcgttcttgggtgtccatctcgcggacgatggcctcaagctggagaccgctgctctgggcctacgcaccaagagggtgatcacgtcggtggccatccgcgcgcaggcggcagcggtgtcctcaccatcagtaacccccgcgtcgccgtccggcaagaagacgctccgcaagggcacggcgatcataaccggcgcgtcgtccggtctcggcctggccacggcgaaggccctggcggagaccggcaagtggcacgtcatcatggcctgccgcgattttctcaaggcgtcgcgcgcggccaaagcggccggcatggacaaggacagcttcaccgtcgtgcacctggacctcgcctccctcgacagcgtccgccagttcgtcaagaacgtgcgccagctggagatgcccgtcgacgtggtggtctgcaacgccgccgtgtaccagcccaccgccaaggagccgtcctacaccgccgacggcttcgagatgagcgtcggcgtcaaccacctcggccacttcctcctcgcccgcgagctcctcagcgacctccagtcctccgactatccctccaagcgcctcatcatcgtcggctccatcaccggtacgtgtcatgctctaacatttggatttggatgcgtgcctctcactgaactcggccgtgaatgctcgatcgagcagggaacacgaacacgctggcggggaacgtgccgccgaaggcgaacctgggtgacctgcgcggcctcgccggcggcctcaacggcattggcggctccgcgatgatcgacggcggggagttcgacggggccaaggcatacaaggacagcaaggtgtgcaacatgctgacgatgcaggagttccaccgccggtaccacgaggagacgggcgtgaccttcgcgtcgctctaccccggctgcatcgccaccacgggcctgttccgcgagcacatcccgctgttccgcctgctcttcccgccattccagaagtacatcaccaaggggtacgtctccgaggaggaggccgggaagcggctgtcgcaggtcgtgagcgaccccagcctgaccaagtccggcgtgtactggagctggaacaagaactcggcgtccttcgagaaccagctctctgaggaggccagcgacgccgacaaggccaagaagctctgggagatcagcgagaagctcgtcggcttggcgtgacgacctgatgcccaccgtggccggcgccggcagccggtgacagttttttcctaggacatgttcgttacttgatctcagtcgacgcgtggtgcactcgtgtcagagtgacaggagaggaagtgtgtacactgtacacgtgtaggcatgtttggttgacttttttgttacgaggttttctgataatatagctgtggagagaatctaactat

SEQ ID NO: 4588 - DNA, 1342 bp, Zea mays
  Clone ID: 700382862_FLI
ggctttgttgcattgcatcacaagttcacagctcgcccggacccagagggagcttgtacttccaaagttccacagttccactgcacagatcgtcggcggcggcgcaggcaaggccacaatgtctccggcgcccagcagcggcaagcgcgggagggttcccgacccggaggaggacgtctacgtcgacaacctccactcccacaagcgctacctcaccgagataatggcatccagcatgaatggcttgtccgttggagattcagttcctgacaatatcatggggtccccaatgagagtggagaatgcttcttgcattagggatgagatgagtatgcagtactcacctatgtcagaagagtcagatgattataggtactatgacactcaagtaaacaccaatgggaatcaaacagatgtactgggtaatccctcaactagtctaatctcatctgcacaccgttttcagaggccacacacttggttctcttctgcaagtccataccctctcccaagctgctccctcccagcagtgatctgctcccctgctcgccgtggttgtggcactgaacaggaaggctggatcccatcctcacctaatgacatgtgctatggtggagatctgagacgaaccgcacttctgaggtcagttcaaatgaaggtgcagagcccccatccatgtgatgtgcatgaacgagaacaagggcgttctaatgtacatgctgacgagcttcaacaggatcagaaagaagctgtgggtgtacagctggaccaaaggcctctctcttgtccaaagtcaacccaggatgctaagtgccagagctctatacactgatgacgcggattttgttgaggatcagattacggtgtgaccagtcaaagtttgtcgaggatcatcacatatctggtaattttttgcgtagatttggatgaccataaataatactccctgtttcccaatatattgttcgtcctggcggatctattgacaccctaaaacgaatactattttgggttggagggagggagcatgttgcatggcccgttcgtaatttagtaaccattaacagtattctagtggtggcctgccccgttcgatgaacttatgtgacactaggttgtaagaagatgggacactaattaatcttgatcttagaaatgcaatgtgatgtagatgatatcagtgcttttattatgattagattaagaagttaagcagtctctgtcacttgcactttcaaggttcagatattgtttggatttgtttatcgttcggtgtctattttcattgttgaagctatgcatttgatgagggaaagagacaaaggggtgtgtatgattgtat

SEQ ID NO: 4589 - DNA, 660 bp, Zea mays
  Clone ID: 700382874_FLI
gcaaaaaatctgttacagtcacttaggtggaagaggtagtttgtagatgattttgttttaatatatgaactgtaatagtaaggttacaataaattttcacataggtgatcaaacttctgtttgtgtaaagccaacagatggtctgacctgacatgtgtttttccaggagtcactacttatagaaaaagcttgttcctagaggtggtttctcccggcaatgcagaatcttgaagcacgtctaaagtggcttgatgatagttctaaatttcaactccctgtcattaccaggtgcaagataggctgctggtcgattccatcctgaacaagttgcgccaaagattacatgaatattgcgtgccgagatctgtcttcagtaatgcgatgccatcctgaacaagttgcagcgacaattaggataggattttcccacgctttttagtcttgtgtattccttttatgctcttcatcttttttttctcattatatccaccaattagatagtcatgtagactttcttttaggcgcttttgttttttatactttgtgttaccttgcttttgtttttcatattttgtgttaccttacagatgtaaaaacgctcccctcccgtacattgcactatttatgaggaaaggtaaaatagcgtcatttagctttttc

SEQ ID NO: 4590 - DNA, 1352 bp, Zea mays
  Clone ID: 700382886_FLI
gccttgttcctcctggtcctcttctgcatcgtgcatggtgagaaggaagagtcaaagggcatcgatgcgaaagcgtccgggcctggtgggtccttcgacatcaccaagttgggcgcctccggcaatggcaagacagacagcacgaaggctgtgcaggaggcatgggcatcggcgtgcggcggcactgggaagcagacaatcctcatacccaagggtgacttccttgtcggacaactcaacttcacaggcccttgcaagggcgacgtgaccatggtaattggatcgagattctacgcgtggataacctggtcatcaccggcaagggaaaccttgacgggcagggcccagccgtgtggagcaagaactcctgcaccaagaagtacgactgcaagatccttcccaactcgctggtgatggacttcgtgaacaacggggaggtgtccggggtcacgctgctcaactccaagttcttccacatgaacatgtaccggtgcaaggacatgctaatcaaggacgtgaccgtgacggcgcccggggacagccccaacacggatggcatccacatgggcgactcatccgggatcacgatcaccaacaccgtcattggcgtcggcgacgactgcatctccatcggccccgggacctccaaggtgaacatcaccggcgtgacctgcggccctggccacggcatcagcatcggcagcctagggcggtacaaggacgagaaggacgtcacggacatcaacgtcaaggattgcactcttaagaagacgatgttcggcgtccgcatcaaggcgtacgaggacgccgcctccgtgctcaccgtctccaagatccactacgagaatatcaagatggaggactcagccaaccccatcttcatcgacatgaagtactgccccaacaagttgtgtactgccaacggcgcctccaaggtcaccgtcaaggatgtcaccttcaagaacatcaccggcacctcctccaccccggaggccgttagcctgctctgcactgccaaggtcccatgcaccggcgtcaccatggatgacgtcaacgtcgagtatagcggcaccaacaacaagaccatggctatatgcacgaacgccaagggcagcaccaagggttgcctcaaggagcttgcatgcttctagaccctccgtcgactgacccatctctctagttataatttttctctcgtccttgcattgcccattagatgctatccattggtaacgcacaacagtaaaacgacagacatccgacagctatattatgttcgacggtgtaacaccctgaatttgagggtataaaatttattctccaaataccaaccaaattcaggggttacctct

SEQ ID NO: 4591 - DNA, 744 bp, Zea mays
  Clone ID: 700382887_FLI
cgcgttccttccttccctccatctcctctctgttcatagcctcccaagaaacaagagccaaccagcgcttgcgaagctcaagcgccgcagcaatgtctctggccccgtccatcccttccatcaaggtgaaggtgggggccgtctcggtcgctcctccacaccgtgcatgccggtccttcgcggtgatcaggagctccaaggcagagggccccatccggagacctgcggcgcctccgctgtcgccaccgccaccgatgccacccaagacgccggctctgtccactcctcccaccctgtcgcagcctccgacgcccgtgaagcccgctgctccacccacgtcgtcgcagccgatgccaccttctcctgagccgaagccagttgacgccacagcccagatgcggaagccggtggctggggccatgacgctggagtaccagaggaaggtggccaaggacctgcaggagtacttcaagaagaagaagctggaggaggccgaccagggtccgttcttcgggttcttgcccaagaatgagatttccaacggaaggtgggccatgtttgggtttgcagtagggatgctaacagagtatgcaacaggctcggattttgttcagcaaatgaagatccttctctccaattttggaattgtggacttggattaatggtggacttttggtgttttcgttatgtacaagtcttttaaatgtaatgtacttacttgatatggtatatagaaaatttcat

SEQ ID NO: 4592 - DNA, 2063 bp, Zea mays
  Clone ID: 700382902_FLI
aagattgatgtgtaccagaatgcgcgtgcatgcattaggttgcgtgtggcatgtgagaaacttaagaaggtactgagcgccaacccagaggccccactgaacattgagtgtttgatggatgagaaggatgtgcggggttttattaaaagggaggagttcgaacagatcagtgcctcggtgctggaacgcgtgaaaggaccactggaaaaggccttggctgaagctgggttgactactgaaaatgtgcactttgttgaggttgttggatctggttctcgtgttccggctataatcaagataataactgatttttttgggaaggagccaagacgaaccatgaatgcaagtgagtgtgttgcgcgaggatgtgctcttcagtgtgctattctcagccccactttcaaagtgcgagaattccaggttaatgatgggtttcctttctcaattgcattgtcatggaatggagactcccagaacaccccccaacaaacccttgtattcccaaaggggaatgcaattcctagcactaaagttcttaccttctttaaatccagtacatttgaagttgatgttttgtatgtcgacccaaacggcttacaaattccacaaaaaataagcacatacacaattggccctttccaaacctccaaaggagagaaggccaaactgaaagtgaaagtgcgtctcaacatccatgggaccgttacagttgattcagcaataatgctggaggatgatgtggaagttccagtttcatctgcaaatgaagctccaaatgatactatgaagatggacacagatgatgcaccaagtgatcctgctgttgcatctgatgtgaatatgcaggagcctaaaagcgctgataccgctgaggctgctcatgcagctgaaaatggaccacaagatactgaggaaaaatctgttccgatggaaactgatgcaaaggttgagccgtcaaaaaagaaagttaagaaaattactgttccggtccatgagttggtctatggggccttggctgcggctgacctgcagaaggctgtagagaaagagtatgagatggctcttcaagacagagtaatggaagaaacaaaggagaagaagaatgctgttgaagcttatgtgtatgacatgcgtaacaagctatatgacaagtacagtgattttgtcacgtctgaggacaaggaaggtttgattgctaagcttcaggaggttgaagactggctctatgaagatggcgaggatgaaactaagggggtttatattgctaagctagaagaacttaaaaaagttggtgatcctattgagctgcgcttcaaggaatgggagattagaagttctgctgttagccaactggtatactgcatcaatagcttcagagaagctgcacagtctaccgaccagaagtttgaacacatagacatgtcagaaaagcgaaaggtcattaatgagtgttcggaagcagagacttggctaatagagaaaaagcagcagcaggatgctctgccaaagcatgctaatccggtactccttgctgctgaccttaagaagaaagctgaaacacttgacaggttctgcaagccgatcatgacgaaaccgaagccagctcctaagccacagactccgcctgtggcagaaaaccaagctcctgagcctcagacaccagagcagcagcaatcaggtggcgaaagcacagccagcgagggagccgcagaggagcctcgagccgagcagatggagacagacaaacctgagggagccacagatccctcggcttagctttgccagtgatcaaacatttgtgtgattgaccctgttcacctgctgttatagtcggtaggggggagtgaactaagcgagaggttcgccacatttgatttgaggatgtgtgttgggacattcaaggtattctgtttcttgtccttgacaagggaggtggttgggtgtttgaaggataagagcagtggggtacactttctcacgtttttgtgccccacacgctcgatatctttattgatgatggtccgtaaaaccaaggtaaatggctattccaaaattttcgtgtt

SEQ ID NO: 4593 - DNA, 847 bp, Zea mays
  Clone ID: 700382914_FLI
gcggatactccttcaccaccaccgctgagcgggaaatcgtgagggacatgaaggagaagctcgcctacatcgccctggactacgaccaggagatggagaccgccaagaccagctcttccgtggagaagagctacgagctccccgacggacaggtcatcaccatcggcgccgagcgcttccgctgccccgaggtcctcttccagccatccttcatcgggatggaagctgccggcatccacgagaccacctacaactccatcatgaagtgcgacgtggatattaggaaggacctgtacggcaacatcgtcctctccggtggcaccaccatgttccctggcatcgctgacaggatgagcaaggagatcactgccttggctcccagcagcatgaagatcaaggtggtcgctcctccagagaggaagtacagtgtctggatcggaggatccatcctggcatccctcagcaccttccagcagatgtggatcgccaaggccgagtacgacgagtccggcccatccatcgtccacaggaaatgcttctaattctttgggcccgagaaatgcaagccgtgggggagccgttaccgccgccagcctctcctgcccccgttttcgttgccgtttcttcattagcgcgaacaaagttttgtgccggtctatcggccgccgctttcctcccctattcatcaagaccgcaataactgtcgctacctatgcttctcacttgtgatttttggacacaatatgttaaggtccattcaattctaatgagacgcctgatgaggctacttcggattgtcattggttattgatgtcttatgaatgaataatataaattttttttggtc

SEQ ID NO: 4594 - DNA, 1576 bp, Zea mays
  Clone ID: 700382959_FLI
gagccgtgctcctcgcacggttcggctccttccacgcgtgggggaggtgttggcggctccggcggcgcggtgtgcaaggcgagcgcgtctctgggctgaggccaccggaggtcgagcgcgcaggagggctatctgcttccgcgtgcggagctcttatctcagcacgacccacccctcccgacgggatagagtattgaagtacacaagtgcatatgcagctggatttggagtggtaaagacgggaaccgaagagctggtggatcagaggtgtggggagatgtaccgtgggggccttgaccgcttcaagaaggcacagaccttggagcccttctcagtgaagtctgagtcaggcaccaagaaggcacctgcagctgcaggaacagctaaagcactggctccgttgacactgccactgaattctaattttgtgccaggtcagaaccaccaaagtccccaaggaaccatctcaagggtggctgggcaaggtggtgatgctccagggcatgttgggacacaggtcggtggagggcagtcgacgtggcaacctccagactgggcgtttgagccgcgcccaggggtctactatcttgatgtagtgaaagatggggaggtcattgacaggatcaatttggacaacaggaggcatctattcgggaggcaggttcctgcttgtgacttcgtgttggaccatcagtctgtgtcgcgtcagcatgctgctgttattccacacaggaatggaagcatctatgttatcgacttaggatcggttcatggcacctttgttgcgaatgagagattaacaaaagacaacccagttgaacttgaagttggtcagtcacttcgctttgctgcatcaaccagaacctatatcctgcgaaagaacgcagctgctctattcccaactcctagccttccatcggatgttagtttgccatctcctccggaccccaatgatgaagatgctgttgtggcatacaatacagtacttaaccgctatggtataagtaaatctgacatattatccagttctaaagattcttcaggaggcgcctctagtgcaaatgatggtaaacatgcagttgaaaggctcttaaagagaggtaaaaagcgcagagtgtcatttagagatcaggttggtggagaacttatccaagtggttgggatttcagatggtgcagatgttgaaactgaaccgggccccataggtgtaaaggaaggcagtcttgttgggaagtatgaatctcttgtacaggttactgtcataccgaagggaaaggagcaagcatcacgaaaagaatgtacctctacctcaccgagtggggtaacagataagctacaagaggtgcttaaaaaagtaaagagcgcaacaagacctggaatctacgatgacctttatggggattctgttccagcaaaagtgggctcatcttgggcatacaaatcagatgatcaacccgttgaggagaagacacatggcatgaatttaaacatgaattcagccgatgacagtgacgacttgtttggtgactagtgattcagaattgtcagtggatacaaaaaaatatatattcttcag

SEQ ID NO: 4595 - DNA, 442 bp, Zea mays
  Clone ID: 700382963_FLI
ccagagatgggtctccacggaggcgtcgtcgtgctccgcgcggccgtgctcgccgccgtcctcggcttcgtcgccgctgccgggttcatctcaaacgacgcgctgctggagcgcgggcacgacaccaccggccggagcctgctgcaggccaagaaagattgcccggtgagcttcgagggcgccaactacacggtgatcacgagccggtgtaagggcccgctgtaccagccgacgctgtgctgcggcgcgctcaaggacttcgcgtgcccttactccacctacatcaacgacgtgagcaccaactgcgccgccaccatgttcagctacatcaacctctacggcaagtacccgccgggcctcttcgccaatacctgccacgagggcgacaagggcctcacgtgccccgaggacaccccgcagatcgaacccgggcagaaggcct

SEQ ID NO: 4596 - DNA, 2388 bp, Zea mays
  Clone ID: 700382976_FLI
cacccgactcgtcagacgtcagccagcagttcgaaaccaaggattgatccaggagcttccggaaggcgaggcgcgcgcgcagcgtcgaggtgctggtgccggtgccgcccatggatcgggctcgcggatccgcgttcctgctcggcgtcctgctcgcaggatccttgttcgcgttttcagttgccaaagaggagaccaagaagctcgggaccgtgatcggtatcgatctcggtaccacctactcctgtgtcggtgtgtacaagaacggtcatgtcgagatcatcgccaatgaccagggtaaccgtatcacaccctcatgggttgccttcaccgatagcgagaggctcatcggtgaggctgccaagaaccaggcagccgtcaaccctgagaggaccatctttgacgtcaagcgtctcatcggaagaaagttcgcggacaaggaagtccagagggacatgaaacttgttccctacaagattattaacaaggatggcaagccctacattcaggtcaagatcaaggatggggagaacaaggtcttcagccctgaggagatcagtgccatgattcttggcaagatgaaggatactgctgaggcataccttggcaagaagatcaatgatgctgtcgtcactgttcctgcgtacttcaatgatgcgcagaggcaggcaaccaaggatgctggtgtcattgccggcctcaatgttgctaggatcatcaatgagccaactgctgctgctattgcctatggtttggacaagaagggtggcgagaagaacatccttgtctttgaccttggtggtggtacttttgatgtcagtatcttgaccattgacaacggtgtgtttgaggtgctggccaccaatggtgacactcatcttggaggtgaggactttgaccagaggatcatggagtacttcatcaagttgatcaagaagaagtacagcaaggacatcagcaaggacaaccgtgctcttggaaagctgaggagggaagccgagcgcgccaagagagccctcagcaaccagcaccaggtccgtgttgagatcgagtccctctttgacgggaccgatttctcggagccgctgacccgtgccaggtttgaggagctgaacaacgacctcttccgcaagaccatgggccctgtcaagaaggccatggaggatgctggccttgagaagagccagatccatgagatcgtcctggttggtggaagcaccaggattcccaaggtccagcagctcctgcgggactacttcgacggcaaggagcccaacaagggtgtcaaccctgatgaggctgttgcctttggtgccgctgtgcagggaagcatcttgagcggcgagggtggtgacgagaccaaagatatcctcctccttgatgtggctcccctcaccctgggtatcgagaccgtcggtggagtcatgaccaagttgatcccgaggaacactgtcatcccgaccaagaagtcgcaggtgttcaccacctaccaggaccagcagaccactgtctccatccaggtctttgagggtgagcgcagtatgaccaaggactgccgtcttctcggcaagttcgacctcaacggcattgcgccagctccaaggggcacaccccagatcgaggtgaccttcgaggtggacgccaacggtatcctaaacgtgaaggcggaggacaagggcacgggcaagtcggagaagatcacgatcacgaacgagaaggggcggctgagccaggaggagatcgaccgcatggtgcgggaggcggaggagttcgcggaggaggacaagaaggtgaaggagcggatcgacgcccgcaaccagctggagacgtacgtgtacaacatgaagaacacggtgggcgacaaggacaagctcgcggacaagctggaggcggaggagaaggagaaggtggaggaggccctcaaggaggcgctggagtggctggacgacaaccagtcggccgagaaggaggactacgaggagaagctcaaggaggtggaggccgtgtgcaaccccatcgtgtcggccgtgtaccagcggtcgggcggcgcccctggcggtgacgctgacggcggtgttgacgacgaccacgacgagctgtagatggttgtagatggtggtggtgacgtggagtgccgggagccgagccaaattttgtaacggtgtttagcggcggacaatacttattactaatcttggtgctgctctgccaatagccgtgctgagcgtagtaactgtttgtttgtaattttttttcttctacttccttggttgttcaggattcgcattcgaattttatgtgaaaaaaagaaggcgcgcttttaaaatcttgcatttgcccccttgtggtaataatgctaattaaatggtgcaaagtagattgcttgtg

SEQ ID NO: 4597 - DNA, 906 bp, Zea mays
  Clone ID: 700382977_FLI
ggctctagtcctctcgcatccgcagcttccccagccagctagggtttgcagatgacgaccgcggcgcgccccacctgggcgccggccaagggcggcaacgagcaggggggcacccgcatcttcggcccctcccagaagttctcctcccgcgacctcgccgcgcacacctccctcaagccaagaaaagacggtcaacagacccaagaggagttacagaagaggaatctcagggaggaacttgaggaacgtgagcgcaagcactactcttccaaggataagtcctatgccgaagaaagagaccggcggaaaagctctagccatctactcttagaaggttcaaagagagagacagaggataagatagttccacgagaaatcgatgctgatgactccgatgtggagcctaaaagcgatgacgagagcgatgaagatgatgatgacgacgacactgaagctctaatggcagagcttgagaggattaagaaagaaagagccgaggagaagcttagaaaggagcggcaacaagcagaagaggaggccaagatgaaggaggctgaactgatgcggggaaacccgttgattaatatcaacaatgctggctccttcagtgttaagagaaggtgggacgacgacgtggtattcaagaatcaagcacgaggagagaccaagacaccgaaacggttcatcaacgacaccatcaggagtgatttccaccgtaaatttcttcagaggtacatgaagtgacgcttccgtcgttcacaattcagcctggagcccctcatcgttatcatgtttgtgtatgagcgaaagatcattattgtgttgttgtatgaaacaagagtgtaaacatatgtctactacttaacaaagttatgctgagcaatgcatatcctagttgaatgtgac

SEQ ID NO: 4598 - DNA, 1461 bp, Zea mays
  Clone ID: 700382985_FLI
gttggagaagccatgactactctgccagaaaatttcaagcctcacagggctgtgaagaagatttttgatctacggcgtcagatgatcgagactggagaaggcattgattgggcagttggtgaagcacttgcttttgctactcttataattgaggggaaccatgtcaggttaagtggtcaggatgttgagaggggtacatttagccatcgacactctgtcatccatgaccaagaaactggagagcagtactgcccgctggatcatcttgttatgaaccaagatgcggagctttttactgtgagcaacagttccctgtcagaatttgctgttttgggctttgaattgggttactccatggagaacccaaactcattggtcttatgggaagctcagtttggtgatttttcaaatggagctcaagtgatatttgatcagttcctgagtagtggggagtcaaaatggctccgccagactggccttgtcgtttgccttcctcatggatatgatggtcaggggcctgaacattctagtgcaagattggaacgctttcttcagatgagtgatgacaacccttatgttatacccgagatggatccaacactgcggaagcaaatccagcagtgcaattggcaggtcgttaatgtaacaactcctgcaaattatttccatgttctgcgtcgccagatacaccgggacttcaggaagcctttgattgtgatgtccccaaagaacctccttcgccacaaggactgcaagtcgaacctatctgaatttgatgatcttgcgggccaccctggattcgacaaacaggggacacgcttcaagcgtctcattaaggaccagaataatcacaaggacctcgaggagggaatcaaccgcctagttctttcttcatccagttcatagtacacctttccagagcaaagaaggaagtcggagcgcactgatgttgctatatgtagagttgagcagctctgcccgttcccctatgacctcatccagcgcgagttgaagagatatccaaatgccgagatcgtgtggtgccaagaggagccgatgaacatgggagcatacagctacatcaacccgcggttgctgacggcgatgaaggttctgggccggggtggcatcgaggacatcaagtacgtcggcagggccccgtcggctgctaccgcgacgggcttctactcggtgcacgtgcaggagcagacggagctggtgcagaaggcgctgcagcgcgaccccctcaactaccctttctgaaagaaacgaggcccctgtagattcttggaattggggaccttttgaatttgatataataccaatatagagagaacatgccttaaattttatctgtgcagccatttggtgaaataattgtttcgactctgcagtaccgcatgaaacaaaccgttgtaagtttggaaaaactccatctcgcagcgttgattttgtgttcct

SEQ ID NO: 4599 - DNA, 1388 bp, Zea mays
  Clone ID: 700383049_FLI
gagacgaaagaagcgcaggggaaggaagccttttgcttttatcaggaaatcaatgacattaatacaacttagaaggtaatatatcaaaagccaattgctgcaagtgacgtgttgctaactagaaactaatgaacgagggagttctttactgaaaaatcaggtgcatgaaatggatgatatcttataactatttatgtgaacagacttagtgttaatgtgatatgtttaatttcgatgtgcttgtgcacacagcattgtcagagcagttgctcccatattacaaagttgaaaacgaaaattatatcaagaaataacctacgtgagatattttttgaatggatgttttctagttgccatttcaactacaagaaataaatttgagttcatagctatcactggagtgcttttctgaacttattttcactgccaatgtatataggtgaattaattgtgagatatgtccacaacaaattcggaacttgaactaatgtgtgcatctaacatctgtttggtatttaccttctaacttgatgttcttatgcatcttccttcttgtgtgctctctgcttctctgttggttaacacattgattgagttagaagtaaacattaggttcttgttcttcacagccaagtgggttagtacttgtttcggaaacagttttaagaaatgtggaatagcaggaggataactgttattgagagatccttcaacactgaaagcataatatgttattcagcagttggtcatatgtgtgaccaattgcataatatgttgacctgttgttttggcctgtagtttgttgtgcacctaggggtggtaatgagctctaaattttacactataaatttaaggatcaggtcggattaggattgggctctatgtctattcgcttttgaactaaaattaattaagggctccaacaaattgtgaagaaacatttggatcgtgatccattaccacctgcacacaagttttctagtagctatgactgggagattgcttttctgctacctgttagtttatgatcattccatcattatgtactcttcgcttggttatagctagttatttataccactcaagagctgagagtttgtggaactcactacggttgttgtatgacacatctgcagctaagctgtggctgcttcaagataggaaagtgacaatttgtggagggccttcaaaagtgttttactagtgaaccatggtggtcagtgtactatccttgtacattaatgtaaccgttcatctaagttatttggagactatttgccttttttttgttgtataggttgttgcttatcttcagctgacagttataacattgctcacagaaaaacatgaagcgattggtttccgcaataaacaaagtgaaagttagc

SEQ ID NO: 4600 - DNA, 1421 bp, Zea mays
  Clone ID: 700383072_FLI
ccggcggcttccgctccaagcttcagccaagccggagatggcggggagcctgcaccttcccgtggtggacctcgcgttgccggacctccgcgccgccgctgaatccatccgacaggcgtgcgtggagcacgggttcttctacgtgaccaaccacggagtggaccgcggcctgctcgaggcggtgttcgcggagagcaagaggttcttcgacctgcctatggaggataagatggcgctgctcaggggcgcaaaccaccggggttacacgccgccctacgccgagaagctcgacgcctcttcccagttcgtaggagaccttaaggagagtttttacattgggcctcttgatgatggtgatatgcataacgatgtaaaccagtggccttctgaagagcgcttgccatcttggaaggagacaatgaagctatactttgcagctgttctggatactggcacaaggatactctctctagttgctttgggtttggatttggatgctgatttctttcataaaattggtgcattgaaatgcccgtcaacatttcttcggttattgcattaccctggtgaagtacatgagtctgatagtggaaactatggtgcgtcagctcactcggactatggtatgataactcttttagtgacagatggcactcctggcctgcagatatgcagggagaaggataggaatccccaactatgggaagatgttcatcatattgatggggcccttattattaatattggtgatttgctagagaggtggacgaattgtgctttcagatcaactttgcatcgtgttgttgcaatcggtaaagagcggtattcggtggctttctttcttgatccaaatcctgacacactggtgcagtgtttggaaagttgttgcagtgaagcatgtccaccaaggtttccacctatcaagagttgggactacatagccgggcgactaaattcaacttacaaataatcaccaccacgtttgtaatgctatgctcgtttacaacagcttgacaccacagtaatgtttgaacccaggattaaagatagttttcaagaaaggcggagctatgtatgtgagctggatctccatgtctcccctccccctagtgtctggaggagtgcactttctggatcacgcgtcgtcaggaagcaagcaagcaagcatacgcgcaattcccgctgcgcaattcccgatcgtaccctgctccaaatctttgtgcaagtctctgctcccttgaatgcaactgatgccaatcccatcaatctctttctttgaaaggagacatactgcttcctctagtttcatacctgctgaacacgatcaatggtttgcatgtactctaagatatacatgacccgcatgattgctatagtaaagactattaaaaatgaatttagctgacttcatttccctggtc

SEQ ID NO: 4601 - DNA, 1025 bp, Zea mays
  Clone ID: 700383090_FLI
acaagacgagacaagagaatgcctgtgagcaggatcgccgtgggtgctccgggcgagctgtcccaccccgacaccgccaaggccgccgtcgccgagttcatctccacgctcatcttcgtcttcgccggctcaggatcggggatggccttcagtaagctcacggacggtggcgccgccactcctgccggcctcatcgccgcgtctctggcgcacgccctcgccctcttcgtggccgtctccgtgggtgccaacatctccggcggccacgtgaaccctgccgtgaccttcggcgcctttgtgggcggcaacatcagcctcctcaaggccctggtctactgggtggcccagctcctgggctccgtcgtcgcctgcctcctcctcaagatcgccacgggcggcgcggcccttggcgccttctcgctgtcggcgggcgtcggcgccatgaacgccgtggtgctggagatggtcatgaccttcggcctcgtgtacacggtgtacgccacggccgtggaccccaagaagggcgacctcggcgtcatcgcgcccatcgccatcggcttcatcgtcggcgccaacatcctggcggggggcgccttcgacggcgcctccatgaaccccgccgtctccttcggcccggccgtcgtcaccggcgtctgggagaaccactgggtgtactgggtcggcccactcgcgggcgcggccatcgcggcgctcgtctacgacatcatcttcatcgggcagcgcccacaccagcagctgccaaccacggcagcagactactgatgaccatcatcatcatgcactgaataattaagaccagaccactcaatatatatacatatgaagaataacatgccaaatctcatctcctagagctagcaacttgattctccatatatttcttaaatacaaactaaactcgattgagtatagcttggtatgaaaccacatgtgtgtgatgttattttgtccttgtggtaatttgtacatctctatctctaccatattaaagcatcaatttcgac

SEQ ID NO: 4602 - DNA, 1007 bp, Zea mays
  Clone ID: 700383103_FLI
atccaatctagaagcacccctctccctctctctctcttcgccgtccgaagctccgcaccccaatctaatcgacacctcaccgagatgggccgcaagttcttcgtcggtggcaactggaaatgcaatggaaccacagatcaggtcgagaagattgtcaaaaccctgaatgaaggacaggttcccccttcagatgttgtggaggtcgttgtcagccctccttatgtcttccttcctgtggtcaagagccagctgcgccaagagttccatgttgctgctcagaactgctgggtgaagaagggaggtgctttcactggtgaagtcagtgctgagatgctcgtcaaccttggtgttccctgggtcattcttggacactctgaaaggagagctctgctgggagaatcaaatgaatttgttggagacaaggttgcgtatgccctgtctcagggactaaaggtcattgcatgtgttggtgagacccttgagcagagggaggctgggtctaccatggatgttgttgctgcacaaacaaaagcaattgctgagaagatcaaggactggagcaacgtagttgttgcctatgaaccagtttgggctattggaactggtaaagttgccaccccagctcaggctcaggaagtgcacgcctccctgagggattggctaaagaccaatgccagccctgaggttgctgaatctactaggatcatctacggaggctctgtaactgctgcgaactgcaaagagctagcagcacagcctgatgtcgatggttttcttgtcggtggagcttctttgaagcctgagttcatcgacatcatcaacgcggccaccgtgaagtccgcttaagatgctacgctgaagacgaacatactttttttttgctcaactgtgctatgtaagctagtagcttttgcgcaggagcagagactgttttgcctgcccccaacttctagcttgagcttgctaataatgtttacctctggacgtatcaataatggtgcttatgt

SEQ ID NO: 4603 - DNA, 1733 bp, Zea mays
  Clone ID: 700383137_FLI
caagtcgcctccccctactgtaggccgctgctgctcctctcctcccatctcaccacacaccgcagccccagcaagatcgcgcggaggccatggcgaagcccaagccttcctccgccggcgccaagccgaccgcggctgccactgcgcctgcgccgccggttacagtgcactcggcgctggtcacctacacctccatgctcgcgctcctctccctctgcccgcccttcgtcatcctcctgtggtacacgatggtgcacgcggacggatcggtggtgcggacttacgagcacctcagggatcacggcgtactcgaggggctaaaggccatctggcccatgcccaccctcgttgcgtggaagatcatcttcggcttcgggctcttcgaggccgtcctacagctgctgctccctgggaagcgcttcgaagggcccatctcgcctgccgggaacgtgccggtctacaaggcaaatggcttacaagcatatgcagtgaccttgataacttaccttggtttgtggtggttcggtatatttaaccctgcaatagtgtatgatcacttgggggagatatactctgctcttgtttttggaagctttgtattctgtatttttctctacataaagggccatgtatttccatcttcatctgactctggatcctctgggaatgtgataattgacttctactggggtatggagctgtaccctcggattggcaagtactttgatatcaaagtcttcaccaactgtcgtttcggtatgatgtcctgggctgttcttgccgtaacctattgcataaagcagtatgaaatgaatggcagagttgctgattctatgcttgtgaatactgcacttatgttgatctatatcactaagttcttttggtgggaatctggatattggtgtactatggacattgctcatgatagagctggtttctatatctgctggggatgcttggtatgggttccatccatatatacttcccctggaatgtaccttgtaaaccaccctttgaatttgggcccccagctagcactctcaattcttctagctggaatgttgtgcatatacataaactatgattgtgaccgtcagcgccaagaatttcgacggacgaatgggaaatgctcggtctggggcaaggctccatctaagattgttgcctcttatcagactacaaagggagaaactaaaaccagtcttctcttgacttctggatggtggggcttgtcacgtcacttccactatgtcccagagatactatctgcatttttctggactgttccagctcttttcaatcacttcctaccatacttctacgtgatctttctgactatattattgtttgaccgagcaaagagggatgatgaccggtgctcatcaaagtacgggaagtactggaagatttactgcaacaaagtaccatacagagtcattcctggcatttactgagcatctcgagttctggacgactcttgatattaagctcaacagatgccacgatatccagtcttcataccgctactgattgtgtaatgtcgttggtaggcttgggctgtacgcagtattaggtgtaggcaacttggcttttggcatctaccttgtatgtgtcgtgtatctagggctggggcttgctccttcagttgttagacagtagggggtaatctcaggggtgcaatgtactccctccgtcctaaaataaaagcatatctagtatttaaattttgttcc

SEQ ID NO: 4604 - DNA, 3572 bp, Zea mays
  Clone ID: 700383178_FLI
caaaggctgaatccgagagtgcgcgccgcagccgtggctgccgtcccaggcgccgctgccgcttgtgagaggcgctcgtcttgtattcacgaggagggcgacgatctcccgcgcggcaaaggaactaaccactggccccgccctgtgatggctgctgtccgtgccccggcggcgaagggaggtgtaggtgctccggaggcggcggcgtggagtggcagtggtctccgcgcgaaccaggccgggcgcgccagctgccgcggcgcctagagcgagcgcctggacgtggtctctctcgcagtccgagttggagcttgggttttggcgcggagggacgccggggttctggttctggcaacgcggctggaggaaggggggaaacggagatggcggtcggggacgcgctgcgacggctgtgcgaggagatcgggtggtcctacgccgtcttctggaaggccatcggcgccgccgaccccgtgcatttggtgcgggaggacggttactgtggccacacttcatgccctgtcggatctgagccttctgaatctctgcctctgcccagcgacgctgggtgctctgttcctgcagctgacaccatctgctggcttgttaacaacgatatggcgtcgcaggttcatgtcgtcggacaagggtaagcaaaagcagcagccgcagccacttactcgtccccgcatttggatcgtgggccgtgccgcgttcagtggcaatcaccaatggatcgtccacggtactgccaatggtcacgggctctcctccgaggttgctgctgaggtgaacaatcagttcagagttggtattaagactattgcgatcattcctgtgctgccacggggtgtcctacagttaggctctactggtttggttatggaaaacacaaattttgttatgtttgcaaagaagttgtgttctcagctaaacaaccgttcaagcatggctgcatctgcttcggttaagaacacttctagtcagcatggtcagtcacgtcctgatactgcaactgtgtcaactagtacaccaccaaatgcattgctgagtgcatctttgcttaaggttgcgcaacagaatggtcaccctgttagagagcacagtgtctatgctgagcgtgatcttaggtttatacaacaagcatccatctgtgagagtcaatttggaagtaatttacagagtggtgttatgaactcatgtttgacctccccaagcttcgcatcagttaaaaagcagtcacttttgatgaacagcattgggcagttacagttcagtaataatgtgcattcatcagcagatttggcaagggagatcatattaaaatcccttgggcgccaggactcttctatctgcgaaaatacaaacatgaatatgcatcgtggaagatatgtagtatcccttgggcgccaggactcttctgtctgcgaaaatacaaacatgaatatgcatcgtggaagatatgtagtatccaatgatataaatggttctaggaattttgattttcttcctattggtgcgaaagaaagcagagccaacttatcaatccctgcgtcgagtcaaattttggaccacatgccaggaacattgcagcagaaacagtctctagtcccattcagggttacccaatcttctgaattttctaagaaagtggagaaccctgaaagtggatcatttcaaattccttcagttacaacttctgattctggtggtcaggtttctaacagtttcaacatggtccaagagaatcgattgagtatgtcaaacaatgtccgacaagtccaaaagattgacagatttagtgatccaagtgctaatgtcagcactcagagaatgaagaacagagatgaatgcgagccaggaatgcccattgagagagcctcctcgttcctagtcgaacctggtgcagataatgacttgtttgatatgtttggttctgaatttcatcagtcctcccacaacgttggtgctgatttggtcacctggagtggtacagagtctcagaactcagatagagatgtccctgaatcgtcaatatgtttcaatagttcaccacttttcagttcgctagacaacgagcttcactattcaggtatcttatcgctgactgatactgatcaactattggatgctgtcatatcaaatgtcaatccaagtggtaaacagtgtcctgataatagtgcttcttgcaagactgcactgatggatgttcctagcacatctcatctttgttcaatagatttgaagagatgtgagtctcccagcgttccttccctgctaattaagcacgaattggcacagtttgctaaacagccatgtctcgttgataaatctgaggatggttgtctttcccagaataatggaatgcacaaatctcagatacggctttggattgagagtggtcagaacatgaaatgtgagagtgcttcagcttctaatagcaaaggtcttgatgtgccaagcaaggcaaatcgcaagagatctcgaccaggagaaagccctaagccacgacctaaggaccggcagctgatacaggaccgtattaaagagcttcgtgagcttgtaccgaatggggcaaagtgtagcattgatggtttgttggagaagacagttaagcacatgcttttcttacaaagtgtgacgaaaaatgcagacaagctcaaggactctactgagtctaagatacttggtagcgaaaatggccccctttggaaagactacttcgaaggtggggctacctgggcttttgatgtcggctctcagtctatgacatgtccgatcattgtcgaggatcttgaccgacctcgtcaaatgcttgtggagatgctctgcgaggatagaggaatcttcttggagatagctgatttcatcaaaggacttggactgactatcttgaggggtgtgatggaaacacgcaaaagtaaaatctgggcacgattcactgttgaggcgaaccgggacgtaaccagaatggagatattcctatcgcttgtgcgcttattggagccaaattgtgacggcagtggagcggcggacaacactaacaacatgaacatgcatcttggtttggtgcaccaacctgtcatcccagcaacaggtctcatccaatgagattaagactaagaggaaaccctcaagcatcttccaagtgctaagagcaggaggagctcagctaactcctgccatgactagcatcaccaatacgccatgcagtgcaccacctgctttcccgagacaccttaatctgtgcaaaagtgacgtccttcttgagaccaggtcgcagaaatggaagaaggaaaacaacgcaagagtgatcatcaggcagtgttttgttcgtatgatctttagattgtttgttagttagcgctgtttggtcgtatattagtggttttttttgggtactgttatccagaatggaagttcttgggttggtttatttcacacacacaaaaagatggaatgccacctttgttataagtctcttcacattagaaccagtgagcatagctagtgaaaaattgtttgagaagactcttgagtcattgctctgatcagattatttgttattactc

SEQ ID NO: 4605 - DNA, 730 bp, Zea mays
  Clone ID: 700397429_FLI
cgcagagaactgagccaacggaagaaaaaaaagctactacagcaatggccggaggagacgacctgaagctgctgggcctgtgggcgagcccatacgtgctgcgggtgaagctcgcgctcagcctcaagggcctgagctacgagaacgtggaggaggatctgagggacaagagcgagctcctgctcaagtccaaccccgtgcaccagaaggtccccgtgctgatccacggcggcaagcccgtctgcgagtcgcaggtcatcctgcagtacatcgacgaggccttcgccggcaccggcccgtccctcctccccgccgacccctacgagcgcgccgtcgctcgcttctgggccgcctacatcgacgacaagatgctgcccgcctggaaccagtcgacgatgggcaagacggaggaggagagggccgaggggaagaagcagtcggtcctgacggtggagacgtggagggcgcgctgagggactgcggcggccaagggaagcccttcttcggcggggacagcgtcgggtacgtcgacgtcgtgctcggcggcctgctcgggtgggtgcgcgcgtcggaggagctccacggcgtcaggcccttcgaccccgagcggactccgctgctggcggcgtggtcggagcgcttcggcgcgctggatgccgtccagacggtgatgcccgacgtcggcaggctgctcgagttcggcaaggcgttgatggcacgtctggcggct

SEQ ID NO: 4606 - DNA, 390 bp, Zea mays
  Clone ID: 700397446_FLI
cgcagtgtcttccgcccgggctaccaccatgccgaagcagatccacgagatcaaggacttcctgctgactgcgcggcggaaggacgcacggtcggtgcggatcaagcgggccaaggacgccgtcaagttcaaggtgcgctgctccaggtacctctacaccctctgcgtccacgacgccgacaaggccaacaagctcaagcagtcgctcccgccaggtctgactgtccaggagatttaagtttgtaggtgggctccattgctgtgtttgaatgaattatgaagtttgagtttgggatgcgaatgatgtgtcgaacctatgagcctgtgttgtaatggttaccccagaccgcaaaggatggcaatctatcataagttaaactgatttccgtg

SEQ ID NO: 4607 - DNA, 751 bp, Zea mays
  Clone ID: 700397449_FLI
ctcactcttgagtccacacgctctggcgcacgcgcactgcgcacaccatggccgctgccttagcttcgcttctccacctcgcgaccccgaccctgactcgctccactcacctcgccgtccgcctccccagcgcccagctgccgcgctggccatcgggggcacgcatcgccgccgcgcagccgccgcgggcgtacaaggtgacgatcgagcacggcggcgagtcgcgggtggtggaggtggaggaggacgagacgatcctgtcccgcgcgctggacgagggcctggacgtgccgcacgactgcaagctcggcgtgtgcatgacgtgcccggcgcggctggtctccgggacggtggaccagagcgacggcatgctcagcgacgacgtcgtcgcgcgggggtacgcgctgctctgcgccgcgtacccgcgctccgactgcaccatccgcgtcatccccgaggacgagctgctcaaggtccagctcgccaccgccgacgactgactgacgctccgccgatgaccagcggaccggccagcaggcatcaacctccggcggagtaatgatgctggccctgggacttgtacaccattgttgactagtagcactagtgacagagcttttctcgagaatagatgctgtgtgatatgcctctctgccaaatttctggtatccaaatcgagcatttcccgacgtgtggtagcatactgctgattgtctccactttctcagtggttaatgatgcttcagttctg

SEQ ID NO: 4608 - DNA, 603 bp, Zea mays
  Clone ID: 700397533_FLI
gaagaggaactctttgatcaaagcttgggaagagaatgagaagacaaaagctgagaacaaggctgctaagaaagtatccgctattctttcatgggaaaacacaaagaaagcaaacatagaagctgaactgaagaagattgaggaacaactggaaaagaagaaggctgaatatgcagagaagatgaagaacaaggttgcaatgatacacaaggaagccgaagagaagcgagcgatggtggaggcaaaacgcggtgaggaggtcctgaaggccgaggagatggctgccaagtaccgggccaccggccacgctcctaagaagctcatcggttgcttcggagcttaagaagccttccaagtcagaccgagcagaaagtgaaaaacgtcagccagtgattgcttggtcctctcgctctatcaagtgtgtagtgtgtcttcgaaagtttgtaaagcctactgctgctgctgtatatactgatatcgcatccaaggcaggcgtttggtggtgtacatgttgaatgcttgacgagaaacattcttgtgtgtagttaagaggtcacgctgttgttgttgttgttgttgacattcaagcagacattttgttct

SEQ ID NO: 4609 - DNA, 823 bp, Zea mays
  Clone ID: 700397574_FLI
gagcggcgcaagggcgtgccgtggacggaagaggagcacaggttgttcttgttgggtctggacaagttcggcaagggcgactggcggagcatctcgcgcaacttcgtcatctcgcggacgccgacgcaggtggcgagccacgcgcagaaatacttcatccgcctcaactcgatgaaccgggacaggcgccgctccagcatccacgacatcaccagcgtgaccgccggcgaggtggccacggccggcgcgcccatcacgggcggcggcccgaccgcggcgggggcgatgccgatggggccgggcggcatgaagcaccaccacccggttccgccgatgggcatgtacgggcacgcgcccatgggccacccggtcgccgggcacatggtggcgccggcggccgtcggcacgccggtcatgttcccgccgggccatcactcgccctatgtcctgccggtgggatacccggcgccaccgaccaagatgcaccagtgatcgtctacgaccggcatttgcgcagctgcgcagctgcatccctttgctcgttctttcttgatttcgttgatgatcttgtgtagccaaagctatctatccatcctttcctcatctcccgggtctttgttttttgacgtaacatatagatgacttgagcgagtgcagggcaggcaggcgaataatgagtatcgctacttacaggcttaaggaatgtgtaattagtagcagccttcctgggtgcaaatattcatcatttgtgcaactggggactgacagaatcccatttcccggatgtaaatcgattgtctataatatctcatctgtgcgaaat

SEQ ID NO: 4610 - DNA, 2128 bp, Zea mays
  Clone ID: 700397576_FLI
tacaatgttgagtgttggtctcactccaaatatagtaacctacaattctcttatatatggtctctgcaagtctggggagttatccagggctgtcagtctttttaagaagttgtggacaaagggtatatcccctaatgctatcacatataatacattaattgataagcattgcaaggatggttacataaccgaggcctttaaactaaagcaaaggatgatagaggaaggtattcatcctactgtgttcacctattctatactgattaatggtctctgtactcaaggctatatggaagaagcaatcaagcttcttgatcaaatgattgagaataatgtggatccaaattatgtcacatattggacactgattcaaggttatgttagatgtggtaacatgatagagatttcaaagatttatgataagatgcatatccatggacttctgcccaccaatgtttctggggatgtaaaacaatcatgtcctgctatacacaacccgaatagagaaacatgtcagatgaagatgcacagccagtgctagctgctatcacattctttgcatgtctacttcttttgaaagatggcagtgacttatgtttgtatgaggagcaaatcatgggacccatttctatcttgggatgatatccaatataattgtctaattgtcttctgcgaaggggcctggtcatatcatgagaaatgtttccaacctccctcacatgtcagccaagtggtatcttctaactacaggctggattggctttctaagtgcagagacttgttgctggtgactttgccccttttatctggacttaggaatggcaatactcagcttctgctgggaatttgctgggtatatcggctacaaactgtcaagccatcttaagtcttatcaagtgatagcatgcatatcggtcttctcgctgcagctgttcatgccgtttaaacaattagtcggcttacaattttctacagcccaaggcaagcccttcagattttgtcataccgcttgcaaagtctgttaagactgtatactataccagtgtatctgtggggatgtgtttcaagatgctttttgagacaggagagtctagcgtgaggagataagttcaaatctgtttgcaacatcacctcgttattgaagtgggagaaacgaaagacgactagtctttttcgtggtctcgatccacattctattccagcagaagaactgtcggcatctttgaggtacacgctacattccatcaatattgcagtccgtatcctatccacgattgttcttcatggatcaggctttaagtatggttcatgctcaaatatatggcagcagagttcctactgaagtatatgacagtcccagaggtggtgaagaaaccccattgacagaaagtggttcgagttactttggagctgactctggattctgtcaagaaacagtcttttggttccaagagaagcaatagttttagtttctctggtgcatcttctcactccatggagaggcatcgatatttgcagagaggaatgttgtcgtcatcaaaggcccttcgaactgcttttgaatcgaacattgcttcaaggtcagaaaagcaagcgcagccgctaaacagattgatttgaagtgaagttcagccgtatcatcagacatcatgcacacaaccatcatggtaaattcctgttcagcacgcacagtaggtctccgtgtgctctgtacggcctagtgctgctgcgctagctggttgggtgcgtccgtgcgtggacgcgctgtagcaaccagggcacccctgtccatggtcgcgatcgcggcctccgctggcctggcccttggcgtgtgcggggcgtagagacggaggagaatgttgtactatgtgcgggcgcggcgagcgaagccggctggaccagaccagaccacaccagggccagagccagggccacgtggcattggctcggcgtagagaacgtcctcccaatatctatgaatttactacaatatacgtctcattatttttagattcatatatgtatccatcacgggggcctccggcctcgttatagcaagtatgggctgactgtaatataatatccaactccgattcaaaactgtaatgtttattacaaaatttgactt

SEQ ID NO: 4611 - DNA, 801 bp, Zea mays
  Clone ID: 700404757_FLI
aaggaggagaacaacgatggctcaaacaaaatttcaggcgacagcctgaaagacctgtacaagtcctttgtttctgagtaccctatcgagtcgatcgaagacccatttgatcaggatgactggagcacttatgccaaactcactgatgagattggacagaaagtgcagattgtaggagatgatcttctcgttaccaaccccaccagggtcgccaaggccatcaatgagaagacctgcaatgctctcctcttgaaggtgaaccaaatcgggtctgtgaccgagagtatcgaagctgtcaggatgtccaagcgcgccggatggggagtgatggcaagccacaggagtggcgagacagaggacaccttcattgctgacctctcagttggcctgtctacgggccaaatcaagacgggagccccttgccggtctgagcgcctggccaaatacaaccagctgctcaggatcgaggaagagctcggtgatgccgcggtctacgccggagcaaagttcagggcaccagtggagccctactaagaaaggaagaggatgaggatgttttcttgtggagctatactagctcgctgctgccttttgttacaatgtttgtacggtcgcaataaatgtatggtcgtgtttgctcgagagctactcaggtgattttgtcgtgggagcaccaaaagcagaaaagaacccttttttttcaatctctctagattctgacgagtggtggtctgcactcgtcgtaatgtcgtttgcctaaactgattttgatggaacaggaaatcttgctggtcttgccat

SEQ ID NO: 4612 - DNA, 1518 bp, Zea mays
  Clone ID: 700404769_FLI
gggtctgctggaccccatcgacggcgtgctcctccaggagctcatccgctatggcgagttcgcccaggccacctacgacagcttcgactacgaccgcttctccccctactgcggcagctgcaagtacccggcgaagaccttcttccacgacgtcggcctcggcggcatcggctacgaggtcacccgctacctctacgccacctgcaacgacctcaagttccccaacttcggcatcaagacggccgccaacgccaagatgtggagcgagtccggcacgttcatcgggtacgtggccgtgtccaccgacgaggagacggcgcggctcggccgccgggacatcgccgtggcgtggcgcggcaccatcacccgcctcgagtgggtggccgatctgacggccaaccagatccccctgcgcgagacgggcgtcccctgcccggaccccgacgtgaaggtggagcgagggttcgcggcgctgtacacggacaagggcgccggctgccgcttctgccggtactcggcgcgggagcaggtgctggccgaggtgcgcaagctggtggatctgtaccacgggcggggcgagcaggtgagcgtgacggtcacgggccacagcctgggcagcgcgctggcgatgctgtgcgccttcgacatcgcggagacgcgcgcgaacgtgtcgccgggcgacagggtggcgccggtgtgcgtgttctccttcgccggcccgcgcgtcgggaacgtcgccttccggaggcggttcgagcgggagctgggcgtgcgggcgctgcgcgtcgtgaacgtgcacgacagcgtgcccaaggtgcccggcgtgttcttcaacgagtcggcgttcccggagctcgtcctgcgggcggcggacaggctgggcctcggcggcgtgtacacgcacctgggcgtgctgctgcagctggaccacaaggtgtcgccgttcctcaaggagaccctggacctctcgtgctaccacaacctggaggcgcacctgcacctgctggacggcttccgcggctccggcgcggggttcgagccccgcgggagggaccccgcgctggtgaacaagtccaccgacttcctccgggaggaccacatggtgccgcccgtgtggtaccaggcggagaacaagggcatggtgaggacggaggacggccggtgggtgctgccgccgcggcagagggtgctcgacgaccacccggaggacactgaccatcacctccagcggctcggtctcaccgcgtgaagctcagcaatactctgatagtagcgttaattagtgcgtgtggcgttcgcgtacgtgcgcggggcagtcggttactctgttgccgcgcgcggcagctcagtggcgcgttcatgccgtgcatgatgcgggtgacgtgcgggatgggcacgtcgctgcctgagaagctcgcaccgttggcgttcgtgtggctgcagaaaggtcgtcttggattgtaattctctctacttatttttgtaaattgacccagaaaagctgctgcttgcagcgcc

SEQ ID NO: 4613 - DNA, 1412 bp, Zea mays
  Clone ID: 700404834_FLI
ctcatcgccgcgtcacgcacagccgccgccgtcgtgcgcgtgtgccggaacggccgcgtggatcctccgccccgtcccagcggcgacttgtccgtgcgaagatgctggggttctcgaccggacagctgctggtcgtcctcggggcctgctccgtcatgatgaagcccagtgatatggtgaagattgcgaggacggccgggcggatgactggaagagcggttgggcggctcatagtggctcgccggcagctggacgagattctgggccagtctgcagccacccaggttcataaggagcttaaagacgctatgacacaattagactcgatccgttatgaagtccagaacttatcaagattatctcctgggcagtttatgttgaagcaacataacgctggcatggctgaagcagggaaatctgactcctctgatggtcctacaaccaaccaagaagaatttcgtcaggaaattcgcagtataattcgcgatgaatttgaaaaatactgtagaacacagcccattcaaaactctgtgagcacaactgaacacagaaaacttcatgtggctgatgaaccaacggcactgaaatccaaggacatgaagatggctaattcaggattgacaaatctgcacaaccaagcaatgacgtatgcaaggctatctgaagccccaggacttaagatggattcttccttgagtgggaactacaaagatcaatctaaggagatggatgggctgctaactgtactgccaatatcagctgaaagtgctggattacttccaagccgcccagataaaccaacaggctcagatctagtccttgaggctgtgcttgaagcggaagttgcggagaacgctaaactgtttgtgtcgcagcctcatgatcagctacctaaggaatgaagacgaagatgatgtgcttgaagacgttgcaaacaggaccaaactgttcagctgacagccgcatggtcagttgcctacggagcgatgatggtagtttttgatccttaacaggatttggcatactaggcctgtttggtagagctctagaagttgatataccgatctggcgtccagcaccagcggtgtagcttgtagtcttgtaccctcaggcctcaactagccagctaggattcggatgccatggtagaaactggcgacatagcttgtagcctcaactagccaggtaggtttggctgccatagttgaggtaaagctgtggccggtgggcacgtagcttgtggcctcaaaaggagcaagaaagaaaaatagagtaaattagttgtggttatcaatgtgcatggtgattttaaagcttttaaggatgtcatctgtattctgtgtcctcgcaacactgatattctttgcaactctgagtagagagatacacggaatgttcagcttttcagatcc

SEQ ID NO: 4614 - DNA, 1281 bp, Zea mays
  Clone ID: 700404836_FLI
caacaccaaacgccacctgtaaaatcctcacgccacatcttcagccacaggcgcgcgatatccccgctcaaaaaagccatgtcaatggcggcagccgccgcccccgccgcggcatcatccacgctgctgcgggcaagcaacttctctattgtgcgccccgtcccaagcggcgttgcctgctgcatccgcgccgtcagtgggcggagagcatcggtcgtgcgcgcggcagcgactggcgacagggccgcgccggccggtgcccttccggcggcgctgttgttcgattgcgatggtgtgctggtggacactgagaaggatggccaccgcatctccttcaacgaaaccttcgccgagagggaattaggtgtcagctgggatgttgaactgtatggagaattgctcaggataggtggtggaaaggaaaggatgacagcttacttcaaccagacaggatggccggctaaatcaccaaagacagatgacaaaagaaaggagttcatagcttctcttcacaagaggaaaacagaattattcatggccctaattgagaaaaagttgcttcctctccgtccaggtgttcaaaggttaatcgatgaagctttacgaaaggcagttaaagttgcagtgtgcagtacatcaaatgagaaagctgtttcagcaatagtgtcgtacttattggggcctgatagagctgataagattaccatatttgctggagatgtggttcctcacaaaaaacctgacccagcaatctacatattagcagcaactacacttggagttgatccgcaaagctgtgttgttattgaagacagtactatagggctcgcagcggcaaaagctgccggcatgaagtgtatcgtaacaaaaagcggctacactgcagaagaggacttcgagacagcagatgcagtgttcgattgcattggtgacccgccagaagtgcgcttcgatttggatttctgcgccaagttgctcaagaaacaatatgtgagctgaaagggggctagtgcaagtgatataccaagtacaggttcctgaatatggagaaagagtccatggcatgccaatgttggttcttcaagccatgacctgatactaggacttggaagtccacgttctacccaatagtaacttatagaatgaaattcactactgcccacccagttggcagttgtaaatgtatgtattagtcattcaacaaactggaaaccactcgaataacggatcaccaagtccaaactcttcagtcaaagcaatagcaattgaggttacgagtcg

SEQ ID NO: 4615 - DNA, 1535 bp, Zea mays
  Clone ID: 700404847_FLI
gtagtattagtgattttaaatggcttcagcaagaaaagtaagaaacgcgaataagcgttatgccaaaatcaatgaagactggcaggataaagatacaccaagtgtacctaaaagtaaagtgcgaaagaaaaagttatcggacatgcttgggtctcagtggagcaaagatgagctcgagcgcttctatggtgcctacagaaaatatggaaaagattggagaaaggttgctggcactatccgcgatagaacatctgatatggtgaaggctctttacaacatgaataaggcatatttatctcttccagagggaacagcaactgctgcggggttaatcgcaatgatgaccgatcactataatattctggatggaagtaacagtgatcgagaaagcagtgattcaccaaaagcttctaggaggctacagaagcgtggtcgtgcaaaacttcaatctgtgtctaagacatctgatacacattttactgatctgttgcaacctcagcctgcttcatcgagctatggatgcctttctttgtggaagaaaaaacgttctggagacctatttgtagggaaccggccacgtgctgttgggaaaaggactccaagagtacctgttgcaagcatgtaccatcgagatgacaggggtgcaccaaatagacaagctaaaccggatgctaatgatggtgatgatgaaggagctcatgtagctgcacttgctctggcggaggtacatcaaagaggaggctcacctcagatttcccatacacctcggagatctggtgatcatatgtttttgtctcctgctaaaagtagtggcagaaaaaacgctgattcagagatgggaagctcaaagctccatggatttcagttggatgctgattaccctgaaggtagcttgggaagtagggaagccgagactggtgattataccaaaggcacatcctatttgatagccaacaaaggatctccatctagcaagcctcagaagaaagtcaagaggcctcaaaagaggagaaaaaaagctgtacgcagaacggatgatcagtttgaggatgatagagaggcttgtagtggtactgaagaagggtgcagcatgaaaaaggcaaaagaggaaccagagctggagacattgggaaccaaaactgcatggccatctagcacatcaaataaaagaagtcgccaactcttttttgatgatgaaagtttggctctagatgcattacatactttagctgatctatctgtgaatatcctacaaccatcttctgttgttgaatctgaatcatcagcacagatcaaggatgaaaaaagggacaatgattctgatggaaagcctggtatacctgcagcagctgtatcggtgtatgagcagaaagataactccaaaagtacatcaaagaaactcaaaaggcagccagaaatggcaagcactgatatggttactaggaaaaaaggcaaacttgctaaagatactcatcctgatgggagcaccacttctgaagtaaaacagcaagcttgtacatgtggtgtgaaaacag

SEQ ID NO: 4616 - DNA, 1760 bp, Zea mays
  Clone ID: 700404871_FLI
ggaaacctctcccccgttcccctcgaagcctacgggctcggggggcttcgatcgaatcgaatcggatcggatcggaagcatggagatctcgctcgaggcgtcgtgggtgggcgtgcagcggcacgggcaggacctggcggaccgcctcgcgcagggcttctcggggctcctcctccacgcgcagccgccgcagctgcccccatggtcgccggcggcgctgttgccgcccaagctcgtcatccccttcgacctcgacctccccgttgtccccttcgtcgccgggatgcgccgcggggtcgggaccgtggacctccccgccgtggccgtctcgtcgctcgtcgagatcggcggcaggctcgggcaggcggggtccgagctcggtgcggcggttcagcatctcgcgcgccaggtgcctgtgcctgtgcccttccggaaatgggaagccgcacagccgccgaccgtggtgacgggggatgttgcgctcgctgtggggacggttgggtccgcgaacgtcgctttggaaagggctgtagacatagggtccctcgaggtggcagcggctgctgctgcggcggccactggaagtgccactgcaggtagtgtgggcgcggttggggccatggacgacgatagactggatgatgaggaagacggatttgattgcgaaattgggacattggagaacattaagaaggctaagggcactgtaaatgtctcagcaacttacaacaccaggcaccatgactttgagagttcagtagtcgcacgaggagacctttggaggttggagtcatcgcgtggcaatttaacttcagggaatgatagctcaccacttttccttgttcaacttgggcctttactgtttgttcgagactccacgcttcttttgccggttcatctgtcaaagcaacaccttctttggtatggttatgatcgcaagaacggaatgcactccctatgcccagctatctggtcaaagcatagaaaatggatgctgatgtcaatgatgtgcctcaaccctgtagcttgttccttcatggatgtgcaatttccaaatggacaaatgacatatgttgctggtgaggggataacagcaagtggttttatccctttatttggtggattactccaagcacatgcaaagtgtcccggtgatacaagagtgagcttctccttcaagaacaaacaaggtactaggttcagtccaacgtttcagtggcctgacaattctgtttcatttggagtcgcacaagctgtagcatggaagagatctggccttatggtcaggcccagcattcaaatcagtgtttgccccactttcggaggaactgatcctggaatatgcaccgagtttgtccactctttgaaggaggaagtcagcgtaatgtgtggtttctcttgctcaagacatccctcagcattcacagctctctctcttgggcgatccaaatggaatggccaggtcggcagttcgggactagtaatcaccttggagacaccccttgacaacatggcaaggccttctttatccgttcaattgaacgggggtttcgagttctgacatttcccccgtgggctctagaatacaactgtatatactgtatctcatagcgagaagatgatatgccactgtatatattgcacacatgtagctgtgattaagtagatatcttcccaaccggtgaagtgtatagtcctaaaaacagacaaatggcttactgttttggttcactgaataaatttgaaggcttgtatgtcgt

SEQ ID NO: 4617 - DNA, 875 bp, Zea mays
  Clone ID: 700405069_FLI
cttcaaccacatgaggctcttggtctccctcgccccgaccccgtcgtcctcatcgtcgcgcgtcgtcgtcctcgcgccggcagcatggttcccggcgccacggggtgcgtcgcctcgagcccatcgccatgctggccgcgggagcgtacgggctggccacccagatgctcgcctactcgccgatgccgttccgcgccgacggctccatcccgcctgagcggctgccgaaccacgagcacgccatcatctacgcctcgctcctcgtctacaccagctccaacatatacctggacgacgacgacgaccgcgccacgcggcgccggcgccgacgacgctctccatgctcctcctggcagcgctcttcgcgcaggagctgttcgtgttccacgtccactcctccaccgaccacgccggcgtagttccagcggcagaggcctgcctggtccttgagcgcctccaccgcgccgacgctcatcgccaccatccacgacgccctcgctgccgccgccatgtccggattctcctaccgctcggatcttgggctcttgcttttgagttcggttgctgtgctggtcgctgattgactcgcagtagtgctcctctgaggttgtgttgatgctcctgtgctgtgtattggggcttgggagtgagctgggagaccggcgggtgggttatataccggagggaggccggcggaaacaggtggccgcggacgctggttttgctggacaccgggggctctcagtctccctgcttgtttacgctttctccagagctgtttcgctggataccaggggctctcactcaccactgtccgtgcttgtttacactttatccacagttctggagagaagaacgagattgctttctctgtt

SEQ ID NO: 4618 - DNA, 377 bp, Zea mays
  Clone ID: 700421514_FLI
ctagcatataggagcaacgagcaaggacctgagaaggtaggcgcattctgcaggatgaaatgaagtaatagaataggtaaattaggcctgaatagatagaacatgtcaagtgtcgcctcagaatgactagactaaactggtcaccattgatttacagcttgttcgctgcggcttgctgcggctgcaatccggctgcggctgcggcttctacagtatttttctctctatggattgcagctgcagcagtccaaacagctgcaacagtgtcggcttgtagccagccgaacacgcccttacttttttacagacagcttccaatgaccgtactcattttacattcttttattcataaggatggcaggatggctgatttgtcc

SEQ ID NO: 4619 - DNA, 561 bp, Zea mays
  Clone ID: 700421516_FLI
aaaaaaatttcaaaaaagccaagcaagtgttggtgcgcaatattaatttgttagagtgataaattcatattgcgaggggctactgttgggggccttcaacttctgaaggtcctcaaaaacataatttgacaatgttttccaagtgaaatatgtgaacaggtatcttcagattcggatcatgagcatacagagcatggtcaggacgaagcctgagcgagacgaaaggtgattatgacgaaggacaaggtaatcacgaagctgtgcgcaggaaaagcttcgacatggcagcagaaaaggggaaccgacttaaagatgaaaaggcaaattagacctcgaagaattactatagagttattagcaaatgtaaagggcatgggtgtaattttacatgggctgcatcccgtgcctataaataggtgaacagtatcctcgtactgttcacgctgatttggcattcgctttttgcatcacgcttgtacccttgctttccttcaaaccgaaggtacatttataatttgttattgtcgatatgataatgcaaataaaaaataagttgataat

SEQ ID NO: 4620 - DNA, 689 bp, Zea mays
  Clone ID: 700421531_FLI
cggcgaacctgacgctgggcgtgatgagtagcgagcagctgcgcaagtcgacgctgcagagggacgacgtggtggcagagtggaaggaaaccgccggggagatgacgctgcaggtgcattgcttcgtcagcggcgccaacctcctgcaggagctggccgcaggtttcagatactacgtcttctccaaggagctaccgctggtcctcaaggcggtggttcatggcgacgccgctctgttcgccgacaggccggagctgatggaggccaaggtgtgggtgcacttccactccagctctcgcaagtacaaccggttagagtgctggggcccgctctgggaggctgccacaactaccaggaggaaccaccacctgctggagctggaccaactgcagagcgccatcaccaagaagaagactatctttaacgccctgctcgcccttctcctctgattttgattcagccgcctatacaatgaacggacggactatagagtgatcaagcaaacccaccaagcattctgcatctctgtctgactgtaatggttgctgctttgtctggggattatattattcatataatcatcatcagaaaaagcattgtattgcataaacgatagacccagcccagagatgcagcaaaaagagcagacttgattgatgctagtcacaacccagtgactaaagctattc

SEQ ID NO: 4621 - DNA, 860 bp, Zea mays
  Clone ID: 700421567_FLI
ctcgacctcaacctccagcgagcgcccacctccagcttgacaatggtggaagccaagatcctggtgctggtcgcggtccttgctctgcttcaggtatcatccaccgttgcccggcggcacggcaagccggacccctgcgacgaggacgacgctaacacggacgacctgccgggcggcctgcgccacaagaggacgccccacccgcgaagccatcactgcgcaccggcgcaccacgggggtcgtggcggcggcacccccgctgtgatgacggtgaacgggttcaagcgcggcgagagcggcggcgggccagcggagtgcgacgggcacttccacggcgacgacgagctgatcgtggcgctgtccacggagtggtacgcgcacgggcgccggtgccaccgaaggatccgcatcacgagcgcgcaccacgggcgcaccgtggaggcacgcgtcgtggacgagtgcgactccagccgcggatgccggcacaacatcgtcgactcgtcccctgcggtctggagggcgctcggtctcgacaccgacatcggacaggtgcccgtcacgtggtccgacgcctgaggcggccggccgtcacgtacggagctgtcgtctatcctgcgagggcaagagttcaggtagcgtggccggtgggcgacggcggcggcgttcgttcgtgcctgaccggcagtcttgatctcctgttaccagtagctagtttgctaccgtccgcttgaatttgcgtggactggagtagcagagaataaagtgtgttttctagaataattgttcggtgtgtggacctcttgtaagatcaacttgttcctagttatatatgatcatgtctttgtgagtttgctttatat

SEQ ID NO: 4622 - DNA, 543 bp, Zea mays
  Clone ID: 700421596_FLI
aatcggctagggtttcggagatgttcggccgcgcgccgaagaagagcgacaacacccggtactacgagatcctgggggtttccaaggacgcgtcacaggatgacctcaagaaggcctaccgcaaggccgccatcaagaaccaccccgacaagggcggcgaccccgagaaggtgagcgcgcgagctggtcatttcgtctggctccgacctgtccgcggcggggagtagtaggcgggttgtcaggtttgcggcgatgttgagacggtttggctgggtcgatttcatatggtgctggtgcttgtgggttcggagcggtggtttcgatctgaggcggcgtggatttagatgagtttaatgtgttggggtagtggagggaattcgtatgggcaaggagatgttgcatggaaactgttatgaatattggttgcgaggaaagtgttaggattgttgtctgccacggagacgcatctagagctgttcatggacatgcctctggaaattgtcgctctatgtggtatcgttagtcggataattagtaattaat

SEQ ID NO: 4623 - DNA, 453 bp, Zea mays
  Clone ID: 700421605_FLI
ctcggggaagccctactccgcgcggtacataggcagcctcgtcggcgacttccaccgcactcttctctacggagggatctacgggtaccccagggacaagaagagcaagaacggcaagctgcggcttctctacgagtgcgcccccatgagcttcatcgtcgagcaggccggtggcaagggctctgacggccaccagagaattcttgacatcacacctacagagatccaccaaagagtgcctctgtacattgggagcgtggaggaagtggacaaggtggagaaattcctggcttgaatgccagagcctctctcatcagatggactcccgaagacatcaagtttagggagggaatatgcatgtactctctctttcccaccccaaataagtcttcttcatctcatatttcgataaatcaaacaatctcaattttgatctaatatatatacacacac

SEQ ID NO: 4624 - DNA, 225 bp, Zea mays
  Clone ID: 700421615_FLI
cccatgctggcgtggccgctgttcgccgaccagaggcagaacgcggtgctgctgtgcgacggggtaggggccgcgctacgagtgcccggggccaaggggagggaagacatcgccgcggtggtgcgggagctgatgaccgcggagggcaagggcgccgcggtgcgggccaaggtggaggagctgcagaaggccgcggccgagggccttcgcgacggcggcgccacc

SEQ ID NO: 4625 - DNA, 1324 bp, Zea mays
  Clone ID: 700421620_FLI
cgcaaatcttttgcacaagtgaatgggttcttggcacaagagaagacctagtgaaggatattgttgctgaattacggcctgatcttggtgaggagtggtggacatatgtttgtatgggtccttctgatcctcaaccaaactggcaccttgggatgcgtggaacccagcaccgggcagtgatgtggcgagtgtggaaggaaggtgggacaggatttctttattggggttccaactgctatgagaaggctatgatcccaagtgctgagatctgtttccgacgcggccttcctcctggcgacggtgtcctgttttaccctggtgaagtgttttcttcgtcacatgaaccagttgcttccacccggctagagcgcattctcagtggcatgcaggacatcgaatacctgaagctttattcttcacggtatgggagggaggaaggcctggcccttatagagaagactggcatgtaccttggaccggatcgatatacgctggatcatggaccggtagatgtgatgaggggtgaggtgtaccgcacctgcaggtcttagtgtagcaatgcctgccagatgctgtccttccagtctagggcgtctgttgtattatatatggtggtatgtgatctatgtagcgaattaatctacccttggtgatcgatcagatcatcaaacctggactaaactagtcctggtgcatcttttgaatctggctcgagagttgcatcaagtcgggagaaaaaaaacccaagagatctggccaagagatggagcgacccaggtccggctctggtacaaggcccagttagctaccggaagtgggccctatctgctgcaacaggattgagacgagattggcattgtcctctcgattccatgacgctgtgcccgcatacagctgaagctgaaatattctcctattagctgttaccttccatttcctttctgcgatttgcaccgcaggttacaccctccaaaggcgcattcgtttctaccgtgtgccgtgacgaggattcccgtctcagcaacggacgctgccgccgcgatgccctgtctctttcgaggtcggtagcgccatggcctaacgcggagctgtgtttggttggaagggaataatgcatgcgatgcatggtgaggaaggatgagtctatcccgagctctgtttggtccagagacatgaaaattaggtccagactgttaagtaaccctagttagggttatgtgggcaaatacctgctttgtccctgaggggtctcacatctctatataaggaacctgtacaccccttcatattacagagaagagaaagaggccagaggcccaactct

SEQ ID NO: 4626 - DNA, 622 bp, Zea mays
  Clone ID: 700421638_FLI
gtaccacaccactccgcgctagctgaggacggtacagcggcacagaggtgcgacgtacgacgacgacgacgcaggcgccacacatggcatcccagctctccgccgccgtgccccggttccacggcctccggggcaacgccgcgcccaggtccgcggtggcggcgctgccgtccgtgagggtgggcaggaagaggtcgtcgtcgcagggcatccgctgcgactacatcggctccgccaccaacctgatcatggtgacgacgacgacgctaatgctattcgcggggcggttcgggctggcgccgtcggcgaaccgcaaggcgacggcggggctgaagctggaggcgcgcgactccggcctgcagacgggtgaccccgccgggttcaccctcgccgacacgctggcctgcggcgccgtcggccacatcctcggcgtcggcatcgtgctcgggctcaagaacaccggcgccctcgaccagatcattggctagatccctacgtcgccgttgttaagatcagactcagcagcctcgatcgcgccgccggccggcagcaggtgccaggtggtgactttgtaacgtgtgtgcgtgcgtgtaacattgcatccatcttggttccaatggac

SEQ ID NO: 4627 - DNA, 401 bp, Zea mays
  Clone ID: 700421659_FLI
gcggagacggtgagcaaggtgatggacatcgtgaagcagcagctggcgctggcggcggacgtggggctgacggcggagaccaagttcacggacctcggcgccgactcgctggacacggtggagatcgtcatgacgctggaggaggagttcaagatcaccgtcgaggaggacaatgcccagagcatcgccaccatccaggacgccgccgacctcatcgacaagctcgtcgaccagaagccacgagacagcgactgattgtcgacgcgacgacacccaaatccaatccatcgatcaccgctcgtacgtgcatgtgaatgctccgttattgtactgtaattgagttttttttatctctagctagagatatttatgaacacagatggaagagaagagttgatgat

SEQ ID NO: 4628 - DNA, 586 bp, Zea mays
  Clone ID: 700421660_FLI
ctactcctccccttccctcctcaacgacgcgagaagacgcaatcctgggagctccgaaccctagctcctaatttgagccccggtgtcatcgattcctcaggagcccgccgcgattcggctcccgtagcagcatagggctccaccgctccccagctgcatcagcatcgacggcggcggcgcgccgccgcgactacgctcgaggaagcacctagtctcggcgggttctcgttcttggaggccttccataaggcggtttcgtggtgtccgagcccggatctacggcgatctgcaagcggaaggcgatagatgaggcgattcagtggtaacccccaatccggtgggtttccggctggcagaggcggaaaggttcgggccttcggcgggtgatcagatttctccgtgcggcgcgcggcttgtgtctaccgcaacggtgtaggactggagcgcaggagccgacgaggcggtggagatacaaaaaaaattgcttgcttgtacacttgttcatgttcatttgttcctgctatctgttgtggtttaaagcatcaattttccgctcaatttaagggcgaagacactttttttgttc

SEQ ID NO: 4629 - DNA, 619 bp, Zea mays
  Clone ID: 700421668_FLI
cccaccctcccttgtatttccagctcggccaaagctgtatataacttgcctacagccagctgagctccccatcgatcctgtcctgtccagcaagggagacctggactggaggaggaggacctacctacccggcctccagctctctcgtctcttcctcctcctcctcgaagctccgatccgatcccccaatgtctgacagcagtccagctcccggcgcctactactccggccctcccgccgcgccgccgcccgagtctaagcccgttgacggcggccaggtcaacgccgatgttcctggctactactcctccgtccctgctgcgaaatctggcgccggcggccagggcagctccgctgctcctaaggaatcgggcttcttcgccagctgttgtgggtgcttctctggcggcgaaaccgcgagatagatagattcagtgttggaccgaggaccatggatggatggatggaacatgcatgcccagtgattgtttgcgccgatgaaagttcaatttgtccggatttattttctctgaaatagtatatgttttttttctccatcggtgagccggtgatcttgtcaatttgtacaataatcattatatgcaaccaactgtgcttt

SEQ ID NO: 4630 - DNA, 843 bp, Zea mays
  Clone ID: 700421682_FLI
cagcattcgactgctccagctagctgcagtgtagagccataccaaagcctgcttgtgttgtgttgtgttctcttctgctcctcgctcgcacgaataatcagttcaaaccaatggttcgtacgtcaggctaattaattttctactaattagcttagctagcattctgtggttcattcattcattcatatatagttttgcagctccaaaaaatgacgatatatacattatttggtagtgacagtcaggacatatatatatatatagacagtacctgcatatatatatatatgcatgcaatgctgaataatctgctgattgctgcctttggttaactaggacgggaagaaggtgcaggagagggcggcatggggagccagcgacggcggcggcaacctggtgcaggacgccgtcgactacaggggctgccgggctgacaagtccagcacgggcggctgggtggcggcggcgctcgccctggggatcgagctgtgcgagcgcctcgccaccatgggcatcgccgtcaacctggtcacgtacctcacggccaccatgcacctgcccagcgccgcagctgccaacgtggtcaccgacttcatgggcacctccttcctcctctgcctcctcggtgggttcctcgccgactccttcctcggacggtacctcaccatcgccatcttcgccctcatccaagccatcgtgagtactgtactccgatccaactcgaacgattgctctggcatgcatgccgtgacgtcagctcatggtagctgatccatgcacgtgtcgtacgcacacatggcagggcacggggctcctggcagtgtccacggaggtgcggcagct

SEQ ID NO: 4631 - DNA, 654 bp, Zea mays
  Clone ID: 700421686_FLI
ggaggagacgcgcgggaagaagttctcggtgtgggcgtacgaggagtacgagaggggcaacctcgccggcatcatcgacaggaggctccccgcagaggacctcgacatggcgcaggtggagcgcgcgctgcaggtgagcttctggtgcatccaggagcagccggggcagcgcccatccatggggaaggtggtgcagatgctggatggggttatggagctcgagaggcctccgcccccgaagtcgtcggacagcttttttagcaccaccacggccagcggcggcaactccagcatggtctcgacagtcgcctcgtcagcggcgcccccggtcgcgccctcgacgtcgccgaacctagagcaggagatggcgttgggacgctccgagtcggccaggaaccgtgaccgggtgacgcggcagctgctgtcgccgcagccgtacatgacgatgtaaaatgtgcgtctgcgtcatcatcatccatccattgcagagatcatcatctggatacacgcacgcaggcagaatgcctgtttctgtcgtccattccaggtttactacagattgtagagcgattacgtagggctacgctgaatttgctcctaacattctggttggcaatatgtaattgtaagcatcaaatttggaccgagtttggt

SEQ ID NO: 4632 - DNA, 631 bp, Zea mays
  Clone ID: 700421740_FLI
tttgagattctaaacaccctccatccgagtccagctgtttgtggcttgcccactgaagaggcacgccaattcatacgggattgtggtatgcccaaatttgattattctgttcgaacatagcctttctgaaattagacacatactaactaggtttttggatattctgacagaaatttttgaccgtggaatgtatgccggtcctgttggctggtttggaggagctgagtgcgagttcgctgtcgggattagatcagcgttacttggaaaaggtcacagcactctggtgtacgccggtgcggggatcgttgaaggtacaaacccatcttttgaatgggatgagcttgatctcaaagcatctcagtttgcaaagctgttgcggtaccaagaacgacctattcgctaccaagaggctgaaaatctgggaacggtgatctgaatagagaagtacagaagaaactaaagtcatcacaaagttcggcattcatttagcgagttatttatacaattgtttgtttgatatagtaagctagaagggggattcagttggatttgtgtaattatggaatccagaacagcggcagtgctgaaaaatacattgattgaacctgaatgggaaattgttcaatgtaac

SEQ ID NO: 4633 - DNA, 391 bp, Zea mays
  Clone ID: 700421751_FLI
tgaagatgaaaatgtgctggcatttagagatattaatccacaagcccctgtgcacgttctagtcatcccaaaagcgagagatgggctaaccggattagacaaggctgagccaaggcatacagaaatcctgggccggctcctttacgcagcgaaagtagtggcagaaaaggaaggtgtagcgagtgggtaccgtgttgtcatcaacaatggtgctgaaggatgccaatctgtctatcatctgcacctgcatgtacttggtggaaggcagatgaagtggccccctggttaaattacgaagggtgacatgtttgatttcctgtacccctctgtgagttgagtttgctgcttgtatgactgttgttgcaaagggagaaagagtggttggtgtact

SEQ ID NO: 4634 - DNA, 794 bp, Zea mays
  Clone ID: 700421759_FLI
gccgctgcctgcaagggtgaccttgcttgagcccgtcttccttcttcctcagctaggcacccgtgcccatcttcagtccacctagccatgcctacgacgatggcggcggcggcggcagcgtctgctccaagctcgctccgcgtttcgcgccaggggacgatcgggggaggccatgtcctctacagcaggtctcagagggctgccactgtctccgccagagcttccatgaacataacgtgctgcgcgaaccagacgcagacggcgcagcgcaagtcgtattcggggacgacctctccgccgtcaggttcagtgaaagagaaggtgaagccgaggctcgacgacgggggcgtcgggttcccgccgttccggttcgggggaggcggaggaggaggaggcggcggcggcagcagctcgtccggcgggttcatcctcttcgtggtcgtcctgctcctggattacctcaaggagttcgagaggaacctgcagaacgggccacggaggagcggcagtggctacgacgacgggctggcgccacagtagattcctctctctctctctctcacacacactctcggtatgtggtttggaagagaacgtgtactacgtctctacacgagcatgtgttgcagagatgcttcggtgttcgttggcgtgatctctctttttgctacaaaagacagagtttttctcgagggctcatggtgaggactagaaattttagccagtcgaacgaatgccttgagatcacacaatgaaactcattggcgcttcgaaagtttgaataaatttcaaag

SEQ ID NO: 4635 - DNA, 1223 bp, Zea mays
  Clone ID: 700421774_FLI
gctagtataagtattttataacctgtgaaaaaaatcctttataagtagtaattttgtggttgaagtcccagtttcacttccatactgaatgaattaaggaaacactatgttttaagttatttgaaagcacaaagcgttttaagttgtgtgtagtccacctaccttttaacttggtttcctatctgttcctttgcagtatccacagctataccaagaaggagtgcaaaatatattattcagttggcgtcggatacttggctggatgtttaatggtgttatgaatgctgtcttaatctttttcttctgcatcactgccttcgaggaccaggcattccgtcgcgacggtcaagttgcgggcttggatgctcttggtgtcgtcatgtacacttgtattgtatgggttgttaactgtcaaatggcgctctctgtgaactacttcaccataatccagcacatattcatatggggcagcattgcagtatggtacctcttcctcttggtttatggtgccataaacccgaggttctcaactacagcctacatggtcttcatcgaacagctggccccagccctctcattttggctggtgacactttttgttgtggtggcaacacttgtcccctactttagctatgccgccatccagatccgctttttcccgatgttccacaacaagattcagtggaaacggtacttggggaaggctgaagatccagaggtggcaaggcagttgtcatcaaaacaccgcacatcattgcagcacaggatggttggtatctctgctcgtcgtgacggcaaggctgtgcaaataacaaaggagacagagctacaagttcaggagtagcattgtcagtagattttgcgttttgtacagcttataggatcttgtctccagcaagatgacagctgaactgattgggacttgagatgttcctggattgctgcttctgtgatgcctgtcatgggagttgttccagttcagatgatagagcaagaccacagattgcttagataggtcgcaaggaggccaagagaatacctgctgcaaagttcaatttttagcagttcaaggattttgtgggttttttccctgcttctcttacacatgtaaatgcttgtaaccagattggtagaatttctcctttttaccccccttgcctgccctcgactgtttcaaacaataatggtaagacttctgatttgtgtgacttcatgcttttatt

SEQ ID NO: 4636 - DNA, 873 bp, Zea mays
  Clone ID: 700421933_FLI
gagagttggtgctaacttaaaggactcagaaattacaacactaatggaagcggcagatattgataacagtggttccatcgactatggagagttcctagctgcaactttacatctgaacaaagtcgagcgagaagacaacctcttcgcagcattctcatactttgataaagacggcagcggttatattactcatgatgagctacaaaaagcatgcgaggaattcggtatagaagatgcacacctagaagatatcatccatgacgttgatcaggacaatgatggtcggatcgactacaacgagtttgtaacaatgatgcagaagggaaataacccactagggaaaaaggggcactgccagatgagctttggtcttagagaagcattgaagcttggctaagtggcatgatcaatcctgtgtgaagtgtcattcggcttcatatgccaactttagctgatgaaactaagtccgtgaatttgggacgccggtaccaaaggtggagcaagtgcgcgatacgattagcttcgggataccaactaagcagtgagcggaacacattggtgatctttcgtcgttaaccccccatgtacatggcttttttgaggtgggataggaatggcggttgtgtttcccatggccattctttgcacgttatgaagctcagctgcaggatgctcttatatagagagaaatgttagtcacatcacatcgcgtgtccatactgtatagcgaaacttaacatgttgtaatatcggtcggacaaagtgtgcgtgttgtatgttatctttcttagatagatgcgcaggcttagcgttgtcatatatgtattgcaagaatatgcaggctgtatattaatcaaatgattttttttgtgt

SEQ ID NO: 4637 - DNA, 781 bp, Zea mays
  Clone ID: 700422955_FLI
cgacgcacgttctcacacaccttccgccgcgggccttcttctcctttccgctcgcctcttctccacctgtctgtccgctctactgtatagaggaaggccgaaggccgtttccatttctcgaagccgcggcagcacgcgtcctgcttgcctcccggtcccggatcttgcccaccccgcaacgcgccgccacctccgccaagcaagggcagcttgatcatattcaagatggggaaggacaaagaagctgccaatctgaaggaggaggagacagagatcaaggccaagtttgttgagaaggaagatgccaaagactcaggtggtggcgcagggtctgtgggaggaaagagtaaagaggggaagaaagacagagagggaaaggaggagaagtcggtggagcatgaatatggcgaaggcgatgagaaggcgatcaagaagaaggataaaaaggagaaagacaagaaaaagaaggaagacgatggagattcagggaaggcagagaaagataagaagggtaagaaggctaaagagaaggatggatcagagttgaagggttcgagtggtgagaaacaagagaagatcaaagataagaaagagacaggagatggcaaagatgtgggggaggaagagaaacgcaagaagataggaaacaaagacaaagataagaaggataaaaaggccaaagaaaaggatggatcggaaccaaagggtgacaaggatgaagatggtaagaagaaagaggccgatggcgatgaagacgaagaagataagaaggaggacaagg

SEQ ID NO: 4638 - DNA, 761 bp, Zea mays
  Clone ID: 700422960_FLI
gtgttttcttactacaaaactttccccatgccaataacttctcataggtttggttctattgacccgataactggacaagtgacaaatgaagacaaccagcaatttgtgtccagtgtttgctggagagggaagtcaaacatggtagtggctgccaactccagtggtagcatcaaagtgcttgagcttgtgtgaatgaacgagagtcatattggagaagaaggttctagtgttgccatgcgggcctgcgatgctttcgtgcccttgggcactaaaagactcgactgctctatgcaagcatcctacaacaccgatcattggttattggaagctttgcttgaaactcacaagcaaactaaagttttttttttttccaagagtatgatggcctcacctccatttttgtgtttggcattttgagacggtacctattcatcgtgatgcaaacttcttttgggctagaggtgcgcgggacttgctatgactgttaagagcaaacgatggaaagaaagggaaaaaaatgatcatgtagctcgaagaagttaatcgtgctgtgtgaatgtttcaaggagaatgtctcaaatagttttatacccccttcattattgtacatatatctagggctgcctaatgaaaggccttgtaagttgtaactagagtagaatgctgatcatgagttaagtataatgaatggtcttcacaaaagattaatcaatggaagattcatacaaagtataatgaatgattatccttttggctggaac

SEQ ID NO: 4639 - DNA, 651 bp, Zea mays
  Clone ID: 700422989_FLI
gaggtccaggagcttcctccgccggagccgacgaggtttgccttcgccaccgcggccaaggcggcagttgatggcgtgatgactcctcctccaaaggatgtccaaggagatagagcagtaaaaaagcgcggccggaagaaccagtacaggggaatcaggcagcggccttggggcaaatgggcagctgagatcagggaccctaacaagggcgtccgcgtctggctcggaacctacaacaccgccgaggaggcagctagggcatacgacgccgaagctcgcaagatccgcggcaagaaagcgaaggtgaattttcccgatgacgcgacaggcactcgtcacaggccaacgaccgatgagatctttaacaacctgaagaacgacgacaacaacaacaacgatgatctgtttgcgatgtttgcgttcggtgacaataagaagaaggttcctgcagcgaagccagccgccgccgagggtggcagtggcagtggcagcttcctcgtccctgcgcctgcggtggcggtggtgcccggtaataagaggaggtcgtccgcgaccaacactatgctctccgtctccgacgaccagcgcagcaactcctacggctccggctcctccgacttggtggggtcgtggtcgtgggacgacgacgcg

SEQ ID NO: 4640 - DNA, 737 bp, Zea mays
  Clone ID: 700423057_FLI
ttgtgatccggaagcagaagcgggagagccccgagaaatctagccccatgctcgcctactacatccttgacggctccatctaccaggcgccacagctctgcaacgtcttcgcctcacgcataagcagggctatgcatcatatatcaaaagcctttaccatagcatgttcaaagttggagaagattggaaacgtggaaaccgagcccgatgcagtagcctctgaatcaaagacccaaaaggaagcaatcgacctgaaggaactcaaacgaattgatcatatcctgtcatccttgaaacggaagataggggctgctcctcccccacccccttaccccgagggctatgtcccaccatcagcagaacaagagaaagcgccggatgatgtggcagcatcagaggcaccgcctcaacttgaccctatcattgatcaaggtccttcgaaaagaccaagattccaatgaaagatttgtagcttaaacctgctgactcgacaacttcctgtatgctttaaagtcgccgacgtggactttataaatccattcttgctggttggttatttacaggccaaagacagaactaacctcgtggcatgatatctcgttctctgagttactagcttgaatcttgtagattggccagtgccatttgctccgggcttgtaatcttgtagataggccagtgtcatttgatctggtctatctacttagctatcataacttatgaggtggttatagttt

SEQ ID NO: 4641 - DNA, 658 bp, Zea mays
  Clone ID: 700423094_FLI
ctccgggtgacatacaagaaccctgcagtcatgatccatgaaaacggagctgccggacagcctgatccatccggcgtgaacagctacgacgacgagttcaggtcacagttcctgcaggactacatcgaggccacgcttcagtccatcaggaacggatcgaacgtgcaaggctacttcgtgtggtcgttcctggacgtgttcgagtacctgttcggctaccgcctccggttcggcgtctacggcgtcgagttcaactcgacggcacggacaaggtaccagaggcactcggcgaagtggtacgccagcttcctccggggcggcgagctgaggccagtcgctctgcctgacggagcatattcacagtgaccagttacacgtgtacgctccggctccaggggaggggaatatctggcgatcagcgctcttggtgaggtggagagaaaatagagagtttgtaagcacggatagtcgggtggtatatagcagtgcttagatacggttttcttgggtaaatgtggtacgagttgaataagttgtttttttttgcgtgtggctgggtgtctatttggatgaattattagcggtttacaggaggaggctgtgatcatgtaatggtatatgcagatgcagttacaaatttcattgctagtttgtatac

SEQ ID NO: 4642 - DNA, 1239 bp, Zea mays
  Clone ID: 700426186_FLI
tgctgtcaagggtgcagcacaagaacctcgtcaagtttattggggcctgcctagaacctgtcatggtggtcgtgacagagctactagtggggggctcgttgcgcaagtatttggtcagtctccgacctaggagccttgagcctcgtgtagcagtggggtttgcattggacattgcccgagctatggaatgcttacatgcacatgggatcattcatcgtgatcttaagcctgagaatctgttgctgactgcagaccagagaacagtaaaacttgttgatcttggtttggctagggaagagacactaacggagatgatgactgctgagacaggaacataccgttggatggctccagagttgtacagcacagtaacactgaggcatggagaaaagaagcattacaaccacaaagtagatgtctacagctttgcaattgtgttgtgggaactcctccacaataaactgcccttcgagggaatgtctaaccttcaagctgcctacgctgccgctttcaagaatatcagaccaagtgccgataacttgcccgaggagctgtcagaaatcctaacatcctgctggaaggaagacccaaacgacagaccaaacttcacacagataatacagatgctcctacactacctatccaccctttcgccacaagagaccttggcgggcccccgccgcacgttcagttcggagaacacaatcctgcccccagagtctcccgggacaagctcgctgatggcttcgcggggcgacctcggcgacacgcccaagggcaagaaggaagacaagccgaggggcttcttcttctgtttcagcgagtgctattagcacgagcccccccaaagggggaacactccgataagcttgcaaatactgaacgaacaccgtctctccccagctccgatgccctgcgactcaagccatgtccagccggtcaagtcccaggcatccatagtccgcaccctgaagaacggaagtgtagtcgaacactgttttgttttcttctgctaatcaaggtctcctgcatcgctgacatgctgatgacatataccagcagggtaaaacgacgggtaaaccttttgactccagatagtaatggtgggaatagcttacctcccctgtgttttctggcgcaccatggtgtaacggagttgctagagcgcgactatagattgccttcctgcctgcctgtctcgcccgacatcgtatagaaataaaaccaataattcgcatc

SEQ ID NO: 4643 - DNA, 512 bp, Zea mays
  Clone ID: 700428488_FLI
cgatctcacttagctgctgctggtggtggtggtggcctgggcctggctgctgtgtctgtatcgatgtgtccgtattttctccatctcgtctgcatacgctgcaattggtaaggagctagctggcctttcatgtcttccatgctgccatagccatacggccggccggcaggcaggaggataccccatcgctcgctgcacatgcatgtatgcatggggatacatgttcatcatcagcagcacagtggctccgtatcccccatcccaatccgatcctatataggaggaggagaaggaggagcagcagcagcagccaggcgcggccggcggccggagtagtatccgaatccgctcaacacccacaccggtgcgggtggtctctagctttcccatcgatcaatggctttcaaaggactcccgcgtgactcccgagggtccctcgaagtcttcaatccagacgcccctgtttcagatcgagcaaccacctccccgtttctcctccctcctgcggccgc

SEQ ID NO: 4644 - DNA, 1253 bp, Zea mays
  Clone ID: 700428489_FLI
gcggggagaaccaaaccagagacgcggcacgcgacgcgggagggcgagcagcagcggcgcggcgacatcgcgaggccagggccagaagcaacagccgaggaggggcagcagaggcgaccgccgagagtcccggccaccatggacaccttcttcctatcgcacggctcgcccacgctctccatcgacgacagtatctcggcgcggcacttcttcaagtcgtgggtgccggcgaaggtcgcgggcgaccagcccccgcgcgccatcctcgtcgtctcgggacactgggagacggccacgccggcggtcaatatcatccgcggcagcaacgacaccatctacgacttctatggctttcccaagcccatgtaccagctcaagtacccggctccgggcgctccggacttggccctgcggaccgtagagctcctggagcaagccgggttcggccccgtgaagcaggaccacagccgcgggctcgaccacggcgcctgggtgccgctgatgctcatgtacccggacgccagcatccccgtgtgccagctctcggtgcagaccgaccgcgacggcacgtaccactacaacctcggcaaggcgctggcgcccctgcgggaggaaggcatcctcatcctcggctccggtagcgccacgcacaacctgcgcaagattagcccgtccgacgcgcccgtgccgcagtgggccgccgagttcgacacctggctcaaggactcgctcctcaacggaaggtacgaggacgtgaagcggtacgaggagaaggcgccgcacgcgagggtggcgcacccgtggccggaccacttctacccgctgcacgtcgcgctcggcgccgccggggacgccgcgaaggcggagcagatccaccagtgctggtccaacggcacgctctcctacgcgtcctaccggttcaccaccaacacctgacgcgctgctcgtggtgtcggtggaataccacccggccagctgctgaattcgcggggaagcatccatcgacgggtgtggcactggcagcattgcacatactgtatttctaataaacccccgtgtgcctgccgttccgttcgcggtagatatgcgtttgttgatgttttgcattgtttggtgcagcagcttaggctgattgattgcctgcatggtggtgccgggatctcgctggcctagctgaatcatgcattctatcgagaaacatttgtttgttacgccccgtttggatcattgaaattgaattccattctaataat

SEQ ID NO: 4645 - DNA, 823 bp, Zea mays
  Clone ID: 700428531_FLI
ccaggttcttcctcggcgagcacttcccggcgccggtctacttctccctcctccccatcatcggcggatgcgcgctcgccgccgtcaccgagctcaacttcaacatggttggattcatgggggcaatgatctccaacctggcattcgtcgtccggaccatcttctccaagaaggggatgaagggcaagtccgtgagcgggatgaactactacgcctgcctctccatcatgtcgctggtgatcctcctgcccttcgccgtcgccatggaggggcccaaggtgtgggcagcgggctggcagacagcagtcgccgagatcggtcccaacttcgtctggtgggtggcggcgcagagcgtgttctaccacctgtacaaccaggtgtcctacatgtccctggacgagatctcgcccctcaccttctccatcggcaacaccatgaagcgcatctccgtcatcgtcgcgtccatcatcatcttccagacgcccgtccagcccatcaacgcgctcggggccgccatcgccatcctcggaaccttcatctactcccaggccaagcagtagccgcccttggcgcgcgcgtctggctctcaggcctcagttcagttcaccgccgaatcagctcggcgctcgaagatataacagattatataacttttgaggatatctacctagcttgtataatagtattattactagatcctctcttctttttttcgtattttcttttttcctaggactagcttattactagatcatttcgtcgtcgtgttttcactatgactatgatggcgtagagagagagagagagatggatccatctaaat

SEQ ID NO: 4646 - DNA, 829 bp, Zea mays
  Clone ID: 700428606_FLI
gctccaggaccttggtatcatccccgatgacagattctgtggctgccttctcagcgtggcagcaaacacaccagcggaagaactgggcaaggtgatcagctgcattgagagaagcaacgtccagcttggtgccgtagtgaagctccttgtggacaggagctcctctgaatcttttagagaagcagcccgtgaactgctgaggagctcccgcggcgtggtgaagatgccttactgcaactgcctgatggacctatgcgtgaacctgaaccagatggagaaggcctgcgcgctcctggacgccgcacagcagctcggcatctacgccaacatccagacgaggacccagacacagtggtcgctgcacctcaggggcctctccgtcggcgcggcactgaccacattgcacgtctggatgaacgatctgtatacgtctctacagaccggcaacgaagggctgccaccattgcttggaatccacacggggcaggggaagaacacgtactcggacagagggctggctgctatgttcgaggcgcatctgaaggagctcgacgcgccgttccacgaggcacccgacaaggcaggctggttcttgacgacgaacgttgctgctaagcaatggctggagtcgaaggcggcatcagaactagtaactgtgtaaactggttactctggcgcgtacataggattatttttccgtgtaagctacatgtgttctccgatatatgcaggtgaagatgttgagttagcctatctccgaccttactcatccgtatacctatattcaaatttcactctatgatttataatgaaatttaaaatagatctt

SEQ ID NO: 4647 - DNA, 437 bp, Zea mays
  Clone ID: 700428645_FLI
accagccgcctcatcctctagccgatctccttttttgtcgcctccgtgcgtgccccgggggccttgatcgcgcgcaccggtcagctcagcccgtctgattcgcgtgctgccagccctccgccgatcgtgaaacacaaccgtcggtggtttgcttgcttgatcgctgatcctcgcggacgctcacggtcatggcgcctcagcctgtgcgcgctccgaggctgagcgcccccgctggccacgcggcgtgcaggtgctcggccgcgccgctattcgggaagcgggcgccccccgtcgtcgcgttcccccgcgcccgtagcggcggcgccgtcgcctcgtgctcggccgtgcaggagtcgtccacctccaccactgttagcaagaagaaggatgccgcggacggggccaaggaggccacagcggaggcggcgaagccggcc

SEQ ID NO: 4648 - DNA, 392 bp, Zea mays
  Clone ID: 700431476_FLI
ctcgctcgcctgcacaacctctccatccaggccacagctcgagaccaacgaccgacgcctagacgcggctgggcggtcggcctcacctcgttcccccgcctcccttcttcctgctccgcgtctcgatctcgactcccccgccgcgtcgcgcgacccggccagatctcgcccaccctgcgccgcggccatggataacttgatcaccctcgtcaacaagctgcagagggcttgcacggctctcggagaccacggagaggagagcgccctcccgacgctctgggactcgctgccggctatcgccgtcgttggaggacagagctctggtaaatcatctgtgttggagagcgtggttgggaaggatttcctaccgaggggttcaggcattgtaaccc

SEQ ID NO: 4649 - DNA, 664 bp, Zea mays
  Clone ID: 700431508_FLI
cacaaccacaggcaacgcaacccccaaacccaaaaccctaccacggcggcggatgctggcgagggaggaggcgaagctggagaaggagattgtgcggatggtgctggccggggaggccgaggacaagctcaagcccaattcgggccagtccgtggctgtcggcgaccaccacctctgcgtcggtttccacgacgatgccagcggggagtatcgcatctgggaatggcatggccacgtcatgctgttcgacgacgaggaaggatactccgcagagtacatttatggcaaccacttcgagccgctcgctgctgccacagccagggccaagaagaaggagaaggagatgagagagaaggaattgagcatgggtcttcgggatttggtcgtggacactgacgacggtggcaatgccaatcgctccaaggagaacggtagcagcggagggcccagggtagtgcgcaggaatgtcgtcaatggcccaaccacgcctgctaggtaatggctttctagagcttgcagtgtgcttggtggaagaagcagtgccgcagtgcatcaatctgtgtgacaaaaacaaataaagatctgttgtccttttctcgcttatagctgtttaagctgtctattgtattctgttgagaaatcaatcacatctatactttgcttc

SEQ ID NO: 4650 - DNA, 200 bp, Zea mays
  Clone ID: 700431538_FLI
agagaccagagatggccgccctcgccgccgcctccacggccgccttcgccgcgaagccgcgcgcgcgcctctccgtggcctgctccgccgccaccggcgacagcagcagcgtgtcgctcgcgtcctccgtgaagacgttctccgccgcgctggcgctgtcgtcggtgctgctgtcctcggccgccacctcccctccgccc

SEQ ID NO: 4651 - DNA, 917 bp, Zea mays
  Clone ID: 700431553_FLI
cgacccggcgactggggcctgggccgagctgccggacatgctgttctccaagtcgcaggccatgccgacggccatagctgacctgctcaagcccgtcgccgccggagtgacctcgtatggggggaagctgcacgttccccagagcttctattcctggccattcgccgtcgacgtcggcggagaggtgttcgatccggagacgaactcgtgggagcagatgcctgcgggcatgggcgagggctggcctgcgaggcaggctgggacgaggctgagcgccgttgtggaaggggatctgtatgccctggagccggcgacatcctcttccggcggttgtgagatcaagatgtacgacgcgcaggaggatgcttggaaggtcgctgtgagccaggttcgtgctggggcatttgacgagtcggacagcccttgcttgcttgctgcgtttcttggaaagctccatttggtcgtcaaggatatgggtagcaggatcagtgtcgtgcagatggactctctgatgaagccagtggattcgccagccctttcggctgccacgacatgccgaaccccggatgtctcctcggagcaggcacatgtctggaaagccattgcatcgaagaacattgcagctgctgaacttgtcagctgtcaggttctcagcatctgagtttgtaaaatcgagcttctctggaatttctttgtgtaagtctgtgcagtagatgtgtttctgccacacatctgaacatcagaggctatttctttctttcagcaatgcacaattgtttgtgcaatctgcgtaattgttatctgtgtatataacatcacatagaactgaataaggttgacgcagctttgtccaatcccaaaggcaacggcgccgactcaatcaatcaccgtaccaatctgaaccctgttcattgttc

SEQ ID NO: 4652 - DNA, 888 bp, Zea mays
  Clone ID: 700432474_FLI
gcagtggcagctcggtacgctcagcatcaacatggactaaagcgtgtgatgataatagattttgatgttcaccatggcaatgggacgtcagattcattttatgatgatccagatatcttcttcttgtcaactcaccagcttggaagctaccctggtactggtaagatcaatgaagtcggacagggtgatggtgaaggcacgacactcaaccttcctctgcccggtggcgcaggtgactacgcaatgagatgtgcatttgatgaggtcattgctccatcggcccatcgattcaagcctgatataatccttgtatcagctggatacgacgcacacgcgctggaccctctggctggccttcagttcacaacaggcacgttctacatgctggcatccagcatcaagcaggtgaccaaggaactctgtggtggccgctgtgtcttcttcctggaaggcgggtacaacctgcagtcgctctccagctccgttgccgacacgttccgtgcattccttgatgagcccagcctcgcagcacagtttgatgatccagcgatacttttcgaagagccgactcggaagatcaaggaagcaatcgagaaggccaagagcatccactcactctaggctgtcagctaattttccccccaatccccagaaatcccggaggggtagccctaaattgggaaaaggtgctgtcagcagtgtgcactgcagaactgcaagatcttgtggcaattggcattttgcaggtaggtagtgcatagtttgaacttggaaggcatggtcattttaatttagccaattctcaccagaaaatggaattaccgttctctcaatactagctgtatatattgaccaaaagttatgtgctacattattaattttaaaact

SEQ ID NO: 4653 - DNA, 999 bp, Zea mays
  Clone ID: 700434493_FLI
cgacccggcgccggcgactccgcggcggacgatgacctggtcgacgtgctgctgcggctggtcgaggaggacgaggacaggccggagacgacggaggccagcaggctcacgcgcgacggcgtgaaagcgttcgtccaggacatcgtcgccggcggcacggagagctcggcggtcacgattgagtgggccatgtcggagctcctccgccggccggacgccttgcgggctgccaccgccgagctcgaccgcgtgattgggcacggccgctgggtcacagagcgcgacctcccggacctcccctacatcgacgccgtcgtgaaggagacgatgcggctgcacccggtcggcccgctcctcgtcccgcaccacgcccgcgagcacacggtggtggctggctacgacgtccccgccggtgcgcgcgtgctggtgaacgtgtgggccatcgctcgcgaccccgcgtcatggcctgacgcgcctgacgcgttccggccggagcggttcttgaacggcagctccggcgccagcgtcgacgtgcgcggcgcgcactttgagctgctgccgttcggggccgggcggcggatgtgccccgcgcacggcctcgcgatgaagctggtgaccgctggcgtggcgaacctggtgcacgggttcgcgtggcggctgccggacggtatggcgccggaggatgtgagcatggaggagctatttgggctttccacgcgccggaaggttccgctcgtcgccgtcgcggagcccaggctgccggcgcacctctacgctaatgtcacgccgccacagcaggtcgcaggctccacgattgcgagcttgtccaccaggccggagtacaagctcgtgttctgaatcattcaccgccactaaaaataaagcaggaaaaactacacttcctgcgtgctagacgtccgggcggaacacaacagtgcttgctcacgttcttctattggttgtactaaaaatatggactagcctgaactttctgaacct

SEQ ID NO: 4654 - DNA, 1649 bp, Zea mays
  Clone ID: 700434564_FLI
ctccaacctccctctccctcgcggcccgcgcggccaccagggcagccgccgccgccgccgccccgctgcgcaggggaggcctcgccacggcgtgccagccggcacggtctctggctttcgcggcgggcgacgcgcggctcgcggtccacgtcgcgtcgcgatgccggcaggcgttctccgggcgtggcacgcgggccatggccaccatggcgaagaagagcgtaggggaactcacggaggccgacctcgaggggaagcgcgtcttcgtgcgcgccgacctcaacgtgccgctcgacgagaaccagaacatcaccgacgacacccgcatccgggccgccatccccaccatccagtacatcctcagcaagggcgccaaggtcatcctctcaagccacttgggtcgccctaagggttttacacccaagtttagcttagctccccttgtaggacggttgtctgagcttcttggcattcaggtgcaaaaagccgacgatgttattggccctgaagttgagaagctggtggcggccttgcccaacggtggggttctgctgcttgagaacgtaagattctacaaggaagaggagaagaatgacccagagtttgcacagaagcttgcctccctagcagatctttatgttaacgatgcatttggaacagcccacagggcgcatgcatcgaccgagggagttaccaagtttttgcagccttctgttgcagggttccttctgcagaaggaactcgactaccttgtcggagctgtttcaagccctaaacgcccttttgctgccatcgtgggtggttcaaaggtgtcatccaagatcggggttattgagtccctgttggagaagtgtgatatccttctcttgggtggtggtatgatcttcacgttttacaaggcacaaggtctccctgttggtgcttcattggtcgaggaagacaaactcgagcttgcaacgtctctacttgcaaaggctaaggaaaagggtgtctcccttatgctgccaaccgatgttgtcattgctgacaagtttgcccctgatgctaacagccagattgttccagcatctgcaattcctgatggttggatgggcctggatattggcccagattctgtcgcttcattcaacgcagccctggatacaaccaagacggtcatctggaacgggcccatgggtgtcttcgaatttgacaagttcgctgtaggaaccgaggctgtggcaaagaagctggcagaactcagcggcaagggcgtcacaactatcatcggaggcggagactccgtcgccgccgtcgagaaggtgggagttgctgacgttatgagccacatttccacgggaggtggcgctagcctggaattgttggaaggaaaggagcttccgggagttgttgcgttgaatgaagccgccactgtgaccgtatgaagcatgctttcattttgtttcgtcttcgtcttcacgtgccgttgtatacttgctacattctcgcttgcacttgcacctcctcagccgctcgcccgaaatgtaagagaccaatgttttatagagctaatggaaatcgtttgaacaacgacgaccctaatagtatgtgatttaccgagtgatctttcctcggtaacgtaactagtgatataaaaaacattcaaaggc

SEQ ID NO: 4655 - DNA, 277 bp, Zea mays
  Clone ID: 700421779_FLI
gatcctgtacgtggcggacgtgtcgcaggcgtgcctggcgttcgcgcccaacgctgacgacaccgacgtggccatcgtcgggaacacgcagcagaagacgcacggcgtactgtacgacattggcaagaagatcgtcgggttcgccccgggagcttgctgatccggccatggtttgtgaaaaactccagatcatctgcatccaccaaagtggtcagtgtttcacaaatgcagactgaagattcgtacttcgtgtctgtaagatggtacactttgtttg

SEQ ID NO: 4656 - DNA, 558 bp, Zea mays
  Clone ID: 700421790_FLI
agctcacggcctcacctcacccacccgcccgcctcgcctccatccacagcgccacagcggccacgccatctccgtctctctgctcacctccacttcttccgttcttcttcaccgtctccgtccttgacacgggcgcacccgtccccctccgacttccccgtggcctcgtcccgatccgtagtcaactcgaccttgttcaagagggtgagcccgaaccacggcgcgcgggagggctctttttattttgacccaccggaggacagccgccccatgggctggtcgcctgagcgcgctatgtatcagctcatcgaccggcggaaagtggaaagcatgagcttctgaagttatcctctaccagagtaatcagcattacagagtatttcaaagaagtgtctttactggacagggcacctaggaaccgtctcgttgaagatattgacgataacctcccgtttttaatccatgatagggttcgcaagctactgagatctagattacttcctttgtatttcagcaagacctgtggcttatcgattcctgacaccgatttcattgaat

SEQ ID NO: 4657 - DNA, 630 bp, Zea mays
  Clone ID: 700421804_FLI
acacgttcctgcaggaactggcacgccatggcgggcttctgcactcctgctgccactgcagctgcccatgccgccctaacccctctgacgagctcaaggaagcacatcgccatgtgcctgtcccccaggccaagcggcggcggcggcatcggcggcggccagagggcgcggcttgcgagtacaggcgcagctcctcaggttcgcgcgctggcgccggcgaccgcggcagaagaagcagcgggtccctcccccgcccctctcaacgtggagtacctggccgccgagttcgccggccacggcgtcagcttcgagcccgtgggcgtcagctgcgccgtcaagatgtcgctgcgcaacggcagcgtggcgcacgtgctgctccccagcgggctcgtcacgtcctacaagcccgccatgtggcacggcacggtcacggaggttctccacacgaacgtcgccgaggtcccaggcgggcgggccgtcatccgcggcggcatgttcgtggacctccgttgcgatggctgcgacggcgtatggttgccgagcgcgagcggggcgtggtcgctccgcgacgtccggggaagcccagccacctccatagaggtcgagctcgcgtcagcggcgccggggaac

SEQ ID NO: 4658 - DNA, 211 bp, Zea mays
  Clone ID: 700421820_FLI
gatggccgccctcgccgcctcctccacggccgccttcgccgccaagccgcgcctcccacgcgcgcgcctcaccgtggcctgctccgccaccggcggcgacggcaacggcagcagcagcagtgtgtcgctcgcatcctccgtgaagacgttctcggccgcgctggctctgtcgtcggtgcttctctcctcggccgccacctcccctcccccc

SEQ ID NO: 4659 - DNA, 1302 bp, Zea mays
  Clone ID: 700421846_FLI
ggctgcattttccacaccgcgaaaggagcccatcactcggaaaccgtaagccgtgcaaacaacaggcgacgcaccggcgccgcgcgcgcacgcctatttctagctcgatcgtgtcctctcgccgctccggagtcctcaatccacacgcttgggcgagcaagccttgttccggaagcgcgcggacgacatgctgatgctgcacccgaggttggtgtcgtcgagcgccgtggacgacgaggaccactgcgagagctgcgcctgctactgcgccatggtgtcctgcgtctcgctgctgctcttcatcgtgctggctgccgcggtcagcatcccgagggcctgcgccatcgccggcgtcatgctgctcctgctggggctcgtcggctggctcgtgcccacggggaatggagccggtccggcggcgcagcagcagcagcagcagggccaggctgctgccgatcctggggcgcggcggctggtggtgcaccaccggtgcgcgtgcgggctaacggacgccgctatcgccgcgctgccggcggcgttcacgtactacgaggcgcccgcggtgaagaatggagtggggagcgaggacgacaagcagccgcgcggcagctccttgctgtgcgcggtttgcctggacgacgtgcggggcggcgagatggtgcggcagctgccggcgtgccgccacctgtttcacgtcgactgcgtcgacgcctggttgcgcgctcaccggacgtgcccgctctgccgctgccagctctccccgaggaacgacgtcagcacaaagcgggccgccgcggtcgtcggggagtcatccatcgacgcgttgccgccggtgtgagtgttactcactcatcaatcctccgaagctggccggcgcattggtaaactgtattggaccagattcttcatttcttaacaccacataataaagaaaacttcggcacaatttcgagggcgcgcagcagacgtgtgtctctactctctagtctctaggcatgagcatgagcctcaacatcgatcgagtggttccaaccacatcgccagacccgacgcttccagcagtcgcgaaagaagtagcatctcgccgatggggacgggtaccagaccgtacggaccagggagtctacaacttgacacgcttcagttctgccgctaccagacaggcaatcgagtctatcatgtcagtgccagcttttgtactgtatgctccgttgcaccacgagggtctgatgaatgttgctgccagttacattttcgtgagttgtaaaaccagaacaaatacccgtgtttcttaggaaactg

SEQ ID NO: 4660 - DNA, 376 bp, Zea mays
  Clone ID: 700421855_FLI
aaccagcaggtggtcggcgacgcgaagaagtggtgcgagatgtcgtacgacgactacgtccgcaagaagctgcggttggaagcgagggaaaggcggaggaaggcggccgaggcgcaagagggcgaggaggagtacgatgacggcatggacctggacctgaagaagatgaccgatccacgcgccccgcacaaccggttttacatcacgaaatgaaaggttagagatagttgttggttgtgcaagaggttcgattgccttggttgttgttgttgggccgccgcctctggtgctgacattccgattggtcaaacgcgggggcgtgctagccacgctcagtacaagtattcagcatggaatctccagtattttattctat

SEQ ID NO: 4661 - DNA, 501 bp, Zea mays
  Clone ID: 700421861_FLI
gcggccgtgggaggcgcgtcgttcgacgtcgtcctcgacaacaacggcaaggacctcgacgccgtcaagccggtggcggactgggccaagacggccggcgtggggcagttcctgttcatcagcagcgcgggcatctataagccgacggaggagccgccgcacgtggagggggacgccgtgaaggagagcgccggccacgtgggcgtggagaagtacatcgcggagcagttcggcagctgctgggcgtcgttccggccgcagtacatgatcggctccggcaacaacaaggactgcgaggagtggttcttcgacaggatcgtgcggaaccggccggtgccgatcccggggaacgggatgcagctgaccaacgtggcgcacgtccgggacctgtccagcatgctgtcgctggccgtggagaagcccggcgcggcggccggcagggtcttcaactgcgtgtcggaccgcgccgtgacgctggccggcatggccaagctgtgcgcg

SEQ ID NO: 4662 - DNA, 820 bp, Zea mays
  Clone ID: 700421864_FLI
cactgtagcagaagctgcggaagattggatacttgatgatatcaaaggtctccttggccgttgcaacttcagggatgacatgctggatagaaaagttcagtttttaagtggtggagagaaggcaaggcttgcattttgcaagttcatggtgactccatctactctactcatcttggatgaaccgacaaaccatcttgatatcccatcaaaagaaatgcttgaggaggcaatatcagaatatacaggcaccgtcataacagtttctcatgaccggtacttcataaaacaaattgtcaacagagtcatcgaagtgaaagatcagactatccaagactatcaaggagattacaattactaccttgagaggaaccttgaagcccgagaaagggaacttgcccgcgaggaagagctcgaggagagagcccccaaagtaaaagccaagtccaagatgtcgaaggcagagaaagccgtcaggaagaagcagaagatgcaggccttccagcagagcaagcagaaatccaagtcgcttaagaactcgaagcggtggaactgagatttttcgtcgttcgtagaggcggcgttggcgttcgtcacaatgccgaatgccatctgagacaccttgcaatgcagataccagtgtttgctactctgcctgctgtgccgtatgctataatagtcgccatatcagcagaagcactgcaaatacatcatcagaaagtagccctagtagcaatgaatgtagaagatcgaaaaaaaatactgtaactataagcaggaagcgttatgtgaccttgtacataatacatgcactttcggatgg

SEQ ID NO: 4663 - DNA, 692 bp, Zea mays
  Clone ID: 700421896_FLI
atcttcttcacgggcgcgctcctcatgggcttcgccccgggctacgggttcctcatggtgggccgcttcgtggccggcatcggcgtcggcttcgcgctcatgatcgcccccgtctacaccgccgaggtggcgcccacctcggcgcgcggcttcctcacctccttcccggaggtgttcaacaacttcggcatcctcctcgggtacgtctccaacttcgccttcgcgcgcctccccgtccacctcagctggcgcgccatgttcctggtcggcgccgtgccgcccgtcttcctgggcgtcgccgtcctcgccatgccggagtcgccccgctggctcgtcatgcggggccgaatcgacgacgcgcgccgcgtgctgcagaagacctccgactcccccgccgaggccgaggagcgcctgctcgacatcaagaaggtggttggcatccccgagggcgtgtccgacgccgacgacgtggccgccatagtccgcgccagcggcaagggctcgtcgtcgtcgcgccacgacggggtgtggaaggagcttctcatcaacccttcccgccccgtgcgccgcatgctcatggcggggctcgggctcatgttcatccagcaggccacgggcgtggactgcgtggtcatgtacagcccgcgggtgttcgagcgggcgggcatcaagtccaagaccaactcgctggg

SEQ ID NO: 4664 - DNA, 478 bp, Zea mays
  Clone ID: 700421922_FLI
gtcatctctagcaaatccgatgtgtacagctttgggatgctactattggagatgacgggcgggcgaagaaacgcagatcctcatgcaggaagctccagtcaagcatactacccatccttggtgtacaagcagctgagccagggtgatgcgaacaggatcagtgaaggtgttgatatgcacgagttagagaagaagctatgtatcattgggctttgctgcatccagatcaagccgcaagatcgaccgacgatgagcgaggtcatagagatgcttgaagctggtgtcgatggcatccaaatgcctccaaggccatacttttgtgatgaagagggtgacagttcttactctataatctctgaactggatataatagaagagtagtagtagtaaaatgcacttgtgtctatgtgctcttaatgtatcagactattaagattgcaaggttgccataagctaaggtactggttgtatgctttat

SEQ ID NO: 4665 - DNA, 639 bp, Zea mays
  Clone ID: 700421971_FLI
gcaccaacggcttcgacgacaagatgaagctggggcagggcgggtacggcgtggtgtaccgcgccaccgtgcccggggacaacggccgcagcatggaggtggccgtcaagcagttctccggcgccaacaccaaggggcaggaggacttcctcgccgagctcggcatcatcaaccgcctccgccaccggaatctcgtcaagctcatcggctggtgccaccaggacggcgtgctgctgctggtgtacgactacatgccacacggcagcctggacaggcacctgttcggcggcagggaggcgtcggcggcggcgacgacgacgacgacgctggactggaagcagcgctacaacgtggtcgccggcgtggcgtcggcgctgaactacctgcaccacgagttcgagcagacggtgatccaccgcgacatcaagccgtccaacatcatgctggactcgtcgttccacgcgcggctgggcgacttcggcctggcgcgcgcgctcgagtccgacaagacctcgtacacggacaagctgggcgtgccgggcacgctggggtacatcgcgcccgagtgcttccacacggggcgggccacgcgcgagtcggacgtgttcggcttcggcgccgtggtcctggagaccgtct

SEQ ID NO: 4666 - DNA, 541 bp, Zea mays
  Clone ID: 700421973_FLI
ccaagggcaccgtggtggtgacggccaccaacgaggccccgccgccggtgagcgggcagaagggcgagcactttgacctcaccataccggcgttcctcaagatcgccgaggagaaggccggcatcgtgcccatcacctaccgcaaggtggcgtgcgagaggaaaggcggcatccggtacacgatcacagggaaccagcactacagcgaggtgaaggtgaccaacgtgggcggcgccggggacgtggtggcgctgtgggtgaagggcaacaagcgcgtcaagtggacgccgatgaagcgcagctggggccagctctggaccacggaggtcgacctcaccggcgagtcgctgacgttccgcgtcatgaccgccgaccaccgcaaggctacctcctggcacgtcacgccccgcgactggcagttcggcaaaacgtaccaggccaccaagaacttctagggtcggatcggggagctgagccgcgcccttctttattcgtgtgattaacatattgtttattccatgattaacatattgttatattg

SEQ ID NO: 4667 - DNA, 485 bp, Zea mays
  Clone ID: 700422028_FLI
cgggcccttcgacaggcaacagagtatgacctgcgccgtcaaggcactgtccccagctccaaaggtgtcttgtcgagatcatagcatcgcagtttggacgaacgcatatcttccactgcagcgcacatcaatgagaggaaaacctgcagagtagacagcttggtttttgctgctcacgttgggagcctgcgttagcctctgaacattgctaatgggataatcaagaaccatctagcaactagcaagcaccacttattatctgccttgtgacagtggcatagcgcgtctgctcgctactgcaactctattatctgctcgctggagttacaggatatctgaagattgaaggtctagacatgctgtgagcctgtgactttgtaagctacaccggtcaggaataatgctgcgtctggatcatccgcagaaacataggggtatgtaaattgtttggacattgaagggaatgcattgatctttgcgcgttc

SEQ ID NO: 4668 - DNA, 1029 bp, Zea mays
  Clone ID: 700422062_FLI
gccctcatgaatctggccgccttttcctccacccttgccacgctcccctggtatgagatgccatcaataaattcctccgcaactttctcgtcctcactgctccgccgctcgctctgcgcgtcgctccggacgatctcccacatggcctccgccgccgcccccacctccgcgcccgtcgccaccaccgagaacggcgccgcgaaggcgatagagcagcggcccgtgcaggtcgcagagcggctggaaaagttcaagacaacaattttcactcagatgagcatgcttgccatcaagcatggagcaataaaccttggccagggctttccgaattttgatggcccagactttgtgaaagaggccgcaattcaagctatcaatgctgggaagaatcagtacgcaagagggtttggtgtgcctgaactgaactcggctatcgctgaaaggttcctgaaggacagtggattgcaagttgaccctgacaaggaagtcactgttacatctggatgcactgaggcaatagctgcaaccatactaggtctgatcaatcctggcgacgaggtgatactgttcgccccattctacgattcatacgaggctacactgtcgatggccggtgccaacgtgaaggccattaccctccgcgctccagatttcgcggtcccgcttgaggagctggaggctgcagtctccaaggacacgaaagcgataatgataaacacgccgcacaacccaaccgggaaaatgttcaccagggaggagctcgaatccatcgccgccctctgcaaggaaaacgacgttttgctgttctcagatgaggtctatgacaagctggtgtttgaggctgaccacatatccatggcttctatcccgggcatgtacgagaggacggtgaccatgaactctctggggaagacgttctctcttacaggatggaagatcgggtgggcaatcgcgccgccgcacctgacatggggcctcaggcaggcgcactcgttcctgacgttcgccacctgcacaccgatgcaggcg

SEQ ID NO: 4669 - DNA, 891 bp, Zea mays
  Clone ID: 700422109_FLI
agaagatagggataaaagctcttctacttgatcaggtgaccagcatccaacctacaagctttgcctgtgcaattttttccctgcactgtacatacttgacttgttgcagttttttataaaatgagcagagcttcatatcaggcattggcaattggattgcagacgaggtgctttaccagtcaaggatccatccattacagattgcttcaaatctacctagggagagttgtgaagcactgcaccagagtatcgaagaggttgtcaaatatgctgtcgaagttgatgctgacatggaccgctttccgaaggaatggttatttcatcaccgttggggcaagaagcctggcaaagtcgatggaaagaaaatcgagttcataacagctggtggcaggaccactgcctacgtgccgcaactgcaaaaactggttggaacccagtccagcaaaacgatatccgtggccgagaacggtgatgccaaggatccagggaccgagggagaagatgcagatgttttgaagccaagaaagcgagccgcgacctccagtgctgccaggggacagcgaaacaaagataccgccggctcgagaaaagcaagagtaaatggcgccgatgctgaggcagctgaaccaacaacaggtatcgtcggaagcaacggtgagcaagcttttggccaacccaacagtgacgctgtcgataaatcagatcgggctacaagacgatcgtcgaggaaagtgaaagcccgcaagtaaatctgaacaaggtagccagggatctgtccatggagtttcattatatgtgtactggccagcgtatttgcgcctctgagtaatgtatcttaggaacagaagattatattcatgctgcatattcctgggggattcgctccggacc

SEQ ID NO: 4670 - DNA, 779 bp, Zea mays
  Clone ID: 700422128_FLI
ggccaccgacgtgctgcgcgcgcgcaacgtcctcttgccggcgccgccgcagaggatccgggcggcggcggcggcgcgccggagggcagctggtagcgacagccaccaccccggcgccaccgccaccaggaggaggtcgccgccggccgggacatcgtcccccgcggcggggcgaagacaccccggcggcagaagggcgaggcctgcggcggaggtgtacgccggcccatcgttctcgacgtcccccgacccgagcttgctgccgctaccgcagttccctgccaggaaggccgtggccgtggccatgacgaccgccgtcgacgccgccgccgccgcgacgcgcgacctcaggcttatcctgcggctggagtagccatcaggacacatagctcgtctgctggctctaacgctggcttcgatttctcttcttaattcttccttctttattagctcctactcctagtccttgtcgacgcatcatcgatcgagctgcacgttggttctggctgctctcctggtatgggtcccacgctgccgcggcgaggcttccggctcagttttattgtgtggtcggcggcgaggcacgcggcggccatgggatcccaccgcgacggcggtgtagaatgatagcagctgtaatacactactctgtactgtgatgtgcaagtagatagtactagttactagttagccagtgtagggttcctccgtgtaacaagtcatcagcgtgtgatcctcttcgtctgttcatcaatatacacatttctatatgtttcaac

SEQ ID NO: 4671 - DNA, 1116 bp, Zea mays
  Clone ID: 700422155_FLI
tctcggagcaaaggcaatccagcaagagtcgctcctttcccttttcgggatacagccagcagaagcaatccggctaacaagtttcttcttcttcttctttcctggtgacggtcgcagggctcaccgaagtgacgatggcgtttgcggtctccgacgagctgctgggcaccttcgtgccgattgcggtgtactggctctactcggggctctacgtcgtcctggacgggctggggatggacgactacaggctccaccccaagggggaggaggccaggaacatcgtttccaggtggacggtcgtcaggggcgtccttgttcagcaggcgtttcaaatcgctgtctcccttcttctcttcacggttcttggtgatgataatgggactgtgaggaagcagcctccagctttggtaatggcattgcaattcctcattgcaatgtttgtcatggacacatggcagtacttcatgcacagatacatgcatatcaacagattcttgtacaagcacgtccactctaagcaccacactcttgtcgtcccctacgcctttggagctctttacaaccaccccctggaggggctcatcctggacaccgtcggcggcgcgctctcgttcctcatctctggcatgaccccaaggattgggattttcttcttctcgtttgcgaccatcaagaccgtcgatgaccactgtggtctgtggcttcctggaaacatcctccatgtattcttcagcaacaacagcgcttaccatgacatccaccatcagctctacgggaacaagtacaacttctcgcagcccttctttgtcatgtgggacaagatcctcggaacatacatgccttacactctggagacacgcaagggaggtgggtttgaggcacgcccggttaagctcgaccaagcacagcagatcaaggctgattaagcagcgcggtttctcctgtttatctactacttcccctgttttttttccttctaactgcatttgtactgtagaggtattttcctgtccatatagtaaaatcctttaggcagatgacatgttgtacccaaaagatgtagcaaatgaaacatcttgctaatgaagatccattggggtttgtttccaaaaaaag

SEQ ID NO: 4672 - DNA, 561 bp, Zea mays
  Clone ID: 700422165_FLI
ccaacttctctccctctccctcgcctgcctgccgttccgcgtttgaccaactcccccgcaccgtaaccctagcagcagatcggccatggagagctgggcgacctgggtggggacaagcgtcacctccgccttcttcgcctccctcgagcgctgctcctgcatcaacctctccaccgacgacgacgacgacgacgaggaccacgacgaggccaaggaccggcccctcatcctcgccgccgccccacgccacgactccgccgccaagcccgatccagactccgccgccgaggaccaggacgaccagaagcaagagcagccgccgctgccgcccgtatgaatcgaacccgattccttgcttgtactagctgctactgctgttatgtcgccaaataaagtcgtgtgtgcgtgtgcagtcagtactactgctctgctgctactatcctagtcctagtatattagtatattatacagtcctctgtgaaatttgaatcgactcgaaaaccaaaccccaccaacatgagcttgttaatatttgtcctcccgaatcaaccagcgcttgtt

SEQ ID NO: 4673 - DNA, 1325 bp, Zea mays
  Clone ID: 700422181_FLI
atcgactccagccagccgcccaaaaatccaggcgcaaatcacaacctcgcatcctcttctgtcccgtctccagctcttcgttcgttcccctctcgccgcccgtctcccccgcggtcgaggagccgccaatagcaaggagagggtttcctcctccctccacggctccaccgagctccccgatccctccgccccaaatcccacacacccggttggccaccgcctcgccatggatttggatctgtggatctccaaggtcaaggagggtcagcacctcgccgagcacgagcttcagtccctctgcgaatatgtgaaggagatcctcatcgaagagtcgaacgtgcaaccagtgaacagccccgtgacggtttgcggtgatatccatgggcagttccatgacctaatgaagctcttcgcgacgggtggccacgtcccagagacgaactatattttcatgggtgattttgtggaccgtggcttcaatagtctagaggttttcaccatcctattgctactaaaagcgaggtatcctgcacacatcacccttctgcgtggaaatcatgaaagtaggcagttgacacaggtgtatggtttctatgatgagtgtcagagaaagtatggcaacgccaatgcatggaggtactgcactgatgtttttgattaccttacgctatcagcaatcattaatggccaagtcctctgtgttcatggtggtctttctcctgatgtacgcactattgaccagatacgaacgattgatcgcaattgtgaaattccccatgaaggccctttctgcgatcttatgtggagtgaccctgaggagatagagacatgggctgttagtccccgtggagcaggttggctgtttggatcgcgagtaacagcagagttcaactttgttaatggtatcgagctagtttgccgggctcaccagctggtccaggaaggcttaaagtacatgttccaggagaagggccttgtaactgtgtggtctgcacccaattattgctacagatgtggcaatgtagcttctatattaagcttcgatgagaagatggaaagagatgtcaagttcttcacagagacagaggaaaacaaccagatgcgaggcccaaggactgcagtcccatatttcctctgacttcaattgtacattttagaagtcaacatttaaatctgtaagggctaaagatcagtcagatgtgtttattattgtaggttcagatcatagtgcaatcttatgcatttgatttctctttttcttttaaccacatgtacaatagaccatccggagtctcatgctcctgtattcgttcagtgacactgtc

SEQ ID NO: 4674 - DNA, 407 bp, Zea mays
  Clone ID: 700422196_FLI
ggcgaccaggccaggccgccgtgacctcagtgtaatagtgagctagccgccgcgcgtcggtgcaacttggcagcgctatagcctcggctgtcgcgcttttcggatggcacccatcattccaactcccacatggacgggaggggagggtggttgagaatgagaaggagagctgcccgcactggtggtgcacgcggctcgctttcgcgttctgttacgactcgttgcgttggtggacaaccgcaatgaactgcatcgagggacagacgaacgcgatataataagagagagagagagagagagaggagagcagggcagcgctacctaaatttgttcttctaggagtactagggtttcggtggcgttgtgttgtccagcatatctttctccgcaaatgccatgtcatgtgg

SEQ ID NO: 4675 - DNA, 629 bp, Zea mays
  Clone ID: 700422283_FLI
ccgccacaagccacagccgctccgagtcctgcccgactgctccacaggccactcgtcaccccaaaccaaaacgaagctgcgggcctgcggcggcagcaacagagagcagagatgctgcaattcccggcgctgatgcggcagtggccatcgccgccgctgatcccggcgtccacgctgctccccgtgccggccacctcccaggaggacgaggtcctcctcgccatggccgagtccgacctcgaggacaagttgaatgagatccggaagaccaacagccacctgattatcatcgggaagcccacaggcgacaccaaggaggagtatgacgctgaggtggaggacgacgatgcagacaacgtcgaggagtctgatggcgatgacttcgaccaggagactggttgacccaggcggctccccgctccccccatgcttcgccggcatccttgagcgtcgccatccccactgcccagtctgtatttcgcaatccctgagtcgctcctgctatctagatgttctgtgttaccctattctgctgctgctgtctgttcccggaatttgagcatgtccttgtcatgtggacctcgtctatgaaactactagatgattaatcgatccaatttaaacgctgt

SEQ ID NO: 4676 - DNA, 856 bp, Zea mays
  Clone ID: 700422348_FLI
gcgacgcccgttgccttctcaccacaaatcctccaatttcttgtcttctccgcgaaatgttcctctgtctgtcgtgtatttgttctggtcgtttcccgattcggtagttggcttggggatttcactgcaagtctagggattttctgtagggaagttgatcgagaagtcttggtagacatggagcagatccagtactccgagaagtactacgacgacacctatgaatacaggcacgtcgtcctcccgcccgaggtcgccaagctcctccccaggaacatccttctctccgagaagcagtggcggttggtgggtgtgcagcagagccgcgggtgggtgcactacgcgatccaccggccggagccgcacatcatgctgttccgccgcccgatcaactaccagcagcaggaggaggaagcggctgccgcgcatgtgctgcccaagtgaagcctctgctggcgaccaggaatgttaaaaacccctagccctcttttcatctctaaaaggggcgtcgctgttgtgttgattaatccctctggctgttgattggaaacttgggatctagttgggtcgacttggtgtgtgcgtggcgctctgtttgtgctgacatttaatctgtgcgatttgatctttgtgattgtggttctggttagtagcgctggaatcatggttaatgtgttctacgtgagattaaaattgtcaccacgcatttcaaagttcaaacatgctgaggaagaaactatcctaggatcttggctgtcattgagggcgcaatatatcctttgacgatatggtacatctggatatgtggtagtgctggaatcatgtttaatctgttctatgtgagattacaattgtc

SEQ ID NO: 4677 - DNA, 1169 bp, Zea mays
  Clone ID: 700422358_FLI
gtttatcatagagatttgaagcctcaaaacttgcttcttgactctcgtggaaacttgaaactttctgattttggacttagcacattgtctcaaaatggagtaggccttgtacacacgacatgtggaacaccaaattatgttgcacctgaggtgctaagtagcaatggatatgacggatctgcagcagacatttggtcgtgtggtgtcattctctatgttttaatggctggttaccttccctttgaggagaacgaccttccacatttgtatgaaaagataactgcagctcagtactcatgcccatattggttctctccaggagccaagtcattgatccagagaatacttgatccaaatccaagaactcgtatcactattgaagaaataagagaagacccatggtttaagaagaactacgtaactattagatgtggtgaagatgaaaatgtcagcctagacgatgttcaagctatttttgacaatattgaggacaagtatgtatcagacgaagtaacgcacaaggatggtggtcctcttatgatgaatgcctttgagatgattgcactatctcaaggtttggatctctcagcattgtttgataggcaacaggagtttgtcaagcgccaaacacgtttcgtctcaagaaagccagccaagactgtagtagctacaattgaggttgttgctgagtcaatgggtctcaaggtccactcccggaactacaaggtctttgaagttgctccttctctgttcatggtcgatgttcgaaaggttgccggtgacactccggaataccacaggttttacgagaacctatgcagcaaactttgcagcataatctggaggccaaccgaagtttctgccaaatctacgccgctgaggacgaccacctgctagccgcctagcccagcactgagctactgtagtggcatcaccaagagacgtgattcgtagccgtcagaaagggagagcttctgttgaatctagcattgctcgtggagctgggattcatgttgaccaccaggtgtttgtatattgtagtaacgctattgtagatagtctgtatagctccatttgtgcagttgtacgtagcaggaatatgttaaaaaacaacttttaatgtcaggtataatcggtttgcatccaggaagcatctccaacagtgtctt

SEQ ID NO: 4678 - DNA, 862 bp, Zea mays
  Clone ID: 700422382_FLI
gcaccagggagcaaatattcacgttttcttaggcaggaatttgatcttcgagtggctttgcctctgggtgtgctgaatggtgctctcaacgccggagtggctgcgggagtcatccatccattggaaaggggatctgcaggatctgtctcaccacttgtagaaagatttaacttgggtggtaatagggctctcgtgtgccgcttgggtggaccatcttcactattaggcttcaaaacaagagggctacgggcagcaacagagtccagaacacaagaccccaacactcctggcaatggcacttccccttcccctgagctaaatggtcttggaggtgaagtagcggtgacagccttcgccgacctgtcatttgatctgcctctgaagccgctcagggagctgggaatccatggtcatgcttttgtctgtgctggaaatcttggtagattaacggagtgtgatctgcggaagttccctgttactgaattcctgcagacgttcagaagttgtgcaggatggggcgtagttgtgccgaccagactgttccgcgtagagatgaattactgctacatcctaaaacagcttgatcatgacggggggaagacaggcatacagttgaacttctcatcctcctaatttgtaagatgaaaccaaacagagccctagtggtaacaaagctccttgtaaacatctcaatggcaaacctcaaaaaaccggatttattaataaaaaataaggtcaaaaaccggatgtgaaagattacgtaaaaaaaaaaccggagttctttagactttcatggtccactgtctgcgtttgaatgacagccagaaactcggctttgcattggggatcttgtatgttgact

SEQ ID NO: 4679 - DNA, 698 bp, Zea mays
  Clone ID: 700422432_FLI
tcgatattgatcaccactggctcttgcagggatggaaaggccgcatcctctatgccatctcgacatgggtggcaaatgatgccccctcttacttttagctgtttttttgtgactcacttgtctacaactttaggggccagtttggtacggcgcgtgcggcgccacggcgcgcctaagctgcggcgcccgaatcggccgccacacctgcggcgggaaaactatggcgcgccgtggcggcttagtccacgcaccaaacaacccctaggtttaggtatgtcatctagatatatctagtgacaagcgtgttcttggcccagttaatagccatggttacttggactctgcagtatgcctagtgccctagtgagaattcaacatgtacctgttctttccaagggtacattcagcttctgtggaacatgagtgacacacgggggatccagaagtcagaaggcataccgaaatctgtcctttgatttaatgtggattatatagatgctcatcactcagtcatgctgttgcatggtgctaaatatgatctagatctaggtcctggtctggataatgctctccacagcatctgctgtgcgtgtgacctgtgatcagttcagtcagttgatcaggttgtaaatgacacttgttcctctgtttccggcgcttactgcgctgtttcagacttaaccatggctattatgaag

SEQ ID NO: 4680 - DNA, 874 bp, Zea mays
  Clone ID: 700422477_FLI
caggtacaaggagaaggtcatactcaagaagatcaaggtcatgacggtgggggcgaaggagtgtggggactacgaggagtggttcaactaccgcgtgtcgagagcggcgccggagtcgtgcgccgacttcctcgggagcttcgtcgccgacaagaacaaggcggagttcgtcaagggcggcaagtggctcgtctggaagtttgagggcgacaggacgctggccaattacctgagcgagcgcggcttcccgtccaacctggagcgtctcatgttcgggcgcgtgctgcagggcctgggcccgctggagcgcgaggcgctggtggtgaagcaggtgatgcggcagctgatcacgtcgctgaagcgcatccacgccacgggcatcgtgcaccgcgacatcaagccgtccaacctcgtcgtgacccgccgcgggcaggtgaagctcatcgacttcggagccgccaccgacctccgcatcggcaagaactacgtgcccgaccgcgcgctgctcgacccggactactgcccgcccgagctctacgtcctccccgaggagacgcccgagcccccgccggagcccatcgccgccatcctctccccgatcctctggcagctgaacagcccggacctgttcgacatgtactcggcggggatagtgctgatgcagatggccataccgacgctgcggacgcagtcggggctcaagaacttcaacgccgagctcaggtccgccggctacgacctcaacaggtggcggcagagcgcgcggcggaggcccgacctgcagatcctggacctcgactccggccgaggctgggacctcgccaccaagctcatctcggagaggggcgccaacggcggtggccgcctgtctgcc

SEQ ID NO: 4681 - DNA, 1135 bp, Zea mays
  Clone ID: 700422519_FLI
atccgagttcgtctcaaaggcatcgcctttcttcctggcagcagagagagagatggcatcctcctcgaccacgaatacatcagatggtggtgcaaagtcatcgtcttgcccgagaggacactggcgacccggcgaggacgagaagctgaagcagctcgtcgagaagtacgggccgcagaactggaactccattgcagaaaagctggaggggagatcaggcaaaagctgccggctccggtggttcaaccagcttgaccctcggatcaacaagcggcccttcacagaggaggaagaagagcggctgctcaacgcccaccgcgcccacggcaacaagtgggcgctcatcgcccgccacttcccgggccgcacggacaacgctgtcaagaatcactggcatgtcgtcatggcacgtcgcagccgcgagcgctccaggctccttgccagggccgcgagctcatcctcctcgccgtccaccggtgggtacctcttcggcgctgtcacgccggcgactagctcgctctgcttcggcttctccaagcttggtggtgccggcagcgccagcggaagcggaggcctgttcaggtcgccggtgcctgcacctcctacttcactgttcaagaactttggcacagccactgcaagtaagggcttgctggggtcgagtttcgaggcgtcaggacggtacagctacagcggcaagcagccgacggcacctctctccatcaccttctcctctccaagagaagcgctaggcatggatatcggccaccatggccgccatgagcaccaccaaaaggattatcacgccagcgaaagcgccgatgagccactgaagaagaaggacgtgccgttctttgatttcctcggcgtcggtgtgtcctcgtaatcaataataatattgcattcctgaaataccaatcgatgttgatcaatcaagtgtattgatcagtgtttgttttttttaattattagggcgaactgcatgcggtagtagctgacaagtattcagggttagagttcatcgtcattgatggttacagtgttctgatcatcatgtgctgattcatcagtcaaataaggctccagacacatggctatttaatatttatttaaaagtttttttactagcctgctg

SEQ ID NO: 4682 - DNA, 1043 bp, Zea mays
  Clone ID: 700422540_FLI
aaaagagccattgcactcctggttgtttaactcatatgtatccttttgcagggatttgccattggttcagctgctcttgtgtctctggcgctttttggtgccttcgtcagcagagctggagtgaaggttgtcgatgtcctctcccccaaggttttcattggtttgattgttggagccatgcttccctattggttctctgccatgaccatgaagagtgttggaagtgccgccctaaagatggtggaggaggtccgcagacagttcaacaccattcctgggttgatggagggaactgccaagcctgactatgcaacctgtgtgaagatctccactgatgcttccatcaaggagatgattcctcctggtgctctggtcatgctcactcccctcattgttggaaccctcttcggtgttgagactctctctggtgttcttgccggtgccctggtttctggagtgcagattgccatctctgcttccaacaccggtggtgcatgggacaatgctaagaagtacattgaggctggtgccagcgagcatgccaggaccctcggccccaagggatctgactgccacaaggctgctgtgataggtgacaccattggtgaccccctgaaggacacctcgggcccgtccctcaacatcctgatcaagctcatggcggtggagtcccttgtgtttgcccccttcttcgccacccacggtggcctgctgttcaagtacctgtaagggccacaccaatcatcacagcagaaatatacgaccgaccgaccgtggacatctcgaataactcctgccaaatcgccagttcatgtgtattgtgcgctagccgcctagctgcactgctgtttttttggtctcattgttcgtattttctccttggcccctccccctagaggcgttactgttagccttactcttactccctgtagctgcacgtagaagagaactgttgtcctgcaggtctggcaaattttcccagtctcttgatgatggcgatgatgttgaaatctttgaacaatgatacatgattgttgcatttt

SEQ ID NO: 4683 - DNA, 479 bp, Zea mays
  Clone ID: 700422554_FLI
tgaacgtgtttcagtgatcgaacgcacaaatttaagatatctatctcaactgccagaaccagttgacttggtgacactagacctatcatttatctccattctcttggtcatgcctgctgttatcaaagtaatgaaaacggattctacattgataacacttatcaagcctcaatttgaagcacgtagatcacaggtaggaggtggtgggattgttcgagatcctttggttcatcaagaggtactggatagaataatttcaggcgtggaagaatttggattctgcaataagggttggatcgaatctcctataaagggtgcagaagggaataaggagtttcttgcttgcttcaacaggatccaatatcagagtcacagccagaggcaaaggaacctgtaacctaggatgtcagcagaacctgtaacctaggattatcaaccataacctctgatattcctgatattcttagactgtctccaac

SEQ ID NO: 4684 - DNA, 556 bp, Zea mays
  Clone ID: 700422623_FLI
aagccaaagaaggccgcggcgctgccgctgccggagatgatgcagcaggagatcatcccaccgctgaaggatgccttggaggcggaggacgacgtgtcccaggtgcagctcgccttccaaaacaacacgctggagggatccttcataaagaacgacgtcccttattatttttgggccttctttccaaaaggagacctcacaggaccgaagggctttgcgctatcgtcctacagcaacgaagtgagcaccatcgagccgttcctgatcgatgagaagaggataacggccaagtacgtggtgttctgggtctacaagaggctggctgggcaaggcatccttccggtctggaaggaagaggagggggaggaggaggccgcgaagtagtaggttgcgcaggcgcatacgcatacacatacacacacacagggtgctgccgtgaacatacacatgtaacgctgtaaagttcatctgctagtaaaagttcatctgctgtgaacatacacatgtaacacagatacttcagtttcagcagttaaaaacctaccgtcgttaaaaa

SEQ ID NO: 4685 - DNA, 830 bp, Zea mays
  Clone ID: 700422632_FLI
cgactgaactataatcaagatatccataggcagaggattattaattggatagataacactggaggactttgtgccgcatttgatttcacgacaaagggcattcttcaggaagctgtcaaaggagagttgtggcgtttgcgagattcagaaggaaaaccacctggtgtgatgggatggtggccttcaagatcagttacatttattgaaaatcatgacactgggtccactcagggtcattggccttttccgtcagatcatattatggagggatatgcttatatactcacccaccctggcatccccacggtgttctatgatcacttctatgaccagggtgtgcctctccatgacgaaattgctaaactgatgcaaatcagaaaatgccaagatatacatagccgttcatcaatcaaaattctggaggttgggtcagatctgtactcagcaatcatcgacgataagttgtgcatgaagatcggggacggctcgtggtgcccaagtgatccagagtggaggctggcagtctctggtgacagatatgctgtgtggcacaagtgaagcatataagtgccctcgatacagtttatttctgctctcaggaacaggagtaattagcatgttagctgaataacagcacggtaaaacatgccaaaaatgaccctcttcgaggttttacctgtacaagaggagtgcctaaatgcaatgcttaattagaaatacgtgagatcgtgcggctggtcccgaggtgagacatacattttgctaatcgcaacaactatggattacctgcaaaagaaatatatatagggcatgtgatgtctctgtggaat

SEQ ID NO: 4686 - DNA, 1651 bp, Zea mays
  Clone ID: 700422775_FLI
cttttttcccttccccttcggcgcggcaggattttctccatctgctttccccatttccgccgtattttattcgatttcgaggtcggttttctgttgcacagggagaaaggtcacgtccaaccgccgcgaactgcgcatgtgaactgtgcccgacgaggcgcgctgcggcacgggtgaggggagctgcgccggagcaccagccctagggttttcaccgccctgccgcgagatggacgtccgggacctgcaccagcagccgcagcagcagcaggctccgccgcgcgtgggatccccgccgcaggccggcgccggcggtgtcatgatgcagcatgccgccgcgttcggcgcggcgccgccgccgtccgggttgccgcaggcctcggcggccaacgttatgcacgggatgtcccttgcctttaaccctatggcttcgccggacgcctcgtcacccataagcagcatgaagattgtggacatgccgctggggtctatgtaccgccctgattccggcgcgacgggcttgcagcagcagcagcccggctccggtggcgttggtgccagcggtggtgctatcgtcgccgtcagcggcggggaccttgtgaagaagaagagggggaggccgaggaagtacggcccagatgggagcatcggcttgggactcaagaccgccgcggcgggggtcactgaagcgacgggtgcccagtccggtggaggcgggtctacccctaaccccgacggcaagcgtagagggcgtcctcctgggtcaggcaaaaagaaacagctggatgctttgggatcttcggggacgtcgtttactccccacataataactgtgaagcccaatgaggatgttgcgtccaaaataatggctttttcccaacaaggcccgcgcactacatgcataatttcggcaaatggtgctctgtgcacggcaacactgcggcaaccagcaacctctggtgggatagtgacatatgagggccacttcgatatactctctctttcgggctcattcttgcttgcagaggatggtgacactcgcagcagaacaggtggtttgagcgtggcactggctggaagtgatggacgcatagttggaggttgtgttgctggaatgctgatggcagcgacacctgtgcaggttgtagttggcagtttcattgctgaagctaaaaagccaaaagaagagcaacccaaacgtgagccaacatcggtgccaccgcacacagctgtctttggggcggcctcgactgccagccccccatcggatggcacatcaagtgagcactccgatgatcccgggagccccatgggaccaaacggcagtgcattcaccagcgcggggcttcccctgcactccacatatgctgcagttggttggtcactatcagaggaccaaagccgttatgatccagatctaaagatgatgaccgactgatgggtgccgtttcgcagcttccttgttagcagttgacttagctgagtaggctcaataactaaggaatcctgagagtggtaaaaccttcaggaaggagtagatcacgagtaataattagtaccagtgcatgcctttgtcttgttatatcgtagttagcagtttgtatttgtatggtttcactgtcagaaagtctatgcagcattccttctggtt

SEQ ID NO: 4687 - DNA, 853 bp, Zea mays
  Clone ID: 700422814_FLI
ctctcggttgtggccgtacagacgggcccgcagaagccgtctccgtcgtcgtcccaggccgccgcggcggaggatgaggcggatgcgctgcagaagcttctgaagagggagtacaagtacgggttcgtatccgacttcgagtccttctccatccccaaggggctgtcggaggccaccgtccgccgcatctcggagcttaaggcggagccggcgtggatgctggacttccgcctcgccgcctaccgccgcttcctcaccatggtcgagcccacctggaggacaacgagtacgcgcccgtggacctgcagtccatttgctactactccgcgcccaaaaccaagcccaagctcaatagcctcgacgaggtcgacccggagctgctcaagaccttcgaccgcctcggcatcccgctcaccgagcagaagcgcctctccaacgtcgccgttgacgccgtcatcgactccacctccatcgccaccacccaccgcgaagcgctcatggccaagggcgtcatcttctgctccatctccgaggccatccgcgagtacccggaccttatcaggcgttacctgggcagcgtcgtaccgccaggcgacaactactatgccgctctcaactcagcggtgttcagcgacgggtccttctgcttcgtgcccaaagacacagtctgccccatggaaatctcgacctacttcaggatcaacgacaaggagaccggtcagtttgagaggactctgattgtggccgatgagagaagcacagttagctatttggaaggctgcactgcaccagcttacgactcgaatcagctccatgctgcggttgtggagcttgtgtgtgaggagggggcaga

SEQ ID NO: 4688 - DNA, 850 bp, Zea mays
  Clone ID: 700422826_FLI
aacaagtttggggctggcccaaccctcagcatacaacaggcacgaaacctcgcgccgccaccaaatctccagcgagcgaagaggcggctccggcgagtgcgcggcaacgacgaaggcgtcggggccagtggcgagaggaagagcatgctgaagttcctgtccaaggtggtggtggagtactgccctctggacccgcggaaggcggcggcagtggagctcctcgcgcagtgcaacggccgcaaggccaaggactccaacccggcctgctcggtcgagctccgccgcctcccctccccagctccgtccacggacctcaagtcgcagccgactctcccgcctccgagggtcctcgtgacctacttcaccggagctgaagaggccattgtctttgctgagggagctacagcgcagggcatccgggaccagatcgtcgcacggggccggctcatcgatacggagaagatgttccgcgacggcggggagaagtggcccgtcgtcatccccgaggaggagcttggcatgtcgttccctggcatcaagccaaagaaagccgaggataagccccaggccgagtgaccaagcaggagttttctactttatatatcatggttaactatggacatttgtacactcacagatgctggaagaaaattttctcttgccgctaccacttagaatgtgtgttaccagtttgaaagccatgtctggtccaatttttgttttcccgcattgacatatgcttccagttggtgctcttaactcgtacaccattttggctattgtcagcgtaatattctgtggacaaatttgactcagaataagcaacttcacaatatcgcagtcttaaatt

SEQ ID NO: 4689 - DNA, 329 bp, Zea mays
  Clone ID: 700422831_FLI
atacagaaggatacggtcacaatcttaccttcctcactataaagggagccggacatgctgtgcccgagtacaagcccaaggaggctctcgcgttctacagtcgctggctggcaggagagaagttctaagaagaccaggaccattacagatttcacaagccttcagttattcgtcgctcatcggacaattactgtgtgcatggactcagagtagatgtatgcagatcagatccgttcactcggctgtgtaagcctctgtatacagctgaagagatttttaacgtgggatcttcacctctactcaattaaccatgggtcagatccattggc

SEQ ID NO: 4690 - DNA, 964 bp, Zea mays
  Clone ID: 700422855_FLI
ccgtgctcggcggctgccacctgtacctgctcggcggcagggacccgcgcaggggcagcgccatgcggcgggtggtgttctacagcgcccggagcaaccggtggcaccgcgcgccggacatgctgcgccgccggcagttcttcgacgtgtgcgtcatgggcaaccgcctgtacgtcgcgggcggtgagggtggcggcggcgggctcaggtccgctgaggtgttcgacccggccaagaaccgctggtccttcgtggccgagatggccgcgccgatggcgccgttcgtcagcgcggtgcatggcgggcggtggttcgtgaagggtattggcgcgcagcagcaggtgctaagccaggcatactccccggtgtctgactcgtggtccatcgtcctcgacggcatggtcaccggctggcggagccccagcgcgtgcctcaacggccggctctatgctgcagagtgcatggacggatgccggttgagggcctacgacgaggccgtggacgcgtggagcacctgcgccgacagcaagcagcaccgagggagctcccaggcggctgccattgtcgccctccacggaaggctcttcgtcgtccgcaacgacatgagcgtctcggccgtccaggtggcggccgaggcgggaaagcagaggtggcagaccctcgccggcaaagcgcataccaagagctttgtcacgggcctgttgtccaacctctctggtcgcagccgcgccaagaacaacatcctccattgccaagttcttgaggtctagctgtcttgctccctgatgagctatgcttataagttactaaaatcacgcaatgaaaaagtacgtgagaaatctccatgtctgctcaagagtgctaattaaataagcgagaattacaggcatctgaagaacgcgcgtgatcgttgtataaaactacaaatacacagtttatatggtatacagtatacagatttatt

SEQ ID NO: 4691 - DNA, 375 bp, Zea mays
  Clone ID: 700422954_FLI
gatttcgcgagcggcgagataaagcaagcgtcgacgcttttcgactgcgacgtgaccctggacgactatctgctgaagagctactacaagacggcctccctgatcgcggcgagcacgaggtccgccgccatcttcagcggcgtgggcagcggcgtgtgcgagcagatgtacgagtacgggcggaacctgggtctggcattccaggtggtggacgacatcctggacctgacgcagtcggcggagcagctcgggaagccggcggcggggagcgaccttgccaagggcaacctgacggcgcccgtgatcctggcgctgcgggaggagccccggctgcggggcatcatcgagtccgagttctgcgagcccgggtccctg

SEQ ID NO: 4692 - DNA, 596 bp, Zea mays
  Clone ID: 700423113_FLI
atcacccatggccgttggcgttgtcttccggattttgggccactacactggtcagcctcttcttggagctaaagttgtagcctccatgctgatgtttgcgacggtcgctgggattctcatggcactcttcttgaacactgctggcggcgcctgggataatgcaaagaagtacattgagactggcgctcttggtggcaagggcagcgagtcccacaaggctgcggttactggcgacacggttggagacccattcaaagacactgctggaccgtcgctgcatgttcttatcaagatgctcgccacaatcacgctggtcatggctccgatattcttgtgattaaccaaccactcatcaagcttgctattaaccctgcggagatgtacctatgcgaccaggtagatgaggtgtgtgtgtgtgtgtgttacctgcatgtgatgatgtaacggtccaatcggtttgtgtcacgacatgctgtacccagagaaagaagcggcgatctatacccatgtctcacggtagatattatactgatgatgcaaatgccgtgttttgttactgaattagtggcctgaaagttgcgcttgtttattttttt

SEQ ID NO: 4693 - DNA, 1126 bp, Zea mays
  Clone ID: 700423145_FLI
gaaatttgtcaaaatgggtcgccctcctcgcgacgcagtgcgaccacgccgccaccttcgcctaggaaccgcgaccgctccatgaagaggggatcagatttgctcatcgcgacctaccttggggattcattttgtgttgttgggttggatggggagaagtgtcgagcacatggtgcttgcagtttggtttgtttgtgttgacgatttctctgtggggcgttgcagggaagatgggggtcgaggagaggcaggcgcagaagagctcctaggaggagcatcccaagaacctcatcgtcgatgccatgatgctggactcccgcgctgtcaatctcgacaaggggccaccctgtcgctctggacaagggggctgccctaaggtcctgtttttgcttccttcagatgaaggaacatctatcctggagcttggtgctggaataggttgtttcactggagaactcgctaaaacagttaggaacgtttttgcactagattttattgaaagtgcgattaaaaagaatgaaagcattaaggtatgcagttggatattgcattcagagaggctcaagcgatagctgcaagtagttctaccttgtgcccagttttcttgttcttttagaaaattcttctgctacctatacctggatgttactgatagcttacactaatggaagtcaaaatatcgtgggacatccagctgagcgagaagatagtgttgcatcaagttcagtttttttgtcatcaagttgtaggctgtgtggtacatctagctgagtgagaagacaatgctgcaccaagcgagaagatagtcctgcaacaagttcagtattttatctcgcagctcttgcgatcggcttcctgctggtgacctgctaccttctcttgcagctcgtgccatcggcttcctcgacggcgaacgctcgtgaccgtaggaaccatattgtagaaacatttgcgtggttgaacaatagatttcaaagtgttttatgaaaattatagagagctattggagcattgtcttttttggatttattatttttaaagagatcccaatacccttgttttgggagctataactttgtgagttgatggagatgcttttactaattctgaattccgatgctgtaac

SEQ ID NO: 4694 - DNA, 1449 bp, Zea mays
  Clone ID: 700423184_FLI
aatcgaacggtccatgatcaagtctagcagggagaaactcactttcccaaggaagtcaccgaatccgcattcgataaacctgccgtgtcccgttcaccccgcgttcgcttcatccgggcgtgggctaccgccgcagccgccgccctacgtccggtgaccaggctttcattgagctttgccgacgacgaccacgcaccagatggctgggtatatgtcaagagggccccaaaatggttctgtgtatgtctgcaatctacctcctggaactgacgagaatatgttggctgaatattttggcaccatagggttgctaaagaaggacaaaaggaatgggcgcccaaaaatttggatctatagggacaaagtttccaatgaaccaaagggtgatgctacagtcacttatgaggatccacatgctgcttcagctgctgtggaatggttcaataacaaggatttccacgggagcactattcagtgaacaagatgaagtggataacggagcaggcagaggtagagggcgtggtgatggtcccggcaaggcttggcagcaagatggggactggatgtgtccaaatacaaggtctgttatgattgttgtggcaatgtaaattttgccttccgtggtgtttgtaatcgctgtggagctgcacgccctgccggtgctggtggaactggtggtggaggtggcggtaggggtagaggccgtggtaactctgatgcaagaggaagcagtcgtgcgggtgctggtgctgctactggtggtggtccacctggattatttggcccaaatgattggccatgtccaatgtgcggcaacatcaactgggctaagcgtaccaaatgtaatatatgtaacacctccaagcctggtaccaatgaaggtggtgtgaggggtggccgtggtggtgggtacaaagagctcgatgaagaagaactagaggaagttaaaaaacgccggaaagaggctgaggaggatgatggagagatctatgatgaatttggcaacctgaaaaagaaatttcgctctaaagctctgcatactggaagtgcgcagacacttcctgggtctggacgtgctggatgggaagttgagcatcgtggttctagtgaaagggaaggcagggagaggagcagggatcgtggtagggacgactatgatgaaaaggaaaccaggagcatagatagaggtgatcatggaagggaccagcgccggagccaagaccgcgaaagggaaaaggggagggagagaagagaccatgagtatgagagaagtagggagcgtgaccggcgccacaggtgaagagagaaatgacagggctttctgttcttacatcgcatttgccactttttgtagccatggaacccgtggtcttgtgttagtatctgggggcgtgcattgattctcagaatctgatttttgctttgaatgtttcgctgcattggcacttt

SEQ ID NO: 4695 - DNA, 549 bp, Zea mays
  Clone ID: 700423214_FLI
agtttcttctacggccgcctcgagcagcgcgtgccgacttgataccctgggaaagagtccatggcgtcctctgcccccggcagaggaggaagacagctgatcctactaccggccgcggcggcggctgtggcggtaatggtactaattggggtggaaccggcgtcggcgtgttacccgcgcgtgttcagcttcggggactcgcttgccgataccggcaacttcaggttctactacggcaacaactccggcgagcccgcactccggcaaccctacggcgagaccttctttcgccgcgccacggggcgattctccaacggccgcctcgtcctcgacttcatcgcggacacgatgggactcccgttcgtgcggccgtatctgagcggtcgccgcgcggaggacttcgcgtccggcgccaacttcgcagttggcggcgccacggcgctcggcccggacttcttccgctccaggggtttcgacatcggcgacggacgtgtgcacctaggcatggagatgaagtggtttcacgatctgcttgagctcctctgccgc

SEQ ID NO: 4696 - DNA, 806 bp, Zea mays
  Clone ID: 700423276_FLI
gtcgggggacgccaccgccactgccacagcggcggtgtcgacactggcgtccttcaggcgccggggcggctactcgggctacctcagctccatggcggcgtcttcgtcgtcgtcagcaggcggcttcgacgggctcatgaacacggtcatcaagaagaagctcggcatcatcccaaaggatctcaagtggggagagcagtcagacgacgtgttcgatgctctggctggagacttcatgaagcccaggatacaggaggtggaccagctcctcaagcttggcgtcaatgtcaccatctacagcggacagctcgacctcatctgcgcgaccaaaggcaccatggactgggttcagaagctcaagtgggacgacctcaacagtttcctgagatctcccagaacgcccatctactgcgacaaggaggggcagtccggcacccaggccttcgtcaagtcctacaagaacctcaatttctactggatactcgaagccggacacatggtacccctggacaacccttgccctgcgctcaagatgctggctgacattacgcgatctcctgccgagtagcaggaggaagaaaacaaggcgacggaatggaacggcctgacaccagttcttcaagattcttctcttttcatacagtcagagaaaaataagtcattggtggtagcattcatacatgcaacaataaacacaaaggaaaaggtagtgataggatcagacagatatttaattcggcagatattattgtgtagcaccgctatagagcttgcagctgaatttccaacatgatgatctgattgac

SEQ ID NO: 4697 - DNA, 822 bp, Zea mays
  Clone ID: 700423304_FLI
agacgataaggtcaggggtcaacggagagcaattgtccggcggcgaggcaagctggcgaacggtgggacaccaaagaagcaaagcgccccacgtccccgtgtgctagccgttcgtccgccggccaccgtggctaaggagcacagacggctgcaccgcgctggtcagcttacccgccgatcaacgccggcgatacagcaagataataatacagcaaggaacagcaacagctactcgggtaagggcggaggcgggagaccgaacgagctcacctcttgttgtccggtgccggagccagcgtcggcgggcagccatggcgtcgctgtcgagtcctggcggtcctggagcacggccagcggcacctccgaccgcgcgtcgcccatgtcctcaactccggaggacgatgcttcttgctctcgcgagagcaacgccgtgcggtgcggccggacgtgatgtccaagtactggagcagagagattgggagccgaagaggcaacaggtcactttcctcgcgatccccgcgtcaagcgcggcccaaaacctgagggcagccttgcacgtcttgatcttttcccctcattttgcaaaacacgcaagcggtacgctgctcatcgcgtctgccgattgaagagaaaacaaaatgctcagtacacggcggtggcgacaaagcagctatggcgcactctgctagacgcggcagcaatcggggaaaatgatcttctttcccgggagcaatcggacatgcggctcacgtggccagtgaaattttctgtattttgcctgtcactgcttcggcggtatcctatttatatatattattttat

SEQ ID NO: 4698 - DNA, 419 bp, Zea mays
  Clone ID: 700423342_FLI
tgttgttgcgccacatgcaattcaacgacaaagcagaccggatccacaacgccatcctccagaccatcgccgaggggaagtacaggactgctgatcttggtggaaaggcatcgacatcagagtttacaaacgcagtctgtgatcacatctgagaaacggatgtgattcttccttctgattgttttgtcatcctaatatttttttgtcacatatgagaggagctttagctttaagaggttaactggcagcacctcgaacttctttggggtgtttaacacggtttgagaccgtcaaataattttgtcacatttcttgcggttcagaaattctttcaacattggaatggagccaagaattgtctgtaataatcaacatcagcattataacagtatgtagggtttatctcattcacgttcttg

SEQ ID NO: 4699 - DNA, 472 bp, Zea mays
  Clone ID: 700423404_FLI
aacgcggagacgggcacgcgctccttcctcaagaacggcatctacatggcggacatcgggcccagcttcgcggcgcacgcgtaccggctgcgcagcacggccttcgacctgctggcgctggaggacctgctgggcaaggacgcctccaactacgtcaacaagtacctccgcctcaagtccaccttcatgtactacgacttcgacaagctcatctccgccgccgaagacaagccgcccttcgtcgacctcgccaaccgcctcttcgacagcttcgagacgctccaggaggccgtcacagccaaggacgacgccaggatcggcgaccgctacgccgagacaaagctcatcctccaggagctcatggccaagatggcctagcagaaccacaatttttcattcatatatcatgatgtgtaaatgaatacttgaaactcacaaggggtattgcagaattcccagagcagggaaatac

SEQ ID NO: 4700 - DNA, 1495 bp, Zea mays
  Clone ID: 700423405_FLI
cgacaaagaagaaacgaaaccgaaatctctccaagaatccatcgcagccgccatcatggccgccgccggtggccgaacccttggccggagcagcttctcccgcgccacatctaacctggtggcgtcctcatccggcgctgctggtgttaagattggcccgaacggtgcttctttcgtctcctcgggcattcccgacctcgacatcagtgaatcaatgttatttggtgctctctggcagggattttgggtggtggattccttcttggctcagttgtaatgatcatggaggacactgatgcgccacaccacctcttgcttcttcggtgcttcatgtctcagggtgttgtgcacaaacaacccctgctcttttcaggagctatgaaagagcctgtgttgttccttggtacactacctgctccagtttcatcttcaaaggaggatggacgacacagagcaatgggtcctgcagcaagtagtgatggacgagcaaatgatgagggtttgaggatagcttggcagtacaagaaatactttgggggtgacaagacttcgcgagctgaacataaagacaataaacaggaattcagcaatgattttgatttgaggaagcccttggaaaggcatttacttaatggacagaatattgaatgtgtaagcactcaagatgctgacacactcagcagcctccaggattgttgttctgctttcttatccaagcttccaagaaaagatggtgggagttcaactgctgggagaattgctatacaatcactctgtgcaccgcagtgcagatactttgaaaaggactgggacatggtctcatttatcagatcactgaaggccatggtgcgctcatctaactctgttgctgttgtaacatttccgagtacagttctgtcaaattcgttctgtaagagatggcagcacctggcggatacactgctgtccatcaaagcaattccagatgaggacaaagacttggcaaaactcctcacaggatatcaagatatggttggttttttgcatgtccacaaggtggcacaacctaacagtcaggtccctgtgatcttagaggcatccacgctctctctaaagctgcgaaagaggaggtccctggtcttagaacggttgaatcaggctccagtcgatgggtcaagtgggccttcgtctgctgcatcaagcagttgctcatcgcaaggttcacagcttgatttctaattggtatggctggttttccttgagtggagctcagaagtactgtgtactagttactcgtggcagaatgcagcttttggaggtttaggttttagataggagtcagtttgatggttcactgttaaccatcctccctcgtgtgcctatcagcttgttgtaaccccactttcaacattattagaaccgtcgaaacttgtatattttcgggtagttgtccaagtttgttgaactgccttgaacaggttacaaaattgtggggttttctcgttttgtctgttcc

SEQ ID NO: 4701 - DNA, 429 bp, Zea mays
  Clone ID: 700423529_FLI
aatagttgctcggcagctggagctcgtagagagctaccagctacttgctgaaacctttggaagtgactccaattctaggttacagattctccccatgaaaataaccaagaggggttctagtaaagacaatggagcatcaaagcccactaaacaaaccggatcagatttgatcgtcagtgagaatggtggtggctcaagtttttctcggctgccctttctgccaaagtgatcgtctagatcttctgatcaccactgtcgaaaatgtacatcattcctctctcttgttgttcattgtacaacattgtgcagtgttgtaaatagtgtgtcgaatgttgaagaagcgaaagagcaaaagctaactgcaattgccttccattcttttgctggaataaaatccgttcatttctggtgtcagccaggtcagctcac

SEQ ID NO: 4702 - DNA, 1801 bp, Zea mays
  Clone ID: 700423532_FLI
gtacggacccgcaaaaagagctccgtcagttcctctacctcctctgtaggagcacacttgtttcggaaaggaacgcagattcacgccacgccgccgcctcaattatatggcgccggcgttctcggcacaggtccccgcgctccgacggggagcactgcgcgtgcggtgggtcacggctgcgctgttctcatcggggattctcgccggcaacaagccgattctggtgcgtgacttcgtgaggtcagcgttgtacgaccccaaccatggctacttctccaagcgggcgggaccggtgggcgttcttgacgccagcatccgcttcaaccagctcgaggggaggagtgcatatatacagcaccttgataagctgtataagaagcatgatatcgcttggtttactcccgtggagctctttaaggtgccttctctgctttagcggttgaagagaatgaggttctttcagtttggtcactgatgcaccgttttccctctatggtgcagccatggtatgcctacacaatagcagcatcgattctgcgtacagcaaatctttcagtcccattgaagatatacgagattggtggtggctctggaacatgcgcaaagtgcatacttgattacatgatgctgaatgcgccaccaaaagtctacaatgatatgaaatacattagagattagctcctctcttgctgagaagcaattggaaactgttggtgaagtgcaaagccatttgtcaaagttcacggtggagcaccgggatgcaattaacagacctggatggggccgcacggatcctcatccatgttgggtgcttatgcttgaggtacttgacaatctaccacatgaccttgtctattcaccagatcaggtctctccatggatggaagtgtggattgaaaaagtaaaagttcacaagcttccgaagtctataagccattacaagacccattgatttctcgctgtgttgatattattggcatgaatgaagacaaagcttctgtcagtgaaaaactaacatttgctgcaaaaggagttctatcaaaagtattcccaaagcctcgtagagcttggttgcccaccggctgcttgaaactaatggatactctacatcaagctttaccgagcatgtcccttattgcttcagacttcagctatcttccagacgttagcatacctggtgacagggctccattggtttcatcaaagaaggatgggaagacatcagatcatcgcaactactttgatgctcagggtgacgcggacatcttcttcccaaccgacttccggctcctggagcagatcgaccataactgcgctggcttctcaaaggagcagaagaatcccggcgcattcaaacccgtgaagaagaggagaacgatcatacttgatactgcagccttcatggaggagtttggcatgccgctgaagacgaggaccaaagacgggtataatccgcttctcgacgatttcaagaacacaaagttctatctcagcgtccctacacacaacgttcctacccatagcaggaggaactagtcttctttccttttgctgatgtgtcacgagtcaggaaaagacgtctgacaggctagaatcggtctgtcattttgagtagtctgaatttgcaagttttcttaccttaaggtgctgaaaattttatagtttctcttttctgtagaacaaagtttttattatcatttttgacattgatgcatgggtaataaaaggtggaagaagactgactaacaaggagtcaaaccaaatgaatggtaaaagcaattacaggctgcattccacacgt

SEQ ID NO: 4703 - DNA, 1326 bp, Zea mays
  Clone ID: 700423591_FLI
cgtcggcgtcgtccgagagtctcggcgagctgctcatccggaaggccgacgagggcgtcgcggtgctgatgctggtgtgggacgaccgcacctcggtggggctcggccccatcaagcgcgacgggctgatggccacgcacgaccaggacacggcgagcttcttccgcgacacgcgcgtgcagtgcgtgctctgcccgcgcaaccccgacaaggaccggagctacgtgcaggacatcgagacggccaccatgttcacacaccaccaaaagacggtgatcgtcgacggcggcggcgcgccggcgccggagacgccgccgggcctcgtgagcttcctcggcggcatcgacctgtgcgacgggaggtacgacacgcaggaccacccgctgttccgcacgctgggcaccacgcacagcaaggacttccaccagcccaacttccccggcgcgtccatcagcaagggcgggccgagggagccgtggcacgacatccactgccgcgtggaggggcccgcggcgtgggacgtgctggagaacttcgagcagaggtggaagaagcagggcaagggggacaacctcctggtggcgctgaacaaggcgtgggcggagcgcgaggcggccccgcggggcgacgccgagtcgtggaacgtgcaggtgttccggtccatcgacggcggcgcggcggcggggttcccggagggctccgcgaacgcgccccgggaggcggcggcgctcgggctggtgagcggcaaggaccacgtgatcgagcgcagcatccaggacgcgtacatccacgccatccggcgggcgcgggacttcatctacatcgagaaccagtacttcctggggagctcctacgcgtggcggcagaacgacggcgtgacggtggaggacatcaacgcgctgcacctcatccccaaggagctgtcgctcaagatcgtgagcaagatcgaggccggcgagcggttcgtcgtgtacgtggtggtgccgctgtggccggagggcgtgccggagagcggctccgtgcaggccatcctggattggcagcgccgcaccatggagatgatgtataaggacgtgacgctggccatccgcgccagggggctccgggccgaccccagggactacctcaccttcttctgcctcggcaaccgcgaggcgccgagccccggcgagtacgtgccgccggagcacccggaccccaacaccgactacgagagggcgcagcaggccaggcgcttcatgatctacgtccacgccaagaccatgatagtggacgatgagtacatcatcgtgggctcggcgaacatcaaccagcgctccatggacg

SEQ ID NO: 4704 - DNA, 1237 bp, Zea mays
  Clone ID: 700423665_FLI
ctggactaataccttctctgccagaagcaacgataaaatccaacaatgaaactaaacatcttgaaggacatgtgaggccaaactttctaccaagaattacccttgctaatatatgggaacctgcaagcagagaatcttgcaataacaatatctgggagatggtgaaagcttcttttcgtattctgtttgggaggtctactcttcaggaaccagcattccaggagttaatactactttacactgatgaagttgttccaagtgaaacgaaggacgagatggttccgctgcaactgaaaatttatgagaggattccgatcccagatttgccagtagttttcccccacaagaaattgtccttccgcatcctagatacagtaaggctagatattgctactgtaataggtctattggcatatgtggtgaactacaaatttgagagtttagcctcatctccgtcagcttttcttcttgatatagttgctggtactgcactcgtcatacttgttttccgtgtagcactgggctacaaacagacccgggataggtaccagcttctggtgaataaaaccctctatgagaagacattggcaagtgggttcggctcggtttacttccttctcgatgcttctgagcaacagcagtacaaagaagcacttttggcatatgccatgttgctctgcagaaagaagtatgaggtctcatctcgtgcaagcataagagatgcatgcgagcagtttatgcacgagaaattcgaggcaaagattgagatgccgatcgacaaggcaatggagacactgctgcggttggggctggtgattgagcttcccactgatggtgggtcgagcgtgattggtctcccatgctcggaggcatacaggatcctgaaaagccgttgggacggcttgctggaacaagatacagaacaaggctgattagaacgagacatgtacgttggtggcttggagtggagtgggatgggatgccgtgctggtacatactcgacgcgtcggcaaagctcactcttgtttgtatgtatacgtaccagttgttgcagcaagtgtatatgtgctagctacgtgcatgtataatcgtgatctagtttgttgtacacaaacgattgcagtgtatgtatatgggagcacatgtttttttcggaagactagccatgtgtctgtaagtttttctatttgtaagttggtttccatttataaatatagagcataaacactgttctgtt

SEQ ID NO: 4705 - DNA, 488 bp, Zea mays
  Clone ID: 700423671_FLI
tgattttcatgttgttgtaactatccagtatcgtacaactaacctgttacctagggggaaacactgcatgagtgttgttggtatccttgtctgatatgaggcggagcgggcgattcttgcaggaggagagagtgattctcctagaggtggaggatgaagtggtgatagacttcaagccaactccaagtgtcgtgtcgacctctgcctccgctccctgcacacatccctcccagtcgtcttcaaggtccagacctcctccccgctcaagttcctcatcagcacgttgtgcggtgtcatgtcgccgctttccttagtgtccatacacgtcgtgcgaggcgtcccgcttcatctctaatcacctttatgtgcacatcgtccatatgtgacccccttctccatataatttcaacaaattttactcttttgggctccgtgtaatttcattagtaaaatctctactaattattaatgctgcaaagttaacctgt

SEQ ID NO: 4706 - DNA, 446 bp, Zea mays
  Clone ID: 700423679_FLI
tgtttggtgaatggaaacaagagatggagctaatggctggacggatcaagaatgtaagacagaagctctacgacagtttgtctgccaaggataagagcggcaaggactggtctttcattctgaggcagattggcatgttctcctacaccggcttgaacaaagcacagagtgacaacatgacggataaatggcatatttacatgaccaaggatgggcggatctccttagctgggctgtccctggctaagtgtgattatcttgccgacgccatcatcgattccttccataatgtgaactaggctgaggtacgatagttgagggtcaagctattgatgtttagttccgtggacgctaggctgggatttttgggtccttccagctatacagctcttccgttgtgctccatctggtgtaacttggataaataaatattttgtcgctgaact

SEQ ID NO: 4707 - DNA, 875 bp, Zea mays
  Clone ID: 700423687_FLI
ggatgcgacctggtcacagctggggctttaccagttgcatttggtacatcacatttggcccttgttcaccgagcccaattgaaggctggccaggtgctacttgttcttggtgctgctggtggtgtcggggcatctgctgtgcaaataggaaaagtttgtggtgctgttgttattgcagttgctaggggggctgagaaatcggattatctcaaatccataggtgccgatcatgtaattgactcaagcaaggataatgttatagaaagtgccaagtctttcttaaaggctagaggcttgaaaggtgttgatgttttatatgacccagtcggggggaaattaactcaagatagcctgaaacttctcaattggggagcacaaattcttgtcatcggatttgccagtggtgatgttccagttattcgagcgaatattgctcttgttaagaactggacagttcatggtttgtactggggaagctacttaactcaccggccacaagtactcattgattcgctcaatgaactcttgtcatggctttcaaagggtctgataacagttcaaatttcacactgctacagacttgttgaggtccatcttgctttctctgccctgagagataggaaggcggttggcaaagtgatgattgtaatgggctcctcagctgtaccaaggctctgatatcattcagaaacgtttctctacgagatcataccaaggctctgttatcattcagaaacatttctctacgagatcatgaggcttatactgtgtatctcttttatcatctgagactgaagtagtttccttgtcaataatgtggtgtatgatctacaaaaataatcagagaaataagcagtttatatcgacacagtgcc

SEQ ID NO: 4708 - DNA, 1058 bp, Zea mays
  Clone ID: 700423777_FLI
ctcagctagtgaaccagcagccaatgcaggcacaggtacctaggcaaattgacttcagcgccgggagcagttccaagcctggtgtgttggttacaagggcaggtgtcctggatggtgagagtgcagaggtggatggcttgtgcaaagaggaagggccaccacctgttatggaggaccgacggccaaggaagaggggaagaaaaccagcaaatgggagggaagaaccacttaaccacgtcgaggcggagcgccagaggagggagaagctcaaccagcggttctatgcgcttagagctgttgtgccaaacatatcgaaaatggacaaggcgtccctgctgggcgatgcgataacgtacatcactgacctccagaagaagctcaaagagatggagacggagagggaaaggctgttggagtcgggtatggtggacccaagggagcgggcgcctaggccagaggtggacatccaggtggtgcaggacgaggttcttgttcgtgtgatgtctccaatggagaaccatccagtcaagaaggtcttccaagcgttcgaagaggcagaggtccgtgtaggcgagtcaaaggtgacgagcaataacaacgggacggcggtgcattctttcatcatcaagtgtcctggcactgagcagcaaacgagggagaaggtgatagcggcaatgtctcgcgcgatgagcagttgagcatagcagctgtaggatcagactggcacggtagaaggtggccggtttatccaggttgcgaacaagaggcggcggcggcggctgaagcagcccgtcgattgttgataggagagttgtaggtggagagaagcaagataagattcttctgacttaagcaatgcagcagcaaccaaaaaaaaagaattggggctctagttaagcagccattctacggtaggtttcttttggttgtggtccgaccccgaccgtttagttctgatgtttttgctttggaaggatggataccgtgttcgttgtgtaagcctgatgatgcagcagaaccataaacagcaatacatgtttttcttattcttcttcttc

SEQ ID NO: 4709 - DNA, 237 bp, Zea mays
  Clone ID: 700423857_FLI
cagcctcggagcaacagacccccgcccacgaccacacgcagcaagcagcagccgcgcgctcgcctaggactaccgactacgagtagtgctcagctagcctccatcctcagcgcgcgagtggctgctgcgcattcctctctttatccgtctctgtgcttgtttaatttgtgttcgttcgtgagtaggcggccggcacatatggcagcgcagtccatgctcatgtcgaccagcgtcaac

SEQ ID NO: 4710 - DNA, 1287 bp, Zea mays
  Clone ID: 700423858_FLI
ctgtaaatagctaatgtggatagggagacaacatggcataagcatatcattttgttggtactttctactaacttgttaaccaggtcctgattttggttcccaaccatcgttgtcaaggcggaaattgacatctatactgcatgagagtgggaaaaaatgctcccttattgatgacatgtctattctagatcgatattcagatacttcttgcaattcaattgctgtcttttctgatgatgatgccctctccagatcaatgaaggaggtgaagaacgacaaagtggctttcatttggacccagttctcaggattgatctcttacttccgccgaagagctgaagatcccgaaaagttgaaatcatgtgtcgcagaggctattgcattaaaaacatgtgatacaaaaactgcttcaaaaaaagcaaaaagtcaaatttgtcctgaattaaaggaaattttgtgtgaattggataaaaagataaagcagttatatggtgccctacctgacaattctatgcttattgtatgcaccggccatggtgatactcctctagtacgaagattgcggaaaatgcttcaccatgaagaagaaacaatagatagccgggaaaatattgtccaagctctgggagatttacaagcccaagccgaagttgctctgtgcttctgctgtgttaagcattaactaactgcatctttggattaatgtactgatggatatggcttcagccattatagaaggggggtggcaaaagttccggctatatggtatcggaccatgttttcgattcataatatggcccttactatttacactcagggagactgttcatgcggggaagaacattggccactgcctacggaagtgcggtaaatggcaatatgacgcacgtgctcctgatcctgatgcagccagcctgacgaatcccaaatacgggcaggctattgggtttgttgaccccaagctgtccttggagagttgaattcattaatttatttatggctagaccaggatgttatggttgcttgttactttcactgaatcttcaagtgggttcgttgtataaataatactctcttcatttttttaatctgttgcggtatagtttaaaaataaactaacgagcgacaaatattgagaaccaaggtggtacacccttcgttccagaatagtaatccctccctcccaaaatagtattcattttagacttcattttttatgtttatattcatgtatgataaatttagatatatatatacaaaatacatacattaattattatatgaatc

SEQ ID NO: 4711 - DNA, 440 bp, Zea mays
  Clone ID: 700423860_FLI
caccctcctcatgtacatacgcggcgcgacgagcgtgcagtgttcttgctgccacactgtgaacctggctatggaagcaaatcaagtcgcgcatgtgaactgcgggaactgccgcatgctgctcatgtaccagtacggggctcggtccgtgaagtgcgcggtctgcagttttgtgacatcggttggaacctcacctggtgcagagcagaagcccagcagctgagctgatagtgtccctgaaagtgctgtgagaccacctatgaaaaggatgctttgagtgcacatgtatagagttcttccctgaagcgattctttcactttcttttcttttgttttcttttcttttttggttcctcctcaccatctccaccccacccgtccacttctgcgttccttcgatggatctggcgagcccgcggaataaatgagagtttttggat

SEQ ID NO: 4712 - DNA, 831 bp, Zea mays
  Clone ID: 700423863_FLI
ctcccatccatctcatgcttcggtccacgcacccacccagccccaccagcggcagctccgcggcgccggcgtccagctccgacgccgcggcgatggtcgggggcggcgcggcggcgggcagcggcggcgcaccgagcggcgccaagctgctgcagatcctcaacgtgcgggtcgtgggcagcggcgaccgcgtggtggtgctgtcccacgggttcggcacggaccagtcggcgtggagccgcgtgctcccctacctcacccgcgaccaccgcgtggtgctctacgacctcgtctgcgccggcagcgtcaacccggagcacttcgacttccgccgctacgacacgctcgactcgtacgtcgacgacctcctcgccatcctcgacgcgctccgcatcgcgcgctgcgccttcgtcggccactccgtctccgccatgatcggcatcctcgcctccatccgccgccccgagctcttcgccaagctcgtactaatcggcgcgtcgcccaggttcctgaacgaccacgactaccacggcgggttcgagctgccggagatccagcaggtgttcgacgcgatggcggccaactactcggcgtgggcgaccgggtacgcccctctggcggtgggcgcggacgtgccggcggcggtgcaggagttcagccgcaccctgttcaacatgcggccggacatctccctccacgtgtgccgcaccgtgttcaacaccgacctccgcggcgtgctgggcatggtgcgctccccctgcgtggtggtgcagaccacccgcgacgtctccgtcccggcctccgtcgccgcctacctcaaggcccacctcg

SEQ ID NO: 4713 - DNA, 629 bp, Zea mays
  Clone ID: 700423892_FLI
gtccactggcttgggcgtgcctttgcgtgcgacgggagctaggaatccacggcatcggaaaagtggccgcctgaagaaccgatttctccaagatttttttgtccgtcctatcgcttgcaggatcggattcgccgtctctggccatggttctcgccggcctccgccggcacgtcggccagttcttgaccagcagtaatgagcttatggcggcgtcgctctcggccgtgagctgcgcggacgaggtccagaaggcggagggggcggggtgccgtgacgacgccgcggcgctgcggctcaagaaggtggccatggcggcgatactggtggccggggtgctcggggtggtcctgccgctcgctgggcggaagcggcgcgcgctgcgcacggacagcgccgcgttcctggcggccaaggcgttcgccgccggggtcatcctggccacggggttcgtccacatgcttcacgacgccgagcacgcgctgtccagcccgtgcctccccgccgcgccgtggcgacggttcccagtccccgggttcgtcgccatggccgctgcgctagccacgctggtgctcgacttccttgccaccaggttctacgaggccaagcatcgcgacgaggccgcgcgcgtc

SEQ ID NO: 4714 - DNA, 245 bp, Zea mays
  Clone ID: 700423896_FLI
ggcattccgagcctactgtccaagttctccttcaacgtcatcagcgactgaattgtgcaaaccaaccagaatgttgaggggtcagtagacgcatgcatacttggctagttgaagtcatagaacagtgtgcgataccgatgggagcttgtattgagaagtagctcatctgtttttttttgtgtgtataacgtatccccctcctgggctcttgctgataatgatatgtatgtactgtatgtgtttct

SEQ ID NO: 4715 - DNA, 575 bp, Zea mays
  Clone ID: 700423935_FLI
gttagcttccttgttagccagaacactcaggcatttcacatgttcattactgcacttttgcagttatgtgatcgggctggaatgctttatggtgagcttgcaagatttgttctacgtttgctggggatcaaaagaaaaccaaagaagagcggtgttaagggcccaggagctccatcatcggagggacgaggccagcagcttgttgaggcgccgaaagttaactcgtgggacagcgtgtggactgagaatggcaagggaaattaaagggcccgtttgggcacagtgaggcagttctcctgaaaggagaggagggcgagtttgcttgtggaagagaaatctgcgaatatctgttcggatgcgttttgcatatgcatagaaggcatagacaaggaaccccttatgcctttttgtatttgtcatgttcttccatggtgtacatatagatcagtgtgcaatgagaaatgtgagcgggtaatgtacggctttcccccccaaaatattactgcaatagtaccgtttgtacttaaaaaagacggaacacaatatagatgatcctttttatttggcctgttgct

SEQ ID NO: 4716 - DNA, 418 bp, Zea mays
  Clone ID: 700423938_FLI
aagacggcctccagcttcgtaggcttgccctcgcctacaaggtgccaattatcacaaccgtcgacggcgcacgtgcctccatagatgccatcaagagcttgaaggacaagtcgattgagatcctcgccttgcaagattacttccagactgccgatgcttcggcagatttacaagcagcggcacagaccaccccttagtgctgtcttccttttccatgtactgtgatcctagctcgagccaaaacaacatcccatatgaattattttgtttacggttgcacctgcagcatgcatggcgcaaggacaggcatccagatcgtatcggtgacaagcatagctagacagaattggtattgggcgaatgtagttgtactctgtaatgttagttagggtgatgagcatccacaataaggcttccc

SEQ ID NO: 4717 - DNA, 572 bp, Zea mays
  Clone ID: 700423960_FLI
tgggccgcagccgcgagcaccaatcaaatccagggaggaagggagcaccgccatcgccatgggagggcgccgctggctgtcgtgacctcaccttgccgctgcagctctgtaagtaggtacctagtattccagaggtgatttctcttcattgacagagagcaaatctggttcgtgatccctagtaccagagagggacacggttttcctatcgatgtgttagagtcaagtactcaagcttttgtggttccaatggagtctaagcgtgtgagtgatcaggatgctttgatcgacctggagagtggcaatggcactacagtaagcaactacaccaatggtggggatgctagtttcacagtggggcaagcaagaacagcgcctaatggtgcgtggaatggttgtgtgtgtgccaacgggtgtccgagggacgacaggaatcagcacatggattgctcccctcctgcttcggatgctgttgctagaagtggagatgacaggaagtctgagggggaggagaagcttatggacagctcaggaggggagaagacgaagaagaagcggtccaagaagccacc

SEQ ID NO: 4718 - DNA, 606 bp, Zea mays
  Clone ID: 700423970_FLI
aaaatggacatgttcaagtagttcaattggtataaagggaacaattggatatattcctccagaatacggagtaggtggccatgcatcaacatgtggggatgtttatagttttgggattgtgttgttggagattttgacgagtaaaaggccaacagaccctatgttcgaagatggcttaaacatcatcaactttgtggagaacaactttccgaatcaaatatttcaagtcattgacgctcacctcctggaagaatgcaggaactcaactcaaggaaataatttggtacaagaaaatgaaatctatcagtgcttggttgatctgctgcaattagcactttcatgcatttgcccattaccatctgaacgattgaacatgaagcaagtagccagcagaatgcatgaaataaaaaaacatcacatattaggtggaagcacaagtaataatagcaagggcgacagatccagaatataaatcttcctatggtgaagctcccaaaatttgaattaaggccctatgtgggagggttatacttcaaaaaatgtagtttcggttttccagcttcaccatgaaacaacttaatagattagtaaggcgtggttcaagtg

SEQ ID NO: 4719 - DNA, 870 bp, Zea mays
  Clone ID: 700423983_FLI
gccaagaagtcgtggatccccgccttcaagagcgacgccgagttcatcaacccgccctggctcgacggatcgctccctggcgacttcggattcgatccgctggggctgggcaaggacccggcgttcctcaagtggtaccgggaggcggagctgatccacgggcggtgggcgatggccgccgtgctgggcatcttcgtgggacaggcctggagcggcatcccgtggttcgaggccggcgccgacccgggcgccatcgcgcccttctccttcggctcgctgctgggcacgcagctgctgctcatggggtgggtggagtcgaagcggtgggtggacttcttcaacccggactcgcagtccgtcgagtgggccacgccctggtcccgcactgccgagaacttcgccaacttcaccggcgaccagggctacccgggcggcaagttcttcgacccgctcggcctcgccggcaccgtcaaggacggcgtctacgtccccgacgtcgagaagctcgagcggcttaagctggccgagatcaaacacgcccgcatcgccatgcttgccatgctcgttttctacttcgaggccggacagggcaagacgccgctcggcgcgcttggcctatgatctgcatgctgccggccacgacgggtgtcgtgtcatcagtcatccctgtgtgcttgtgctcatcggtcgatcgaatccaccgagctggttctcgattgcgagcgtcgtggtacggctgcatcggatcagacgcatgcaacaaaatgggggattttttttcttcttcttccgtgtatgtaccatgtagtgtatagtagtctggtcatggaaccaattaaggcagaatgagtgagcgagggacatttcgtt

SEQ ID NO: 4720 - DNA, 819 bp, Zea mays
  Clone ID: 700424002_FLI
ctcgtctctccgtccccatggccacttatctcaacgcaccgccggcagccaccacgacgactgcaagctgccgccatgccttctccggtggcagcctccgtctactccggccgagccgaccgacgctgcacgtgacgtgccaagccgccgcctcctcccagcagccgtcgtccccgtccaggaggtcagcctgcctcctcggcatcgcgtgcgccgtcctgctccgcccacgtgccgcctccgccgccgaaaccgacgacgagccggccaacaacggctggtggctgaccgagttccccttgcccgtgcccaagatcgtcaacaaggagatcaacaacgcggagacgggcacgcgctccttcctcaagaacggcatctacatggcggacatcgggcccagcttcgcggcgcacgcgtaccggctgcgcagcacggccttcgacctgctggcgctggaggacctgctgggcaaggacgcctccaactacgtcaacaagtacctccgcctcaagtccaccttcatgtactacgacttcgacaagctcatctccgccgccgaagacaagccgcccttcgtcgacctcgccaaccgcctcttcgacagcttcgagacgctccaggaggccgtcacagccaaggacgacgccaggatcggcgaccgctacgccgagacaaagctcatcctccaggagctcatggccaagatggcctagcagaaccacaatttttcattcatatatcatgatgtgtaaatgaatacttgaaactcacaaggggtattgcagaattcccagagcagggaaatacaattatcatgtc

SEQ ID NO: 4721 - DNA, 1191 bp, Zea mays
  Clone ID: 700424030_FLI
ctgatagctttcgtaggtgctagctactaccatataccatatactctcacacaaagattagtacagctagcatggctaatgactccttgacgaggggccacataatcggggatgtcttagacccgtttactagctcagtgtctctaagtgtcctgtatgatggcagaccagtgtttgatgggatggagtttcgggcgtcggcggtgtcggtgaaacctagagttgagattggaggtgatgattttcgagtggcctataccctagtaagccatcacgtactccgcagatcgagtccatttggcgcgcggtaggccatatctatggccaagatgtctcgactactctccaaactctcatgtccaagtgacatccatggcttttggctcactgtgtgtgacggctaaatcagtctcctcgatcgtgcccatagctcggttgactacaaagattggctcatgctaataaatatatagtagtattatacactgagagagacactaacacccccccccccaaaaaaaaagtgcagggatttctgatcagcccagccccgaaaaaatgctcaggtttacttttaattccctaacatgttgaccatgtgtttgtgttaatgtaaatatattaggttatggtggatcctgatgcgcctaatcccagcaaccctagcctgcgggaatacttgcattggatggttactgacatcccagcatcaacagatgatagcttcggccgagagctcataccatatgagagcccaagccccaccatgggcatccaccgtcttgtgttggtgctctaccagcaattggggcggggcacggtgtttgcgccgcaagttcgtcagaacttcaacttgcgtaatttcgcacgccgtttcaacctcggcaagcctgtggccgcgacgtacttcaactgtcagcggcaaacaggcacaggtgggagaaggttcacttgtgtttttgatcatgtcgttcaaggtgaaggccggcaagcttgaacctactactactagtaacgttcgcgtgtgcttatatggccgtatcggcgtacactacgtagcatgaaagctagctagaaataaataaagatgtatttctttcgcacatgtagctaggcttttataaaggcgtacctccaagggtattatgtccggcttttaattaataatcgcgtgataagggtggttagtat

SEQ ID NO: 4722 - DNA, 504 bp, Zea mays
  Clone ID: 700424038_FLI
cgggccggagaccgcggacgacgcgcaggagaccgagaacaagaagcccgcgacgaggagccacgcagcggcgaggctcctcgtgctcggcggcgcggtcgctctggcctgctgcacccttgaccaggggctcctgaccaaggctctcatcttcggcgtcgcgcggaggttcgtcgggcagaggaagacgttgtagcgtcccacacaccttgtcgctcgtacggtcgtgccgtgtgctgatcgccgacgtcgagaagcgggggaaggaggtggtttgtgtgggctttgtggatgtgtaattggtgctgatgccattgtggctgaaagagagcggacgaagagcgttttggtgtctacgtgtgtatacgctgccggctgtcggatcacgagggagaggggtttcctactatatacatgtgtaaaaatttgtttcatgtaatcttgtatctgagtgaccagatcaggtgattatgcagatgagaagaacagagttttttttcggtc

SEQ ID NO: 4723 - DNA, 587 bp, Zea mays
  Clone ID: 700424041_FLI
atactgaaggggtaactatggctgggtatggtttcgggctcccgatcagccgactctacgctcggtattttggcggcgacctgcaaatcatctcgatggaaggatacggtaccgatgcttacctccacttgtcgcggctgggagattcagaggagcccttgccttgacgacatatttttgtggacctccagtaccactcttctcctgtaactatgtggctcgatcttcttgtaatccagtgctggcctcgacctatatatatatagctatagttggcctcgaccttatttcactgcctgctctgctgcattgtgaacacagcactgctacgtcctgcttacttccgccatgtactatgatctctctgccggccttcaacaggaaaaaagaaaggacgagggaaatcatggggagcagctaggcggatgagcgcattctcggtagctgctaatctcattttcatagctgcgtctcttgtgttgtacattacatagtctggatttgagcttttgctatggcaagtatcacatgttacctgggtaattgagaaatataagtaaaaaaaacagtacgatgtctctctttag

SEQ ID NO: 4724 - DNA, 606 bp, Zea mays
  Clone ID: 700424071_FLI
cacccttttgaccggtctgcacctcattccaaagaaaacgaggatacacagcagcctgtggcacttactcttgctggccttccaaggagagaggatgctgaggcctgtgccttctacatgaggtctggcacgtgcgggttcggtgcgcgctgcaagttcgaccaccctcctcgccagcgacaactaaaaaaacggaggaagtatcctgtatcaggatgtggtaccatgcgaatcgcactgttaatgcttgatgctgtcactgccatggtgggagcctgacttgtaaagttcagtatcaccggaagtgtttgtcggcgcgtgctggtactaacggtgtaccttcggcggttggatggtgtcaagagtaaaaatacaccgcctgttctcaaactttgactggatgctaatctccaaaatgtgagaaccaagttaccgtaacttgagttaatccgcttgcatggttatgtgatgataaggcgttgggacgtggagtctacatgatggtagggatataggagatcgaatcgcatgttcgcctcacatgttgatgcaatgccaacgtgcaattagcttgtcaacagattaatttagcattattggcatatt

SEQ ID NO: 4725 - DNA, 819 bp, Zea mays; identical to SEQ ID NO: 4720
  Clone ID: 700424101_FLI

SEQ ID NO: 4726 - DNA, 1169 bp, Zea mays
  Clone ID: 700424186_FLI
cagaggttgatgtttggagtgcaggagtgattctgtacattcttctttgtggtgtccccccattctgggcagaaacggaacagggtgttgctcaggcaatcattcgatctgtcattgatttcaaaagagatccatggccaagggtgtctgataacgccaaagaccttgtcagagaaatgctgaatccggacccaaaacgacgattgacagctcaccaagtgcttggtcacccatggttgcagaacattaagaaggctccaaatgttaatttgggtgaaactgttaaggccagactccaacaattctctgtgatgaacaagttcaagaagcatgcacttagggttatagctgagcatctttcggtagaagaggctgctgacataaaggatatgtttgagaagatggatcttaacaaggatcaaatgcttagtttcgaggagctgaagcttggtctgcataagtttggtcaccagatgcctgatgcagatgttcaaacactaatggaagcggcggatgctgatggaaatgggtccttgaattatggagaatttgttacattatttgttcatctaagaaagattggaaatgatgagcatctgcataaggcatttgcatacttcgaccgtaaccagagtggttttattgaaattgatgaactccgtgagtcattagctgatgaccttggacaaaaccgtgaagagattatcaatgccatcatccgtgatgtagacaccgataaggatggcaagataagctacgatgagtttgcgacgatgatgaaggccggaacagactggaggaaagcatccagacagtactcgagagagcggttcacgagcctgagccttaagctgcaaaaggatggatcgctgcagatgacgagtacacggtagcccgataacaccacataggcaagttgtgaattacagatggaaaccatgtgtagatttttctggttgtttgttgacagcttttctgcttgtcctgatgttccattgctttgtattcttcgcttgcggcctgtttgaaggattaggggggattgtttatgctatgattgtatttagactgcatgatccatgcctcgctcgtttccaaagtgtactgtacaaaagaaagaggagaaagggattatgaggctctgctcatttcttaacttctgtggattc

SEQ ID NO: 4727 - DNA, 614 bp, Zea mays
  Clone ID: 700424195_FLI
attggaagaaagcttacccaatggtgtcctagccggttacccagttgtggacttccgggctgtgctggttgatggctcatatcacgatgtcgattcaagtgtcttagcattccaaattgcagccagaggagcattccgtgagggaatgaggaaagctggtccaaggcttctagagcctataatgaaagttgaagtgataactcctgaagagcatctgggtgatgttattggtgatttgaactctagaagaggacaggtcaacagcttcggggataagcctggtggactcaaggtggttgattcttttgtgccacttgctgagatgttccaatacgtcagcaccctccggggcatgaccaaggggcgagcgtcctacacgatgcagctcgccaagtttgacgtcgtcccacagcacatccagaaccagatctccgtggcaaaaacagaggaagctgctgcttagttttggttttccgtagatatatccatacagcaacaggagagcaggttgataggaaggacatcaaggtgtatgtagctttgtagtgtaaatctcttaaggcttgttcggatgattggaggggattgatatggattgagagagattttaattt

SEQ ID NO: 4728 - DNA, 743 bp, Zea mays
  Clone ID: 700424308_FLI
cgttcctgcagcgaagccagccgccgccgagggtggcagtggcagtggcagtggcagcttcctcgtccctgcgccgccgccgccatgacctcggactacacctcctcggtcttcgctccggcgtcttactcttacatgcaaggcggagcgccgaagagaatgaggagcagctacggcggcgcgccgcccagcctcgcacatgacgcggccatgcctggctttggccttgataaagtgagctaccaccactaccaggcgttgcctccttattacgtcgggagcagcaacgcgtcggtgggcaacctcggtcttctgcagcaggctgatgatgctccagctccacaggatggggcgagcgccggggatatctggagcctcgacgagctgctcatgctggcagcagctggtgcttattgagaaccgcaagaaaaaaaaatgtgttggcgctgctagctggagacgagacgagggcgagaggcagttgcatcatccgccatccgctatcgttttgtctctcctatatctagtatatatatgcttctggcagtcgaactctatggcaatgcgtgtgtatagtgtgttgctgccgtctatgattggaagcgagctcgagagtcgagactggttcaataattcacctttgcctaccgtcgtaccgccggcctgctggactgtagtgtgcgtactgcatatatatgccataattatgtatgcactcctcctatataaactatattattatg

SEQ ID NO: 4729 - DNA, 568 bp, Zea mays
  Clone ID: 700424345_FLI
gccgcgcacctatctggcaagcgacgccgcggcctcgatcggagtcggaggcgaacacccccatggcggcggctggcggcggcgcaggagggaaggtatccttcaagatcatcctcacctccgaccccaagctccctttcaaagtgttcagcgtgcccgaggcggcgcccttcaccgcggtgctcaagtacgccgcggaggagttcaaggtcccgccccagaccagtgccatcatcaccaacgatggaattggcatcaacccccagcaaagtcaggcaacgtgtttctgaaacatggttcggagctgcgtctcatccctcgcgatagagttggagctgtagtcatgtcttccggttagaggatatatacagtccaatgcataatgagcaaaacttgagagaaataaagctttgatgttggccttgcttggctgtaggatgttgttacaaggataataagcgaaccttaccgtacatgtctcaagttgtatgctctctgtttgtatgtggagagatttctgaaagtgaatccagtatctgaatcgactcaattagccgctttctgtctc

SEQ ID NO: 4730 - DNA, 868 bp, Zea mays
  Clone ID: 700424380_FLI
aatatgtttaggcgtgataaaagctattcacggtctccatccccacgtggtggacgtggccgcagccggagctacagcagaagccggagctataggtatgctgaggaaaggaaacccctggtgttaattctctataggctctttcgagtgtgttagttgtttttttgttcttttttatctttcatttccgtttgtaagccagcttgtgttaacaatcctcctattacactcagccgatccagatccccatctggatctcccaggggtggacgccgtgaacgtgacgagaggagatctaggagtcttagctacagcaggagcgcaagccccaggcgttctgtctcacctgcaaaggaaaaggagcgcagtcgcacacccaatggcagtaggagcccaaggagccccagcccaagggctgaggtgagcccaccactgaaggataatggtgcacgcaatggctcagaccatgaaggcaaccctggtggtggagagaacagcaagaggagtcggagcccatctgatggctaccgtagccctgtggccaatgggcgcagcccgagcccgagggacgatcggagcccaagccccaagggcaacaacgaagatgacgagcgccgtggttcacctagaggaagtcagtcccccctgaactgagaaattctgatcaaatttgggccgcacgattcggttgtaactgttatattttagtttgagacaacaaactgtatttgctcatttctcatacagtcaggtttatgctttttgagctagaaaacatgtgtaagaatttgttaccttcaagctattcctggtttgtgatatggtaatacttgaactatttagcttgccaaatctgaatacttttaac

SEQ ID NO: 4731 - DNA, 721 bp, Zea mays
  Clone ID: 700424383_FLI
ccgacatcgtcccttcgtccccacgagcaaccgataatccgccggcgttgagatgttggtttatcaggatctcctatctggcgacgagctcctgtcggattcattcacctacaaggagctcgagaacggcgtcctgtgggaggtcgagggaaagtgggtcacccaaggtcctgttgatgtggacattggtgccaatccatccgccgagggtggtgaggacgaaagcgttgatgacacagctgtgaaggtggttgatattgttgacacattccgtctacaggagcaacctccttttgacaagaaatcatttgtgtcttacatcaaaaaatacatcaagaatctcactgctgtgttggagccagagaaagcggatgagttcaaaaagggtgtcgagggtgcaaccaagtttctccttagcaagctgaaggacctccaattttttgttggtgagtccatgaaggatgatgcgtctgtggtattcgcctattacaaggatggtgccactaatccgacattcctctatttctctcatggtcttaaggagatcaagtgctaggcgtgcggcgaaattagttacccatgttgggtactatctatgtactattattatatccaaaactatagttgtcctggctgaattgaactcaaaagggtttgtttgagaaaaaattgtcccaagattggattgcttgttaaagctcaatattgttattgaagtgtt

SEQ ID NO: 4732 - DNA, 954 bp, Zea mays
  Clone ID: 700424447_FLI
gcggcggggaacttccccgagtggacgctctacatccagaccatggaccccgagatggaagaccgcctcgacgacctggacccgctggacgtgaccaagacgtggcccgaggacgcgttcccgctgcagcccgtgggccgcctggtgctcaaccgcaacatcgacaacttcttcgcggagaacgagcagctggccttctgcccgggcctcatcgtccctggtatctactactccgacgacaagctgctgcagaccaggatcttctcctactccgacacgcagcgccaccgcctcggccccaactacctgctgctaccggccaacgcgcccaagtgcgcacaccacaacaaccactacgacggatccatgaacttcatgcaccgccacgaggaggtcgactacttcccctccaggtacgacgccgtcaggaacgcgccgaggtacccgatcccgaccgcccacatcgccggccgccgagagaagactgtgattagcaaggagaacaacttcaagcagcccggggagaggtaccgcgcgatggacccagcaaggcaagagcggttcataaccagatgggtcgacgcgctctccgacccccgcctcacccacgagatcaggaccatctggctctccaactggtctcaggccgacaggtctctgggccagaagctcgcgagccgcctcagcgccaagccgagcatgtaagatctaccagacaagggcgccgcgcgggggaggacggagctctctgtctgctttcgctcatgcatcatatgcatggaaccaagacaaattactctagcagactagcacgcaaactgaatcgcgtttagtttagtttttttggccccggataaaggctgctagcttggttgtaataatggctggctgtgtccagaactcttgtagaagacagaactcgtccaaaacaacatcgacactgcattcatggtt

SEQ ID NO: 4733 - DNA, 569 bp, Zea mays
  Clone ID: 700424471_FLI
gaactcctgcaattggagaagctataggactgggagcagccatcgactatttatcatgcattggcatggagcagatccacgaatatgagaaagagctggggacatacctctacgaaagccttctctctgttccaaatgtccagatatatggcccggcgccttcccagactgtccaccgtgctccgttgtgctccttcaatatcgagaacgtccatcctacagatatcgcagagattcttgatctgcagcatagcgtagcgattcggtcggggcatcactgcgcgcagatcttgcataggacccttggcatcaacgcaagtgctcgtgcgagtcttcacttctacaacacaaaagacgaggtggataccttcgtcgacgcgcttaaagccaccgttgatttcctcacggatcgatactagtgcggttcagttcagttcccttttttttgccagtttcatcgttctctcgtttgaactgttgtatgcacacacaaaaaagtatgcatatatatttggtataaagaaaacatacaaagtgtacggcttggcaaagtgagctcccttatttgg

SEQ ID NO: 4734 - DNA, 606 bp, Zea mays
  Clone ID: 700424541_FLI
gtcgaactggcgcaaccgaccgccgccgcggctgcggtgaccaccgctgagcaggctcaggatctcatcgacgccgctaggtacgacgacttggaggacgtcgtcgccctgttctccgctggtgtctcgctggactccacagattcgcaaggccgcacagctcttcacatggcttctgccaatggtcaccttgctgtggtggaatacttgattcaaaatggagcgaatgttaatgccaccaacatggagaagaacacaccactccactgggcatgccttaatggacgtatagaggtaatcagggctttgatctcagcgggggctagcgtgagtgctctgaacagccacgagaaaacgccaatggacgaagcggtgaccacaggcaagatggacgtgatcgacgcgatcggtgcggcagtagctcaagccgagctcgacgccgttactgtctcctaaaaggacctgatgagtacctggagctttgaatgacttgcagccttgttcttatctcccagcggttctgtctgtatcactcgcgaacctggatcccccgacgggccagtatccgggcaatatctatactgacggcaatcgcctgttagtgtc

SEQ ID NO: 4735 - DNA, 928 bp, Zea mays
  Clone ID: 700424546_FLI
gacaacgccacacgcgtgtgtggacgtaattccattatattgtaatgccctttttacattgcatataaacaaccactgggcctcaagagcatacaatttaactggataccacaaaagctcgccgcaggtgtatacatccttaggtgctcttcttcctcctctcttgttaattatttgcttgttattaattcctataccaggctaggaacattatttcatgtggacagaccttgctagctaggtagttcctagttcctacgtacgaacatgcatgccaatgaagtaaacctgcctgttgctttgtatatatatgttaatcgcaggtactatgaagtctgcaatggttgctgctgtagtactagccctactgctgttctatgggactggaaacgccaactgcgcaacgctgcgtcccaccagcaggaacagcacggacgacatgctctccctgctcgacttcagaaaggaaatcagcagtgatccaggaggtttcctcagatcctggaacactagtggtagtagcgccgccgactactgcagctggaatggcgtcacatgcagcagaacgcacccaaggcgggtcattgaactcaaactcagcagccaaagcttgcaaggccgaatctctccatctcttggtaacctaaccttccttagaacgctgaacctgtcctacaacagcttctttggccagctgccccttcttagtcgccttgtcaggcttcaggaccttgttctaaacaacaaccagctgcagggtttggctcctgacgcacttatcaactgctccagcttgcactctataaaactttcgtccaacatgtttactgggccaataccagccagcatcggctccctctctaaccttatgtacttgtaccttgatgataatagcttcactggagccatcccatcgagcctgctaaac

SEQ ID NO: 4736 - DNA, 413 bp, Zea mays
  Clone ID: 700424624_FLI
ggttacttgttcactaacaaggtcgggacggcatggcccttggagctgcgtaccatcactacctgcagctcgccggcgaccatggcaccgccacacacgcactgctcctcggcgtacttatcttcctcgtcatccgcctagtatccgcaaggcgaaccggcacaacctcagccaacaaacgtaagcagcaacagcggcttccgctcccgccttcgcccccgggcaagctgcccatcatcggccacctccacctcatcggcgccgagacccacatctcgatccgggacctggacgccaagcacgggcgcaacggcctgctgctcctccgcatcggcgccgtgcccaccctgttcgtgtcctcgcccagcgccgccgacgccgtcctgcgcacccaggaccacatcttcgcgtcg

SEQ ID NO: 4737 - DNA, 592 bp, Zea mays
  Clone ID: 700424638_FLI
gaaggaagcaagaaggaggaccgagcaggcctaggccctagggtagtcccgtccggtccactgcggcgcaagtccggccggccggcgggctgactgcctggcgtcggtagggggcgacggcgatctatatctgtcgatgggctactggtgggaccgcgtcgtgctgccggtgcggcgggcctggctcggcgtcgcgtcccgcttcggggttcgccagaccgggctgtggaggctgcggcaggaggtgagcacgtgcgagtacgaggacgtgcacgtgatgtgggagatgctgagccgcaccacggcgccggcgccggcgccagcgcccaggcggcacagccggttccggccgcagccgcggccgtggggcggcaggttccgtctctgccgaggcttctagtggtagatcaaggccgccgcgcgcgtcagctccgatgatgttgctgcggtgcggggtactagtgattccgcttcattttggcttcttttttctgtctctctctctcttgttctttggttttcgctgcttgtatgtaccgtcggcgtccatccctcctggctctgagatgtacgtacttccattcctcctcgt

SEQ ID NO: 4738 - DNA, 708 bp, Zea mays
  Clone ID: 700424675_FLI
gcacgtctccaccgctccgcagggcacgccagggtatgttgatccagagtaccaccagtgctaccagctgacggacaagagcgacgtgtacagcttcggggtggtcctggtggagctcatctcgtccaagccggccgtcgacatcacccggcaccgcagcgagatcaacctggccagcatggccatcagcaagatccagaagtgccagctggaggagctcgtcgacctcggcctgggctacgacaccgacccggccaccaggaagatgatgacgatggtcgcggagctggccttccgctgcctgcagcagaacggcgagatgcgcccgccgatcaaggaggtgctcgaggtgctcaggaacatccagggcgagtgtctgacgtcggggaaggatggggacaagagcaaggacgggcccttctctcccaccacggttcacgctccgtgggacagcaggtccacgacgcccaacaccagcagggactaggatagttagtgcttgaggactgagaccggccgaggtttaattcgtgtctgtattgctgctgtgtgactgctaggcatgccatctgttttcaggcttcgtagttagttcctggtgatgtaaatatttgttttgttggtgctgtcaggacagagggaatgcacatacatgtgtaagagtggcgaatggtattatacatatatatacacgggtacttactgaat

SEQ ID NO: 4739 - DNA, 879 bp, Zea mays
  Clone ID: 700424703_FLI
agcaggtccagccggacgctctctcctgatcttcctccgccgtctcctcctgtcacccgcttgctttgaatccctttcttctgctccgccatcgcgacgcgccgacatgactgggtcttctaagaagcatgacctcaaatctaagcaaaaattggaaaagaagattagtttttacacaaaagtaaaagatgcagttacttccttaaatgctaagaagactgtcagtaagaaaaataaacagagtcggcgccagaagaagcttagagcatacgatctgtcggcactttctgagttcctcccagaaccagctgcaccagagcagaagactgaagcaaagctgaactgcaagtcaagacagacattagtggtgcaggagtctgctcatcttaaggctgtactggacaacccgcagttccagcttgacccattcgctgcgatccatcagcacctgctggcaacgcagccgcctgcagctgcaaagaaggacgacgcagcggggaagcaggggaaggtttccaaggacaagaaaagcaggaggaagaagggcacatcgtcaatctctcaggcaatggatatctgattgtgttccttcagtactagtaacttggtccgatgtcgactgcccgtgttccactagagggagctcatcgaagttcgatatcgatggttggcatagtttgagtaccagtagaggtagtactgtaccagccctcgcttttggcagcctgtcgattgatgtttgcagaatcggtgccatcaacatttggtgctactttggaaactggggattaggagaggattgagggagaaaatgaacttgaggggattgagagggtcaatcctatattcctatatgaggtggcaatttccaagcacaac

SEQ ID NO: 4740 - DNA, 626 bp, Zea mays
  Clone ID: 700424714_FLI
tcagattatccactgcggcctcttcctcctcttcctccgcccctcccaccatgattgccacccatctctccccaggcctcaagcagtaccgcttcccgtccccgctccactccacctctcacaaccaccaccttcccgtgcacctcccgctcccccgccgccaccgcaacttcgctaagcccgccgcggccgtgcctgacctcctcgccagcgtcgagtccgtggcctccgcggcctccgtcctggccgccatcgtgctcgtccacgagtccgggcacttcctggccgcggcgtcccggggcatccacgtctcccagttctccatcggcttcggcccggcgctcgcccgcttccgcctcggccccgtggagtacgcgctccgcgccatcccgctgggcggctacgtaggcttccccgacgacgacccggagtccggcttcgcgcccgacgaccccgacctcctccgcaaccgccccgtcccggaccgcctgctcgtcgtctccgccggcgtcgccgccaacctcgccttcgccttcctcatcgtctacgcgcaggcgctcaccgtcggcgtccccgtgcaggcgcagctccccggggttctcgtgcccgaggttctcccgggctcc

SEQ ID NO: 4741 - DNA, 587 bp, Zea mays
  Clone ID: 700424725_FLI
caaaggcagcacactcagctatccagcaaaagagatcgagaggcaggagtcatggccaccgtcagcgccgccgtggtgaccaccatcgttgcccgcgccgcgatcgccaggcccaatgctctagggctgcctgcgctgagggcgaggagcgagagggtgcggtgcagctacgccaaggacgcggccccagtcagcaccaagggcgcaggcgcgtcgctgctcgccgcagcgggcgcggtgaccgcgtcggcggggcccgcgctggcgctcgtggacgagcgcatgtccacggagggcaccgggctgagcctcgggctcagcaacaacctgctggggtggatcctcctgggggtcttcggcctcatctggtccctctacaccatctacacctctgacctcgacgaggacgaggagtccggtggcctctcgctctagatccacctcctctcctgttaatgatctgaatgtaaacatggtggtggtcatcggtgtaaatttagacatggctatttgcatctaagatccatcctctcctgttaataatgtttggagactacgtacgcctgaagcaatagcaactttgcgag

SEQ ID NO: 4742 - DNA, 503 bp, Zea mays
  Clone ID: 700424732_FLI
cccgcaggccttcggtctgaacgtcgaggcgaagctgaggccgaccacggacttcttcctggcgagggggttcagcgtcgaggaggtcggcgtcatggcgaacaggttcgggatcgttcacacgctgagcctggaggagaacctgctccccaagtacgagttcttcctggcgatggagtacccgaggtgcgagctcgtcaagttcccgcagtactttgggtacagcctggaccggcggataaagccacggtacgcgaggatgactgggtgtggggtgaggttgattttgaaccagatgctttcggtatcggatgccaggtttgagaagattctagagaagaagacggctaggctttgagaagacagcagtttcagattaggcagtgttgtagttcatttgagaagaactgtcactgataaaaccatcagttttcagagcacgtagcttattatcgtggccttgacggacgtgcaacgtccagaggcgaactgtttgatgtgct

SEQ ID NO: 4743 - DNA, 1239 bp, Zea mays; identical to SEQ ID NO: 4642
  Clone ID: 700424837_FLI

SEQ ID NO: 4744 - DNA, 1046 bp, Zea mays
  Clone ID: 700424842_FLI
agcatctgcctcgacgccttctgcgacagcaacccctccacgatgaccaagtgcaagcatgactaccatcttcagtgcattcttgaatggtgccagagaagctcccagtgccccatgtgttggcagcatatcagcatgaaagatcctatgagccaagagctactagaggctgttgaacaagagaggaacatccgagctaatccttcacgtaatactgctgttttccaccatcaaatgctgggtgattttgagatccctgtaggtgcagatgatgcagaacttgaagaacgcattattcagcacttggctgccgcagctgcagtgcgtaggtcacaccgtcatcataatagaagagatgggcaccagagcagatcagaagcaagtagccacccacagtttctggtgctctcagcagacgagcgcacaatctcaggtcaagaaggggactacgaacaagcatctgctgtagcttctggccgccctttacgtacacttgttgaacaagaacgcactcgagggttagcggatgcttccagtccatctctccgttgttctactcctgctgatagtactggtagatcaaacaataggatttctgggatcgaatctacacctgtggatcaagacggaactggaccatccgctttacaatcaatggtacagggatttcataatcaaagtgcaagtggatggagggagaggtggttttctcggagcaactctttactggatcttggttctgaggtgaggagggaggtcaacgcggggattgctgcggtgtctcgcatgatggaatggcacgatgcaagggacgggacgggagcggggccttctcctacctctgcatcaagatctggttctcagtgaaacactctgcacttgaaaggaccgatgcaaatgtaaagattaaggtatgtgctcatgctgtgctaatgaaagccttaaattcagtgttttgttttttttctggtggcgtactgtcactgttgactggcctacggatctgagtttttgtgtaattgtttggaagcaattccatggctctt

SEQ ID NO: 4745 - DNA, 1572 bp, Zea mays
  Clone ID: 700424933_FLI
gtgaaaagagaagtgaagattcttaaagcacttaaaggacatcagaatattgttcacttctacaatgcatttgaggatgattcatacgtgtacattgtgatggagctatgtgagggcggtgaactattagatcggattttggcaaaaaagaatagccgctatagtgagaaagatgctgcagtggtagtccgccaaatgctcaaagtagctgctgaatgccatctgcgtgggttagttcaccgagatatgaagcctgagaacttccttttcaaatcgaacaaggaggattcaccactaaaggcgacagattttggtttgtcagatttcattaagccagggaagaagttccatgacattgttggaagtgcttactatgtcgcaccagaagtactaaaacgacggtctggtcctgagtcagatgtttggagcataggagtcataacctacattttgctctgtgggaggcgccctttttgggataagaccgaagacggtatattcaaggaggttctaaggaacaagcctgattttcgtaagaggccttggtcaagcatcagcccaggtgctaaagattttgttaaaaggttactagtgaagaatccaagggccaggctaacagctgctcaagctctctcacatccgtgggtaagagaaggaggggaagcatccgatatccccgtcgacatatctgtgttatcaaacatgcgtcagtttgtcaagtacagccgtttcaagcaattcgcgcttcgggctctggcgagcacccttaacgaggaagagctatcagatctgaaggatcagtttgatgcaattgatatcgataaaagtggatcgattagtatcgaggaaatgcgtcatgcccttgcaaaggatcttccctggagattgaagggtccccgtgtgctggagattattcaagcaattgacagcaacactgatgggctcgtggacttcaaggagtttgttgcggcaactctccatatccaccagatggcggagctcgactcagaaaggtggggcatacgctgccaagctgctttcagtaagtttgatcttgacggtgatggatatatcacgccggaggaactcagaatggtgcagcacactgggttgaagggatctatcgagccgctgctggaggaggccgacatcgacaaagacggcaagataagcctgtccgagttccgcaagctcctacggacagcgagcatgagcaacgtacccagcccaagggggcccccaaaccctcaggctctgtgaattccggctcggccactagggaggagcaagcttaggaagttgccatacaatagccatgtgttctttgggttcttcagagtgccatgtgatgtttctggtttttagcatccaggttatgtgtgcagtgcagccccgagtgagtttcgaagtaaatattcagtgctttctttttctttccggaagagtgagaggtggaggtcaaaatggtaggcaagactcgccttcttctttcctttacactgtacagtgatactgaaatatgtacgatttttattataactgttcgtcgcaataaagttatttggagaagtg

SEQ ID NO: 4746 - DNA, 676 bp, Zea mays
  Clone ID: 700424946_FLI
ctcgactcgagctctgctgccgtggaggcggccaaggccaagaattcaagggtattttatagatgacgaaggcagcaactatttatgggagcaagacacagagcgatgctttgcggccagggccattgcgtccagaaaatattttcagaaataaatttcccacatacaagaatggttcaaatggtatagtaatcaagctggctgatggtcccgaaataccacctctcaaggagatagttgcaaaggagactgcatatctacttgatcgtcgtcagcgtctctctgtccgtgaacttgcgatgaagtttgagaagggtctcagcactgccacactgttgtcgaatgaggttaaatggagacaagtagttttgatggagcgggatatccttttgaagaatctaaagagtgtattagagtcactgagaggtcaagtgacaggaaaaactaaggatgaaatcgaggagtctatatctatggtggagatcctcacggttcagctctccaaaagagaagctgagttggttcaacaaaaagaagaggtcacaaattagcaaaatcattaaagcaaatgtgttttacattgttgtataacttatgtaaacatgtgttagtaatttgaggaatgaaaatctatttacttcaaatattccaaagttcttactgtcatgattcagtc

SEQ ID NO: 4747 - DNA, 1768 bp, Zea mays
  Clone ID: 700424996_FLI
gttccgcaggcgatcgcggtaccgccggagtccggccgttcggcgcccgaggcgtcccgcagggatccaccggcccaccccgagggggccgatcccaccaatgcggcggcaaggaagacaacgtggagcgtgctggcgcagacccccgccgccgcggcggaggcgaccccagagggcggcggcatcatcggcggggacgcctcgtggccggcgctcgtggagtcgacgcgcgcgtgccccaagtcgggctcgtccgactccctcaatgccctctccgatgtttccggcccgcctccgcaggaggatacaattgctgcttcatcggtacttccacatccagttgtgggggctaatccgattcccactgcccaaaaccctacctccatacctcctcgcacgcctgcggcttcctctcagcagaacggtgccacaacccagacatttccagttcggcgcagtggcaaccgtggaaatggtagcaatggtggcgtcagggctgccaatagtagcggaggtgacgggagcagcggcagtggtggtgatggtaactggaatgatggaagccttggtactgacagcggttgcaacagcagcaatggcgatggtcccatcaatttggatgataatgtccctggcactcgttgtgcccgtgggaatgacaatgacagcagcagaaatccttctggcaatggccactggaaccacaacatacgaggtggtggtggtggtggtgatgggaacaatagaaatagcagtggtagcagcaaccactggaataataatccccgaaatagtagtagtagcaatggcgttggaggtcgtggtggttaccggggtcgccgtgaccatgagagaggggctaatttctcccctaggaacttcccaagagttccggtaatgccatatcaacagcagcagcagcctggcatctaccagcctgggccctttcaccgaccaccaccaccggctgcccatttcatggtgccacagcatttttatgtcccatcatttccctaccttgctgatgtgcaaccttatcctgtctacctcccaccagtagaacagtttcagaacatgcatcttcttcggccacccatgcagcctgcttgggttcctcctcatcaggatcaaccaaatctccaagatagtattaggaatcagatagagttctattttagcacaaataatctatgccatgacacattcttgaggagacatatgaacaatcaaggatgggtacctattgacctaatcttagggttcaaccggatgagggcgtttacaggtttggtggacaccaactacatactagatgctatccgtggttctgagttattggaagtgcagggagataatgtccggaggcgcaatgattggatggaatggctgcttcattaaggccgtccactagtaaatcaggttcagatgccaagatgcagctgcatgccatattgggggaactgaatgaatagaagtcttgatcacggcgtgatggactgatgtacagcgagcgggtctattggaatcgggatgatttttgtttgacgtgatggctgcacgtgaaggcacattattcaaagggaaaataattttacttagggctagcaaatgtttttatggcagtctgtatagttgtccgaaaagaagtgaccaccctgccttctcattatggattattattattattaggtgtcctgttgaacgatttggtgaccgtttgctttgcttttcttggatcaaagtcacgtaaccgcagcccattcaattc

SEQ ID NO: 4748 - DNA, 228 bp, Zea mays
  Clone ID: 700425005_FLI
gcgatctagaactggagtttctgaaatttcagcggaatcgtcatttaccagtatcgaagagttccttgagccacttgagctgtgctacaaatcactgtgtgactgcggcgacaaggccatcgcggacgggagcctcctggacctcctgcgccaggtgttcacgttcgggctctccctggtgaagctggacatccgacagcagccactcctgcctcttgtcctcgggcc

SEQ ID NO: 4749 - DNA, 620 bp, Zea mays
  Clone ID: 700425034_FLI
cggagtcgatgcggctgtacccgccggtgccggtgaactcgctgctggcggagacggacgacgtcctgccggacggcacagccgtgcgtgcagggtggttcgtggcgtacaattcatatgggatggggcggatggagtcggtgtggggcgacgacgcgcgggaataccggccggagcggtggctgaaccccagcgacgggatgttccggccggacagccccttccggttcgtggcatttcacgcggggccgaggctttgtctgggcaaggagatggcgtacatccagatgaagtccatcgtggcgtgcgtgctggaggagctcgatgtggcggttgacggcgcgtaccggccccggcaggttgcgtcgctaacgctgcggatggcggacgggctccctgtgaccgtgaagcaaaggcgggactgacgagctgctgtcacaaacttgcaactccatcagccacccatgaagcctctgcagcaggacaaggcaggcaaagctgttgttcaccgacgagcctgaacaaaactgtggtttgccccaatgcgcttgcgcttgtctctgaaccaatgttttcgagtcgtctgagattaatggtccaaatcagtttggaccaatcat

SEQ ID NO: 4750 - DNA, 500 bp, Zea mays
  Clone ID: 700425046_FLI
cgccaaggtgaaccagaaggtagacgtgtacagcttcggcgtggtgctgctggagctggcgaccgggagggtagccaacgacagcagcaaggacgccgctgactgctgcctggtggagtgggcgtggcggaggtacaaggcgggggaccctctccacgacgtcgtggacgagaccatccaggacagggccgtttacatcgacgacgccgtggccatgttcaagctcggggtcatgtgcaccggggacgacgcgccgtcccggccgtcgatgaagcaagtcctgcagcaacttgcccggtacgaccgcaccgccagcgttgccggcgcgtgccaggacgaccgcggcgtcgaactgggacatctgcccaagggaaagcaaggtcgtcaccaagttgccaagagatcgttagacgccggatcatttttgggtggcgacgaggagagcggcaacttcgtggcccatcctgtttaaattttcagtttaactttactttttcggt

SEQ ID NO: 4751 - DNA, 564 bp, Zea mays
  Clone ID: 700425055_FLI
caaagagtgggcataggattgctggggcacaggaagatagccccataaaaggcaggaaaaggggcgctggggcacaggaaggtagccccatcaacggcaggaaaaggggcgctggggcacagctagatagccccggcaaaggcagaaagaggagtgcggcagcacaggagaataaccccagcaaaggcggcaagaagagccggcggtgaagctaccatcagctcaatgccggtgaaacagtgtacagcttaaccatatatcataggctggtcccttccaacgttgtttgcctgtcaaaaaagtttttgccccagtattcaaactgatgtaacaggaagggttagctgtttctgatgttgttttgtaaggagtatggacagttaggagggaaccctcattttcctgtagagattatccgagctaggctatacatgtctgactgtgtaatgcttaatagtttaatttatatcaaaaaaaaagagtttaacggcattgaatagaattattttatttaataaaaatatagatttatgtgattttgtacaatttaggtggagaagggat

SEQ ID NO: 4752 - DNA, 403 bp, Zea mays
  Clone ID: 700425071_FLI
agccaggagaaggcgggcgcgcacacctgctgcttggtgaccacgttcgatggagctgcacaagtactggggcgtggggggccggcggtgcggcagctgcgagggggccccggcggcggtgcactgccgcacgtgcgttggtggatccttcctctgcacgacgtgcgacgcccggcccgcgcacgcgcgcctgggccacgagcgcgtgtggatgtgcgaggtctgcgagctggcccccgccgccgtcacgtgcaaggccgacgccgccgtgctctgcgccgcctgcgactccgacatccacgacgccaacccgctggcccggcgccacgcgcgggtccccgtcgcccccatcggctccgaggccgccgccgcggccgtggaggccatgctgttcgggaccggc

SEQ ID NO: 4753 - DNA, 369 bp, Zea mays
  Clone ID: 700425120_FLI
tggtgagcgacttcgaggccgggctggagtacgccgtggccgaggccgtgctcgacaagaggcaggcggcgacagcgacggcggaaggggaggacagctgggagtaccttgtcaaatgggtcgacattgaggaggccacgtgggagcccgccgagaacgtggacaccgagctcgtgcagaagttcgagcagcagcagtcggggtctgcaggcggtgattgatggcggcagcactgcgccaccgtcgccgcaggtgatagagattacttgatgaaggtgattgcgttttattcgtcgggtattcaaagcactgcccgggttgtattttaggatgaaacttttgtgagtatcatattttcaccggaattgc

SEQ ID NO: 4754 - DNA, 582 bp, Zea mays
  Clone ID: 700425210_FLI
cgagcgaccctctgcgctcgcgcgaatcccgcccgagatcgccgccgatccgaagcaacggcaccgtgcccctccccctcgcgagatccgcgaccgccccatcccggcgccgcgggatccacgcctccgccctcgcccttccccacccccacccgctaatctcgcggtcgatccgcgcccggtcctgaccccgcctccgtcctcagcaccgccactccgtcccccatcttcggcgccgccgtctcccgctcccctggcacgcattcggggtccttgcgggcgacaagcacctccgtcccggaggcatctgccgctgcagcatagaccaccatgtcctcgctcggcagcaccgatgttgacgatggcaacgaggaggaggacggctccgcgagcacccccgagatctactgctgccactcccacgcagttcttgctcacgagatctgtgtgcaggttgatgtcctcgtggtgccacgccgacctcgccgccaccaagcgcgccacccatgtcctcaccgacctcgccaaaattggacggatcgaagcaccataataagtgtttagctttcctccgcgcctcgg

SEQ ID NO: 4755 - DNA, 1068 bp, Zea mays
  Clone ID: 700425224_FLI
atatgggtgtgcccgcagcatcatcgttgctgaaagggttgtgctaaatttcatgcagcggatgagtggcattgcgaccctaacaaaggctatgtctgatgctgcccgtccagcatgcatattggaaacaaggaaaactgctccaggtttacgtctgattgacaagtgggcagtactgattggtggcggaaagaaccacaggcttggtttatttgatatggttatgataaaagataatcatatttctgttgccggtgggattgcaaatgcaatgagatctgttgatcaattcctgcagaaggaaaaactcacaattcctgtcgaggtcgagacaaggacaatcgaagaagtgaaagatttgttgaagtacgctgctgagaacaaaacttcattgacccgtataatgttggacaatatggttgttcctcttgggaatggggatttagacgtttcaatgcttaaagatgcagttcggttgataaacggtagatttgagactgaggcgtctggaaatgtgacagttgatacagtgaagaaaatcggagaaacgggggtcacctatatttcaagtggagcattaacgcactctgtgacggcgcttgacatctctctcaagatagacaccgagctggctcttcaggttggaagacgcacaaatcgtgcttgactcccacagcattacgttgtggacgcacgcaagcaggatgacagagggaccagcgtggcaaaccagcttaaatagcttaataataacttggcgctgaggcctctgactgcaactacgtgggattcattcttcagtttcatgcacaaacgaccgcaatattgatcggatcagaataattggcaggacatacaggttttgttctagcaccaagtttgggagcttgcgttctgcggcagataggcaggccaggtaggtgtacctcctcctgggcccagccacagctcgacagcaggtaccaggtaggtctactgtaaacgggggatgtcgcactgaactcgcaataccaaagacaaaataacaaaaggtggagataagatgcttatcttactgccattggtgat

SEQ ID NO: 4756 - DNA, 557 bp, Zea mays
  Clone ID: 700425251_FLI
agcaaaggcagcacactcagctatccagcaaaagagatcgagaggcaggagtcatggccaccgtcagcgccgccgtggtgaccaccatcgttgcccgcgccgcgatcgccaggcccaatgctctagggctgcctgcgctgagggcgaggagcgagagggtgcggtgcagctacgccaaggacgcggccccagtcagcaccaagggcgcaggcgcgtcgctgctcgccgcagcgggcgcggtgaccgcgtcggcggggcccgcgctggcgctcgtggacgagcgcatgtccacggagggcaccgggctgagcctcgggctcagcaacaacctgctggggtggatcctcctgggggtcttcggcctcatctggtccctctacaccatctacacctctgacctcgacgaggacgaggagtccggtggcctctcgctctagatccacctcctctcctgttaatgatctgaatgtaaacatggtggtggtcatcggtgtaaatttagacatggctatttgcatctaagatccatcctctcctgttaataatgtttggagact

SEQ ID NO: 4757 - DNA, 1111 bp, Zea mays
  Clone ID: 700425267_FLI
tataatagcaaaaagctcctcccagcagtgcacgcgtgaagctcggcggcggccggcacggtgcatcctccgctcttgcctcacctcccggtccatcctcgctgctcacgcgtgcctcacctcgacagcagccttccctcgcgacagggataaggacttaaggaggcgtcgctcggtgcaaagaatccatggcatggggaggtctgttcttgtgcatgggccgccccacgcaggagcaacagaagtcctgccttgcagccgctggtggcttcaactacgacacagctctccaaggcgccacacgcccaaagtcagtgtctaccttgacctctgacgaagctggtggcgaaataggtgacaaggatcttaccgagcgtggattctttgtgaaccgatcgcgtgttctggtcggctcaggttctgacgcctttgtccatgccaaatctgccctcctctcatggaggcacttggctttagggtgggcgaacgtggaaccggacaccccggtgaaggtaggtacaaggttctgcatctgctacaaggagttgatcccctgggtgacgctgccgcttcagatagcgtatgtgaccgacgtcgattcagacacgtccaaagggtgctcccggtccaagatgtttgccttcggcagcggcactctacagggccatctgctggccggagaggagcggttctcggtacaggtggacgaggaggagagggtgtggtacgaggtgctttctttctcgaagccggcgcacgtcctggcgacgctgtgctacccgtatgtgcagctgaggcagaagcatttcgcgcagcagtcgggacaggcgctcgtcaggcatgtgtccacctgctcttccaagcagaagcagtagtagagctttgtggagatgcactgcacagagaatgctgtatgtattccccctttgaattctattccgacatggcctggtttggcggcgctggggcctgggtgggatgatatatgttcgggcattccgagtggagtttgcccatcccatattttaatttcttcatgatggtggtggatctgttgcagctgaatgaattaagacaggaagatatataaaattcatgcgcacacagaatg

SEQ ID NO: 4758 - DNA, 530 bp, Zea mays
  Clone ID: 700425273_FLI
gtctctgctctcaactgctgccatggcagccgcatccgacagcacccacctccctccctcagtcaaccacgacctcgacgaaatggcagccgcatccgacagcacccacctccctccctccgtcaaccacgacctcgacgaagatgatgacgatgaggaattcgacgaggacgacgacgacctcgttgacggaaccgccgacgacgacggcgaaccctccgcgtccccatccgaggcggctcgcctcgaggccgtgctccggcggctcaccgcggacgaggtccggatccgggtgcaccaggtcacgatccggggctgcgcccgcacgcgccgcgccgcggtcgaggcggcggtcggcccggacgtcggccgcgccgccactgtgcgggacctcgtgcgcgccgccgccgccgccggcgaccggctccgtcgcctcggcgccttcgacacagtctcgatcaccctcgacgcggcgccgcctgggatcccaggcagcgccgtcgtcgtcctcgttgacgtcgcggaggccc

SEQ ID NO: 4759 - DNA, 438 bp, Zea mays
  Clone ID: 700425275_FLI
gcggcggcttcgacgtgctcgccgtgcaccacccggagggggaggtgatcaactccgtcatcatcgcccgcaagcccctcccggtcgtcgacgagcacgccgtcgccggggtggggcacgcgcacgcgcacggcgccgtgctcagccggccctgcctctgctgcgagatggaggcccgggctcaccagaagatggaggaggtggccatggagcagctgccgtcctaggcacaagatggattgccccggccggcagcccatgcaatcgcattgcatctatctcatcgatctacttacgtgtctacaccacatgcgtgataataatctgcagattgacctggctactagctggtatattgtcaccgtgattgtattaagtttttgtttaacaaaagggtagaagtcgaagtccgagccggcgaaagaaaaaatactggag

SEQ ID NO: 4760 - DNA, 549 bp, Zea mays
  Clone ID: 700425331_FLI
cgcaggagtcatggccaccgtcagcgccgccgtggtgaccaccatcgttgcccgcgccgcgatcgccaggcccaatgctctagggctgcctgcgctgagggcgaggagcgagagggtgcggtgcagctacgccaaggacgcggccccagtcagcaccaagggcgcaggcgcgtcgctgctcgccgcagcgggcgcggtgaccgcgtcggcggggcccgcgctggcgctcgtggacgagcgcatgtccacggagggcaccgggctgagcctcgggctcagcaacaacctgctggggtggatcctcctgggggtcttcggcctcatctggtccctctacaccatctacacctctgacctcgacgaggacgaggagtccggtggcctctcgctctagatccaccctctcctgttaatgatctgaatgtaaacatggtggcggtcatcggtgtaaatttagacatggctatttgcatctaagatccatcctctcctgttaataatgtttggagactacgtacgcctgaagcaatgcaatagcaactttgcgag

SEQ ID NO: 4761 - DNA, 995 bp, Zea mays
  Clone ID: 700425463_FLI
cgcgcagcagcaggcgcctgtcttcttctcctacggcagcaacacaccagcgcgcaggggccttcttccccatggaaatcggctcccttcctcccatggcacccaggcccgctcctcccctcggccagccagggcgcggtggcccctgtccctgctccttcttcctcctcacgccgggctcctcctcctcgccatggaaaccagcagccatggcgcccccccttctcgagcttccttccccagcgcacaggatgccagtggctcagctcgaccctcctccccatggcgcctcttccccatgccggcggtcgtccacctctccccctggccgccatttcccagctgtcctcccctctgttctccccacggcagcaggcatggagattggctcctctctgcatggaagccgcgctccaatggatggcgccctcttccctttctccactgcgcgggagctccctgggccggcctcggcgaggtccatgaccatggcgcccagcagcaacatctccttcccccaaactgctcttgccatggctggcgccctgcgcagcgcctctgctcagctacctctcccgcagccccacaacgttggcgcttcgcgggtgttcgatgaaatgctcgggtgaagcggtatgtcgtggacagcatgccatgaggcccgctggatgcttattgtgctgcgcagccccgtccacggcgtcgtcgaccctcgctagccgtcgatgttgcgcttcgtgccttgcccgttcgacgaaataccgagccatgtggacagccatgcgtgtagtcacgacccgttcaggttgattgatttatagtttataatacgtatgctttgattgatgtcgggcagtgcatgtatatatgtgcagatgtgtgtaaagtgtttcggttatactctttggtaggatcgcgtttgcgattagagaacaagacgttaattgatgtgtacgatttgtagttgtctaattatattttggtcgatgatgtgc

SEQ ID NO: 4762 - DNA, 1012 bp, Zea mays
  Clone ID: 700425481_FLI
cagtggcgcacacagacaccacacgggttcatcttctagctcccctagattgcccggacggggtactggccaccagttcaccatgggcgactcctcgtcgtcatcggcagcctacatcaaaatggttcaccatatgatagagaagtgcatctgcttcaacctgagcaaggaagagtgcatggacgcgctggagaagcatgccaacgtcaagcctgtcgtcacttccacggtgtggaaggagctagagaaagagaacaaggagttcttcgagacgtacaacaaggaccgcgaggagcggaaggtggaggcggagacgatggcgcggatcgagaagatgctctccgaggcggcggcctccaagagctccgacgacgaaggctagctagctatagcacgcgatccgttagcttagctagctctctagagctatagatcatgcagctccgacgatcctctccatgcatgggaattgggagctagccttctcgtacgtacatgagaccattctatttaattagctgcctatatttatatcttgctacatacctagctagtacaacataacacgccgccactgcaacaaggaccatgcatgcatgatgtgtatatgtggtacgtctggttattattaggaccagaaaagttatgttttacgatgtagaaagatgcatatgcatgtattcgaccaatattacacataagaatctaccatgcctgtagctagctagggtcatgttaaagcaaaaggtaggcaggcttgtctatcattgactgtaaccttccgtgacacgtggcagctggcgcgcgaatccaccagtgatgtcctgtacctcatcgggggttgctacttggtacttgccgaggtagccggtgcttcttggcttgccgtagaaaatccttaagaccttctcgccaaatttccccatttcccgtgttttttctgtaaaaataaattgtttcatgtgaaatttctatatattcctataaaattcatgcgttctaaaggaggctt

SEQ ID NO: 4763 - DNA, 660 bp, Zea mays
  Clone ID: 700425581_FLI
accgccactaccaccagtaccacaccactccgcgctagctgaggacggtacagcggcacagaggtgcgacgtacgacgacgacgacgcaggcgccacacatggcatcccagctctccgccgccgtgccccggttccacggcctccggggcaacgccgcgcccaggtccgcggtggcggcgctgccgtccgtgagggtgggcaggaagaggtcgtcgtcgcagggcatccgctgcgactacatcggctccgccaccaacctgatcatggtgacgacgacgacgctaatgctgttcgcggggcggttcgggctggcgccgtcggcgaaccgcaaggcgacggcggggctgaagctggaggcgcgcgactccggcctgcagacgggtgaccccgccgggttcaccctcgccgacacgctggcctgcggcgccgtcggccacatcctcggcgtcggcatcgtgctcgggctcaagaacaccggcgccctcgaccagatcattggctagatccctacgtcgccgttgttaagatcagactcagcagcctcgatcgcgccgccggccggcagcaggtgccaggtggtgactttgtaacgtgtgtgcgtgcgtgtaacattgcatccatcttggttccaatggacatatagctcctgttgctcctct

SEQ ID NO: 4764 - DNA, 764 bp, Zea mays
  Clone ID: 700425589_FLI
ctcgacgtctactgcaacaacgccggggtgctgggccgccagacgcgcgccgccaggagcatcctgtccttcgacgcggccgagttcgaccgcgtgctccgcgtcaacgcgctgggcgccgcgctcgggatgaagcacgcggcgcgcgccatggcgccgcgccgcgcggggagcatcgtctccgtcgccagcgtcgcggccgtgctgggcggcctcggcccgcacgcctacaccgcctccaagcacgccatcgtcgggctcaccaagaacgccgcctgcgagctgggcgcgcacggggtccgggtcaactgcgtctcgcccttcggcgtcgccacgcccatgctcatcaacgcctggcgccagggccacgacgacgccaccgccgacgccgaccgagacctcgacctcgacctcgacgtcaccgtgcccagcgaccaggaggtggagaagatggaggaggtggtcaggggcctggccacgctcaagggccccacgctcaggcccagggacatcgccgaggcggtgctcttcctggccagcgacgaggccaggtatatatcgggccacaaccttgtcgtggacggcggcgtcaccacatccaggaacctcatcggcttgtgaatcaatgtcaatccgttccaaatatcccattcccatggctaggctaattagagaaggagagagagaaaactgctattagttgtacttgaagtgatcgattttcatttggttgattgattcatcaacaaaagtgttccagcaac

SEQ ID NO: 4765 - DNA, 611 bp, Zea mays
  Clone ID: 700425808_FLI
aaccggaatcacccagactggaacaggattgcagagtttctggatgatgttgccagaaggatgcggcaagaaggccatgatcctaagaaaaagtatgctctgatgggtgccgatgatgcagtgcatgacgaggcactatgtgggcacagctcaaagctcgccgtcgcattcggtgtgctgaatttaccggagggacggccaattcgtgtgacaaaaaactcaaaagtctgcagccactgccatgaggctgccaagttcatatcgaagatgtgcaacagagagatcattctgagagattcaagcagattccatcgttttgaaggaggcaggtgttcttgcagagggtacctctgaaagaaacaccagtcatgtgcctgtggttttgtttgttcattagcagagagcacatttattgctactagcagttctagcaccaccatatagcctgcatctgtagtgatttttctttataacattaggagggaagagacctttagaaggtaacaggtgtgtgtgttcaggaaacagaagctactgtccatagaaatgtgaagattttatatatgtatgaaggcattttggcatcttttactaaaaatattgttacaaac

SEQ ID NO: 4766 - DNA, 525 bp, Zea mays
  Clone ID: 700425893_FLI
tgatcctgtcgggcgggcagcaggaccgtggcgccgcggacgagcccgacggcgaggaggacgacgactacaagcacatgacggacgcgatgtgccgtgtgtacagcaacgcgcccagggaattcaccatcatcgacaggggcaggaggaactccgtttgcttgcacaggaaggggttcgaggagctgtacgtcttcagccccggatcccagtaccagtggtacggcaagtatgcctacgtggtcgtagggcctgccatgctggagcctgtgatgctgaagcccggagacacgtggcggggggctcagtacctgcgcaaccccaatctttaggcatgctagcagctgggagaattgatgaccctggacacatcaaatgttcccgtacgtgtatccagatcatcagatgaggtcaggcgagatgcaaaattggcaaccacaatggtctacagatgttggaaatgctgtccatatatagcgaattgctgatgacaaggttcaatattagaatgatgagatttactat

SEQ ID NO: 4767 - DNA, 688 bp, Zea mays
  Clone ID: 700425940_FLI
cgccacgcagcggcgccacaggagacggagacggagatgaagctgtccatccagtcgctcgccaggaagctgtccctgccgtccccgaagcggggcggcggcggcatcgtcgaggacgggaagaagaagaagaagcgctcgctgtcgcgcggcgaggcgccgtcgttcgcgtcctcttcttcctcctcctcctcctcctccgccaccacgacgccgcggtccgtgctggcggcggcgccggcgccggcgctggagatcccgcggcgggagctggaggccgtgctgcggcgcctgggccacgcggagccgtccgacgccgagctcgacgccgtggccgcgctcgccgcgcagcccccgccgtgcgacgccgacgccgacgccgacggcgacctcatggaggcgttccgcgtgttcgacgcggacggcgacggccgcatcaccgccgaggagctccgcgccgtcctggacgccgtcctcggcggcgggtgcagcctcgacgactgccgccgcatgatcggcggcgtcgacgctgacggcgacggcttcgtcggcttccaggacttcgcgcgcatgatgatggccagcgccggcacggccgacgcacgggccttctagtttagtgatccgccaagcatcgccgccatagccctgatgcgcgccggggaagggatcatttaaaatctactgc

SEQ ID NO: 4768 - DNA, 1202 bp, Zea mays
  Clone ID: 700426003_FLI
aacaggcagcaagagctgcagatacccctaatttctcttctgaagtgccagaagggaaaggtaagaatgatgactttaagggaaaggacttggagataggtggccctagaaatttatatatggatcaccaatcttccccaaatgagagacccatcaaagcagcagatcatgaaaacaactccaaggagtcaatgatagaaaatttagaggagccaactgttcgagctgctgacctaattggttcaatggccaaaaacatggatacccaacaggcagcaagagctgcagaagatacccctaatttctcttccaaagtgccagaagggaaagtcaatgacgatgaacagcggaatagtgcattaaggcgatcgaatctctcggcttttacaaggtgcaaaacataatatcagtgtcattagtgagttatgaaagcaacagtatgttgggtactaacagttaccacttttattgcaaggtaccatacatctgcggcttccaatcaaggtgggacaggattggtaggtagctgttcgccgcatgataacagctcggaggctgtgaaaacggattctacttacaacatgaagtcaaattcagatgctgccgcaataaaacaaggctccaacggcagtagcaataacaatgacatgggttccactacaaaggatgttgtgacaaaacccagcacaaataacgagagggtgatgttgccctctgctattaaggctaatggatacacgtcaacattccatcctgtgcagcagtggatggttccagataatgcgacagcagggaaagcgaaggctgatgaagtggccaacaatgcaggcagaaatagtcatcctggtgacgtgcagagcaacctgacgcaacaacatcgtccaacccttcattacgtccattttgagaatagtggatcaggtgccctgcaatgtggttcctccaatgtatttgatcccccacttgaaggccaggctaccaataactatggtgtgaaagccgggagcaactcaggcagcaacaaggggcagaataatgggagtacagctggtgcgagcacggctgctgcaaatgctggacggacagatacagagatacgggctatcgataaaagtggacctggaggtggcagtgggagtggcaatgacacatatgtcagacggcttgctgcgagcatgacaccacgacaagaacagctaaag

SEQ ID NO: 4769 - DNA, 879 bp, Zea mays
  Clone ID: 700426109_FLI
agacgacccgcacggcctcgatggctggcaatggcaggcctgcacagagatgatcatgcccatgacgatctccaacgagagcatgttcccgccgtccgccttcagctacgacgacaggtccgacgagtgtttccagagctggggggttcggccgaggccgcactggatcaccactgagtacggtggatataaaatcgataaggtgctcaagaggttcggcagcaacatcatcttctccaacggaatgcgagacccatggagccgtggcggggtgctcaagaacatctcgtccagcatcatcgcccttgttacagagaaaggtgcccatcatttagacttgaggtcttcaacgaagggtgatccagactggctcatagaacagaggaggcaagaggttgagatcattcagggatggattgatcagtatcatcaggacatggcggaaacatcttcctgaagacagggcaagtcagtattcttcttcttacacatggtggaaacagggcgtgtatcatcaggacatggcggaaacatcttcatgaaaacaggacaccttcctgttacggtcatgtttggatccatggaaaaaaataaaggacaaaaaatcaataatttacacactaaacatcagaaattgctgaatcttacacaaagcaggcccctttgtgaattagtaaggggtggtgcaggtgctgggacttcaatccgcgccagagcagtgatcgactgatctcgcaggcctctggccagcggaccaaggcagtcttgagtcttgactcagtttctgttttttttaactgtattgtttcttcttttgttctcggcaaggaacagtcttgacatttttctctgttttatgcatgtagattagggctgggt

SEQ ID NO: 4770 - DNA, 639 bp, Zea mays
  Clone ID: 700426114_FLI
cgtggagtcatttgggcccgacaggaaggagttgagagctactcttccgtaggttgggagaatggcagtcctcaatatgatatgatatccaggagaaataaacattgatgaagaaggcctcagacattgctggaattcttttgttggcaaatgaacctatgtagagatccgttgtcaggaggatctgcttagggcttgttcggttagccttcaatccatgtggattgagtgggattggatgggtttgaatcccacgcaagtcaaacttcttcataattttttccaaacccattcaatccatgtgtattgggaataagcgaacaaggccttatttgttttgcttcccttttccatttctacaattcagctttaactgctgctggttggcttcttattgaagctaatatcgtctgcaattgcttcggtccaaggaaatcgaagcaggagattataaatttgctcacgcctctcgtctatacctgccactcttagctttagttcggtaatggtacatgtaggactgcgtcgttacacttcgactggtcgattaattttatttaataaatgtggtgcatggatcggacagtgtgtaactcagaatatggtgcatgcaattgccgtgtttggtttctagaccct

SEQ ID NO: 4771 - DNA, 773 bp, Zea mays
  Clone ID: 700426128_FLI
cgacaaaactttaatcggagtggtttccctggtcttgacgaagagtttcaaatggctcaagactattttcaacccattgctggtggtatccttcttgatgtcagctgtggcagtggcttgtttactaggaagtttgcaaagtctgggacatactcagctgtgatcgctttggacttctctgagaatatgctccgccaatgctatgaattcattaagcaagatgattctctcctcaatgtgaatctcgcactcgtgagagcagatatttcgaggctcccttttgcttcttgttcagtagatgccattcatgctggagcggctatccattgttggccctcaccctctaatgcggtagctgaaataagccgcgtcctgaggcctggtggagtgtttgtgggaaccaccttcttatcctctcccaggaacaacccattctctgttgaagcactaaggccacttagacagattgttggaccagttaacaccagctacaactattttactgaaggagagctagaagacttgtgcaaatcctgtggccttgtcaactacagcagcaatgttcagaggtcatttatcatgttctccgggcaaaagccatactgaagaatcctgtcaaatccaaactctgttgtttcttcaggattccttgcaaaaacacgtttagaagtatttgcgtatatttgtgccatactgtgcataggttccttaatttctgtactattccttaatgtattcagtaccaaaaaaaaatgcatgctgcagactcttag

SEQ ID NO: 4772 - DNA, 1527 bp, Zea mays
  Clone ID: 700426203_FLI
aagcaaacccacaaattccaacacccctgcctctaccgccgctgcagcttcggccagcatttctcagcagcagcagcagcaccttcagatgcaagcgcaacaaaagcaccagcagcatcagcagctaattcagcatcaccatctgaatcggcccagatctgctgcaccaagtacacagaacagtgcaggtgggtaccaagaccgtataaacatggctaattttcagaatatgatgtacccatcaagtgctgcccaagggagagttcaatccccccagttgaaggcatcctcagggagagggacaccttcatctactgctacgactacccctgccgccacaccccctaatttgattatgatgaagaacagtagtctccaccagcaacaagcaaaagtccctatgcaggctctctacactcctggtcaccaatcacagacttccttaagttcatcaaaggtaggaccttctctaactaacctttctaccggaggaggggatctatctcgatcttcaaatgcccctgttgcttctggttcaccatccaattcggtgtccaaaagtaccggcggcagcccacccgccacaggaaatgcaaagggtgttcagcagcctgtccaactgccatcaccacagcagcagtcagccaagaactccgcgtcgacgtctggctccaggactactcccacgaatcatttcagtatggccatgccatccatccttggccagcagcctaatgcatcgcctggttccaatcctgggagcaagcagcactcacatacgcagccagcatcgatgaaacagcagccgttcccgcaaggccatttcttcatatccaacacgtacgctcctccggctccaggagccggaggtgctgctgccctaggcctctaccagaagcgaccaggcgacaagacgcagcagcagcaacagcagcaggcatcgcaccagcagaacgccatgtcagctgccgccggcaataacgtgaaagcgctccatccttcatccggcgggtttatgcatctcgcagcccagtctgcaggcggcatggcgcacacccacgtgtcggcggggcaactgactttcggaacaatgccgacgcctttaaaaccgtcaagcgaccagaagcctgctgccggaaaataaacagtccagacgaccatgcatcggagtggtaaacctgaactggtcttgcctgttcagcggaagcccagcccaaatggcagaatcgcaacaacagtagcagcggcagctcaaaagaacccgcatggaagctcaaatggcccgcttggttgctggtgatgaggaaggaaggaggggtgccgtggccgtgcaccagttcgttccgagcaagaagcagatgtctcgttaacttaaaacagagtattcagattccggaatggttgatgggggagtggtacttcttttgtgtagttgggctggttatcctcccatggtgtaaaggccgcggaggaggaggtgcatagaatttgtctcttagcccgtttttttttaattttattttatgc

SEQ ID NO: 4773 - DNA, 443 bp, Zea mays
  Clone ID: 700426218_FLI
gtggaaacaacaggacgtaggcgctctggtagcaggaacagcgatggttggcctgagctcaggattcatcttcgccgcagcagtgtcagtgacatccgagctctttggaccaaacagcatcggtgtgaaccacaacatcctgatcaccaacatcccgctggggtcactcctctatgggcagatcgccgccatggtgtacgacgcgaatggacaaaggatgacactgatggataatcgcactggcatcattgacaccatgattgtgtgcatgggggtgaagtgctactcgaccaccttcctcgtgtggggttgcatcacattgctggggttagtgtcgagcgtagttctgttcataagaacaaaaccggcttatgctgctgctggtcggtcgagttgtaagcaccttcaccaagtttccagttaacggggggaacttcttggtc

SEQ ID NO: 4774 - DNA, 527 bp, Zea mays
  Clone ID: 700426259_FLI
gtcggccccatcgccaacgtgccctacttccgccgagtggctgccgctcacaagatacaccacatggacaagtttgagggcgtcccgtatgggctgttcctgggaccaaaggagctggaggaggtcggtggcctggacgagctggaaaaggagctcgcgcgaatcggccggaccatctgatggattcgtccggattccggcgcggcgatctccgctccgctccgtgattccggcgcagcctcatggttggggagccgacgaccagaacctccagaagggatttggtttggatgcgcgagcctagatcttgacctgcatttcggatggtctgtggaggcacagctcgtacctggagatgtctagtgccatggaattacttttcttttctttttttcctgacattttcacgccggcgtctttatttgtgaagacgtcgcacgttcgggcccctgtattactgttcttatggctaggattctgtatataacttgtagggacatgttatgaaccaccagctcaatgaagct

SEQ ID NO: 4775 - DNA, 457 bp, Zea mays
  Clone ID: 700426261_FLI
gtgtggcaaaccgcggctgctctatccgtgtggggcgggataccgaggcaaaagggaaaggttacctggaagaccgtcggccggcatcaaacatggacccgtacattgtgacggggctactggccgagaccacgatcctctggcagccatccctcgaggcggaggctcttgccgccaagaagctggcgctgaaggtgtgaagcagctgaaggatggttcaggcaccaatataaaccggtccgcgacaagattgatctttgtgtccatggcgtgggtcttgcgactctctgctcggcggtgccactctgtacaaaatcacggctgtctttgattcatcggatattcggatacgtttgtttgttactttttgcttggacacccaccatgtttggaacttttttgggctccgtttgggggctgaacgatggtcagtggaaattttaaaaattcgtcgtct

SEQ ID NO: 4776 - DNA, 1667 bp, Zea mays
  Clone ID: 700426274_FLI
tgcaaaccatcctagctggactccaccatcaactgagtacatgcattctcgtttgtgctgtcaaatatgcaaagttgatatcattggtacagacaatttacttgtttgtgatgcttgcgagaggggagtacacttgaaatgccttcatcagtatggcaataagggcgtccccaaagctgagtggcattgttctgcatgcctgactcagagtaagggaaaacccttgccaccaaaatatggcaaggttacaaggactgtagttgcatcaaagactgctccacctggtggtggagcacagctttctttgcaggaatcagcagaaaacatggctgcaaaggaaaatcaccaaaagttggctgcaaatggaaatcttatgaagccattctccattcatggtggcagcacagtacccgacagtaatgtattggcactgagtgctgtcatggctggttcacaatcacaattagtttctaccttgagaccatcaatagtcgttaaagctgaaacaccctctaatggaaaggaaggaactgggcaaccatgcaatactgcaatacaacctaatgtgcgatcatcttctcttaacaacagattgagaagtgattcctgtttgaaccctgctgattcagcaaatgaaatcatgcatggtaagcatgctgcagaaatttctggtgttgaagcaaaggtcaagtctgaagcaaactctgaggttgttgtgagtacagatgaggaattggttcatagcagtggaacatcaatcgaaactgaacgagccaaggttgtcgctattgaagaaaacagggcacaatcaacctttgagacagataaaatgaaagttggggaaacaactatcaacacaggaacaacagatcaatgcatcaatactgaagaaaagctccccagtttagcaacttctgaggcacacacaatcactgacgtgaagatgactagcaatacaggaataccagtacagcaacacaacattgctactattgaagagaagacccagattgatgcagtgtctgatccacatccacatgcaatccaagatattcaagatatggaaatgggcaccaacaatggaccacccatagatcaaacaagcagtcttgttgaagaaaacccccctggacaatcctcttcaattgctgatgcgtgtgtcactgctaatactggaataccaacagatcaaacacagcatccaaatgagtcaactgaaaatgcagtaaagaaatctcccaacagagaactatataaagaaaaaccgggctgcaacataacctcagatattacccaaaaagtaacttcaaatggcatcatgtgccctgaggacaaaactttatgtgttcatgaagataaagcagtgggttgtgacacagaagcaaaagaagaaaactaatttagtagcaggttgcatccaattttcattttccaggtgtgtttgtaatcaaactagttattagaagtcttatgtctgaaaatcttgcctattttgatttatgctgatagtgattcttttaaagtacattatttgaaactgatgtttgtagttattctttacttattatagatatgtcaatcacattagcttatttgaactcatggtaataagtatgcttaagtgacctttaaggcctgtattttattgcagcacatgcttttccccc

SEQ ID NO: 4777 - DNA, 744 bp, Zea mays
  Clone ID: 700426285_FLI
gtgcgcctttcttcgtgacaaggttccgggaggctctgttcttctactcggccttgtttgatgcgctggacgcgaccaccccaagagacagcaaccagaggatgctgatcgaggagaacctcttcgggagggctgccctgaatgtcattgcgtgtgagggcacagaccgagtggagcgccctgagacgtacaaacaatggcaggtgcggaaccaacgagcaggcttgaagcagcagccattgaaccctgatgtcgtgcaggtagtgcggaacaaggtcaaggattgctaccacaaggactttgtgatcgacgtcgatcaccgctggctcttgcagggatggaaaggccgcatcctctatgccgtctcaacatgggtggcaaatgatgccccctcttacatctagctgttctgttgactcacttgtctacaaattttaggtttaggtatgtcatctggatatatctagtgacaagtgtgttcagtgggttacatggactcacttgtgattgatggtaatgcgaactagatgcttatcactcaaccatgttgttgcatagtgctaaacatgattagatctaggtcctgggtctgggcaatgtcctctgcagcatctgccgtgtttgatcaatccagtcagttgatcaggttgtaattgacacttggtcctctctgtttccggtgtgattactgcgctgtttcagacttcagaatcgttatcatgaactgatggattttgtctgtct

SEQ ID NO: 4778 - DNA, 260 bp, Zea mays
  Clone ID: 700426301_FLI
gtgggatctgcgtcctgctgtctcggacgcccattttgcccacgagctggtcgtcacgtgctgtcgctttttgtctgggaaagatagcgtactgcttgctgtatgatactttcatctgtgttcggaagtttgtagcgcttcatatcctggaagggagtaaagaaaatgtccatgctgtccggtgagaatttctttccccgtgctgtgtctgcgagtcaaactaactattgagcgatatgagcatgcattggcatcagttt

SEQ ID NO: 4779 - DNA, 238 bp, Zea mays
  Clone ID: 700426373_FLI
ggggttccggttccgccacacggacgaggagctcgtggtgcagtacctccggcgcaaggccatcggcgtgccgctccccgccgccgtcatccccgtcttccgcgacctctacagccgcgacccctgggacgtcgtcgccgtctctgcccctgatacgaggagcgagggggagaaatacttcttcgcggtgcggccggcgagcggcggcaagagcagcggcgctggtactggtagcagg

SEQ ID NO: 4780 - DNA, 746 bp, Zea mays
  Clone ID: 700426385_FLI
caacatcagcgggggccacaacgacgacctcgccaggtcgctgttcccgggcatggatcaccagaaggcgatgcggttcatggatgacaaagaagctatgttcagaaagttggcgcctgggcagctgaagcccgtggatgggctgcaggagctgtgcggatggatggaaggccgcgacctgaagcgcgcggcggtgacgaacgccccgagggcgaacgccgagctgatgctgtcgctgttgggcctcaccgacttcttcccggtgctcgtcatcgggagcgagtgcgaccgggccaagccgttccctgacccgtacctcaaggcgctccagctcatcggcgcatcgcctcaacacaccttcatatttgaagactctgcatcgggggtccgggccggtgtggctgccggagtgcccgtggttggcctgacgaaggaaccccgggaaggtgctgaaagacgcaggggccagcttgctggtcaaggattttcaggacccggagctgatgtccgtgcttcaacaggtggaggtcgaacccgcagcggcgaatgcgcaaggctgatgcgtcggtcactgcggacaactaagaaatgaaatgtcgtgctggactagccttcagcgattctttcagagtggaatagctgtgtaactgcatcgtgtaataaactaactccggtcggttcctcggctggaacctggagactagcttcttggtggattcaaacagggcccaaatagaccctaagtt

SEQ ID NO: 4781 - DNA, 632 bp, Zea mays
  Clone ID: 700426407_FLI
gggcaagactatcgggtacaaagttggaacaatgattgagatccccagggcagctctggtggctgatgagatagcggagcaggctgaattcttctccttcggaacgaacgacctgacgcagatgacctttgggtacagcagggatgatgtgggaaagttcattcccgtctatcttgctcagggcatcctccaacatgaccccttcgaggtcctggaccagaggggagtgggcgagctggtgaagtttgctacagagaggggccgcaaagctaggcctaacttgaaggtgggcatttgtggagaacacggtggagagccttcgtctgtggccttcttcgcgaaggctgggctggattacgtttcttgctcccctttcagggttccgattgctaggctagctgcagctcaggtgcttgtctgaggctgcctcctcgttggcaaccggattgcctgctgctggtggatgtggtgatcaacagtattattacagagccatgctatgtgaacattactagtagcagtgctcataaaagctacaatcccatctcccttttttttccagtcatgtaaaacttccaaactgctccatggttcaaaactctgttcttcaatacatcatcaattatcgattt

SEQ ID NO: 4782 - DNA, 547 bp, Zea mays
  Clone ID: 700426440_FLI
gaaatgcagcccagcgcaaactatttgatgaactgggaatagttgctgacgaattacctgttgaccagttcatcctccttgggaggatgctttacatggctccttcagatggaaaatggggcgaacacgagttggattacctcctgttcatggttcgtgacgtgaagctcaacccgaatcctgaagaggtggccgacgtcaagtacgtgaaccgcgatcagctgaaggagctgctcaggaaagctgatgctggggaagatggcgttaagatgtccccttggttcaggctggtggtggacaacttcctcatgggttggtgggatcatgtcgagcaagggactctgcagggggcagcggacatgaaaaccatccataaattgtaagcctgtagtcttgtagatccgcgaagcacgtgctgtgctccgttgagaaataagcgtttctgcaggtgtttgcgctgcctttgttttagccatcattctgatggaaatagtcgataaagtcataatagagtgctcttaaatagggaacataactatttatattg

SEQ ID NO: 4783 - DNA, 730 bp, Zea mays
  Clone ID: 700426539_FLI
gctagcgatagtgagaaagatatggcaataagtacggctaacagcattgtctctgcgctgaacagctacagcaagctaactggtctagtggtgagcaggaagagatgtgactcgattggcatcccagcactcagttcgtcgttaaaactctctcttggtagaatcaaacagagctttgtattgactgactcccgcttgcctgacatgccaattatttatgctagtgatgcttttacatcattaacaggttactcaagagaagaaatattgggctgtaactgcaaagtcttaaatgggccaggcactagcttggaggttttagaggagataaatcagcatatttgttctgagcaggcatgcacggtggatctactgagttacaggaaagatggaagttcattctgcgatcatctacatgtatctcctatccgagatacttcgggcaaggtggcctttcatatctgggttcaccttgacatgggtgcaaagcacgattttagtgggctgacccccgagaaatggctgcttggcgctgttggtgcggtgagggttgctgtgagaggcttgtcggcatcaggtagcctgttgagaccaccatcccaatatcagttttagtctcctcgccgtttcatgaccacggcgaccggccttccacgatgtacattgctgcttgctattctgtgtaaagcaactgcttagcatgacaaagtaaatgagttcgttttgaagg

SEQ ID NO: 4784 - DNA, 580 bp, Zea mays
  Clone ID: 700426618_FLI
atgattacttgtatggttcctgcaaggcttctccaaccccacaccatccatggatgccctgaccttgaggtgctaccgctactcacctagtgtcgccatggttccgatgaggaagacctcgaggacgacgatgacgagagcctccatctccacagatggctgctcgagttctgagcccaagaagaaatcccactctgtcagcttcgctggcaaggccaacaaggtttacgaggacaaggacatgggaatcctctgctacaccgacgagaacggtgaactggtgtgcgagggcctagacgaaggcccgaggctgacgtggcaggacatggagaaaaaaaacgagaatcaagaacgtcagaggaggcagaggacagcgccgcctacggttggtaggatcgactggagcagtctccatgctgcagttagcatggggaaaaactgaaacaagtttcagtatcgcgcgtggtgtgtttttgtttgcttgccttgtgttttagaagttaagatgtaaagttgttgagagtgagttttaagaactcctgaagatgctcttgagcatataaaaattatgttgttaaat

SEQ ID NO: 4785 - DNA, 1014 bp, Zea mays
  Clone ID: 700426675_FLI
cgatggcccccggcctattcgggctcgcctaccatctctcctccggtccttcctatcataccggcgggcggcgcggggcagctaatcggcaatccggcttcgcctcgtcgcagtccaatccgcactcaccgccgccctcccgcccctcacctgcccgcggcagtgtcggagtaaaccctaccggacctatcgtcacgcgactgcgggagttgcttgcttcttctgccgctctctcgctccgtcccttccgcccatggagacctcgctgcgcttgcgcagtggcggcggcctccgcatccacgccaaggagaagctgcccctcggccacagctcgctgctgcaggctcatgcggagctcgacctccacacaagccccgccggagttactaccccgagttatctcgctctctttgtcaggcacttctactcgcagctatcagccaatctcggagctggcgtccagttgcacaacggcgatgacctcgcctacagttttcgcgccaagaaggccgtcctgttcaaaccagataatgggttcctaggtctgaaccttaaagggcgcctacttaccgataaagagttgaagccgacgaagacaactggatccgttgaactggcatggaccatacttgacttgaaacagggccaagacgtaaggctcaaagttggttacgaattgtgtgacaaggtgccttatttccagctcagagagaacggttggacgctgaatgcttatatggatgggaaatgggatgttagatttgaaatgtgaatccacttgctcagtagtgttaccaattctacttgtctgtactgcacttggaactgttgatctggtaatatgtaaactggagagctttccatattcatctagttctgaagcgtacgttgttggctcactgcatcatcagctttggttctagtagccgctattcatccaaacgtcacaacatgtaatgtgacgtgggaattgagacttcatcatcattattatatacttagggctagtttgtc

SEQ ID NO: 4786 - DNA, 850 bp, Zea mays
  Clone ID: 700426684_FLI
ggaggtcccaaacctgttatttacagggattttaagacatcgaatgttcttcttgatgtggagtacaacgcaaaactatctgatttcggtttagcaaaagctggtcctcagggtgataaaactcatgtatctactcgggttgttggcacctatggttatgctgcaccagagtatgtaatgacagggcacttgacatctaagagtgatgtttatagcttcggagttgtgctactcgagatgttgactgggagaagatcaatggacaagaagcggcctacgggggagcagaacctggttgcatgggcaaggccttacctaaatgatcggcgaaggctctatcagcttgtagatcctcgcttggggctgaactactctgtcaaaggggtgcaaaaggtcgctcagatctgccactactgccttacccgtgacagtaagtctcgcccatcgatggatgaagttgtcaagcaactcacaccattacaagatctaaacgacatggcatctgcttcgccaaggcctcgctcaactcagcgcggaaaggtgcatcgatgacaacccggttctgttgtaagaagagcagtgtggtcctggttgcttgatgcttgtttggtttaattgtatagcaaaattaggtgttgcctgccgatacctggagatgtgactccgcctgatgtgtcgctcaggtcagtcacactgctctgctgtttggctggttgccaaagcaagataacgatgtatctggttgcatcatgtaataattattataattaccatttaacttctggcgggggtacatcatgtaatggttggtgtacacccaggttagtaatcttaatagtgtttggctgac

SEQ ID NO: 4787 - DNA, 953 bp, Zea mays
  Clone ID: 700426716_FLI
ccttcatccacgaagagctgaagatatcacatgactagttgcagttagtgtggcttttctccctgcttggtcctgattgtgtgctttgccttgcaaaggaaggaatcatgacctctgttgttcagagcgtttcaggtgaccacagggctgaggatcaaagtcatcagaagaagcaaactgaacctggggaccagcaagaagccccagttactagttcagatagccaaccaacagtgggcacaccatcaacagattatgtggcaccctatgcccctcatgacatgagccatgcaatgggtcaatatgcttatccaaatattgatccatactatggaagtctttatgcggcggcttatggtggacatccattgatgcatccaacattagtcggaatgcatccggctggcttacctttgcctaccgatgcaattgaagagccagtgtatgtaaatgcaaagcaatacaatgccatattaagacggcgtcaatctcgggctaaagctgaatcagaacggaagcttgtcaagggccgcaagccctatctccatgagtcacggcatcagcatgccttgaaaagggccaggggagctggaggtcggtttctcaattcgaagtcagatgacaaggaagagaactccgactcaagtcaaaaagagattcagaacggagttgcgccccaaaagggtggccaaccgtcaacccctccgtctcccaacggtgcgtcgtcagcttatcaggcgcctagtcgtgaatgatgattcggaactcacaactgaagagattttagtccctgacgctagttgtggcagcagctttgtacagtaagtgctagcgggcagcagcgaaatggtgtcatagaaaaacgttgacgagtcagacaggttttggagtcttggttttttttcctctgtttattttacctgtctgcaattttagtagctttgtgtcccttc

SEQ ID NO: 4788 - DNA, 487 bp, Zea mays
  Clone ID: 700426721_FLI
gacttgttatggatttaaaccgactcaatctcacttaatccacatggattgagagcgaaccgaacaaaccgtaatatgtgtgttcttggggtggaattttggatggtaatgtacaaggacgagtggattaatttacagtgatgtcggaggaccgacaagggttgcagtagctccacgcgaaacgcgactgttgagttcgtccatcgaacagctacacaccgttattcatgctacacgtagctcgcgttcagaatttcagatcaaaagagaacaaaacggagctcaagttcagagtggacagagctggcaaaaacctaaggaaagaagtcgtcgtcgccgggcagccgactctctcctcaacacaaggacgggacgacgccgtccgacgacgccgacgccgaccccgcgggcgagaagcacgccgcttcctcgtgctccagcgcgtcgtcgtcctccgagcaccgcttggcgaagcggcccttgacgc

SEQ ID NO: 4789 - DNA, 1297 bp, Zea mays
  Clone ID: 700426784_FLI
atccaaagcagggaccgaatggacatggaccggccggaggaggaggggcagcagcggagggagacgatgacgccggtgctcctcaggctgttcggcgtggacgtccaccggggtggcggcagcggggagccggaggagtcgccgatggacctgaggaagagctccagcatgcccgacctcaccatcaacccgctgctgtcgccggaggagaaagagggctgcaaggggtacgcctccgacgacgcggagctggcgtccggccagcagaagcgccgccgtcgcaaggcacaggacaggaagaaaggaattccatggaccgaggaggagcacaggaagttcctggacgggctaaggcagctgggcaagggggactggaggggcatctccaagggcttcgtcaccaccaggacggcgacgcaggtggccagccacgcccagaagtacttcctccggcagaccaaccccggtatgaagaagcgccgggcgagcctcttcgacgtcggtatcgcggactacaaggacaaccaggtgccaggccctcagagcatcgtcgctgccaaaccggcgcctacgcaggagataatccacaccgaccgcggcgacgtccccataccaagatatagaggcctcggagagattttaggcagtaacatgcaggttaatcaactgactgactactactatttcaacaagaactcccatgttcccgcggggacttcgctctccatggcctccggcctggaaacggcctcgaccgtcgacagcctggagctcagcatcgccgtcaacggcctggagctcagcatcgcgcccccttcccggtgcgtctgcggcggcgcggcgggggccatcaaggttctgtgactcggccgggacgccgagggagctactcgcatttggcttcccctgcgagcatgcgtttcatcaagtattatcagcctcgtcaggctgccgcgcgcagccgggtttcggtcttgctggttgtgttggtgtgttctgttctgttttgttgtgcgcaaggaatgtttgtgaagtgcattgcgttgtaatacactaatactagcagtgttgtggaatggaattaggggagagggatcagctgggatttgggggttgatgggtccctgtctcgacttcgagtgggttcgtttcgtgttccaatccgaggaggcggcgacgggcgcaaggcgtcgtgtgggtgtggctctgagctccccgatcccgcccaataattggaccgtgccgtccaaaacgcatacgccaactaatcttcggaagaaagtcgcagctttacgtt

SEQ ID NO: 4790 - DNA, 1644 bp, Zea mays
  Clone ID: 700426832_FLI
tccaaggaccagtttatgtcggaactggctgtgttttcaaccgaacagctctatatggttatgagcccccaattaagcagaagaagggtggtttcttgtcatcactatgtggcggtaggaagaaggcaagcaaatcaaagaagggctcggacaagaagaagtcgcagaagcatgtggacagttctgtgccagtattcaaccttgaagatatagaggagggagttgaaggcgctggatttgacgacgagaaatcacttcttatgtctcaaatgagcctggagaagagatttggccagtccgcagcgtttgttgcctccactctgatggagtatggtggtgttcctcagtccgcaactccggagtctcttctgaaagaagctatccatgttataagctgtggctatgaggacaagactgaatggggaactgagatcgggtggatctacggttctgtgacagaagacattctcaccggattcaagatgcacgcgcgaggctggcggtcgatctactgcatgcccaagcggccagctttcaaggggtctgcccccatcaatctttcggaccgtctgaaccaggtgctccggtgggctcttgggtccgtggagatcctcttcagccggcactgccccctgtggtacggctacggagggcggctcaagttcctggagagattcgcgtacatcaacaccaccatctacccgctcacgtccatcccgcttctcatctactgcatcctgcccgccatctgtctgctcaccggaaagttcatcattccagagatcagcaacttcgccagcatctggttcatctccctcttcatctcgatcttcgccacgggcatcctggagatgaggtggagcggggtgggcatcgacgagtggtggaggaacgagcagttctgggtgatcgggggcatctccgcgcacctcttcgccgtgttccagggcctgctcaaggtgctggccggcatcgacaccaacttcaccgtcacctccaaggcctcggacgaggacggcgacttcgcggagctgtacatgttcaagtggacgacgctcctgatcccgcccaccaccatcctgatcatcaacctggtcggcgtcgtcgccggcatctcctacgccatcaacagcgggtaccagtcgtggggcccgctcttcggcaagctcttcttcgccttctgggtcatcgtccacctgtacccgttcctcaagggcctcatgggcaggcagaaccgcaccccgaccatcgtcgtcgtctgggccatcctgctggcgtccatcttctccttgctgtgggttcgcatcgaccccttcaccacccgcgtcactggcccggatacccagacgtgtggcatcaactgctagggaagtggaaggtttgtactttgtagaaacggaggaataccacgtgccatctgttgactgttaagttatatatataagcagcaggtggcgttatttacagctacgtacagaccaggggatattgtttaccacaaagttttgcttgtgttgatatgcattcttttgttgatataatttatactttgtggagagtggctgacagacgagttttgtatgctacgaaaaacaaagaaattagtttgcattctttcactttggtgcatctccatgagaaatt

SEQ ID NO: 4791 - DNA, 1689 bp, Zea mays
  Clone ID: 700426833_FLI
atcacccactacgcatccaaatggctcccgggtctcaccaaggacggcccgcacggtggcgcgctggaggagccctgggctcaggcccaggcgtcccccggcggcgggctccacatgatcatcgccagcggcggcggcggcggcggcggcaaggacgacatcgccgggagcacgccggcgcgggagcagcgcatggtggtggagagcctgatcagcatcatcccgctgcagcgcgacagcgtctcgtgcggcttcctcctccgcctgctccgcctggccgtcatgctgaaggccgccccggcgctggtgacggagctggagaagcgcgtgggcatgcagctcgagcaggcggtgctggccgacctgctcatcccctcctacggccgcgccgagaccgcctacgacgtggacctcgtgcagcgcctcgtcgagcacttcctggtgcaggagcagacggagctgctggcgtcgtccagccccggccgcgtggagcagccgccgcttcccgagtactacggcgctaggacggcgggcgccgcggcagcgtcggcgtcggcggggctgaacgccaaggcgcgcgtcgcccggctgctggacagctacctctccgaggtgtcccgcgaccgcaacctgtccctgacgaagttccaggtgctggccgagtcgctcccggagtcggcgcgcacctgcgacgacggtctctaccgcgccgtcgactcgtacctcaaggcaagtcaagtcactgctgttgatttgattcctcggtcttccttcgttcttggcgatgagccgatgatggtggtctgctcatgctctggctggttcaggcgcacccgacgctgacggagcacgagcggaagcgtctgtgccgggtgatggactgccagaagctgtcgctggacgcgtgcatgcacgcggcgcagaacgagcggctgccgctgcgggtggtggtccaggtgctcttctcggagcaggtgaagatcagcaacgcgctggccagcggctcgtcctccaacgccgccgccgccgcgctgctggccaacaaggcggcggacggcgtggcgccgccgacgcgacggcagctgctggacggcacgccgcagtcgttccaggaagggtgggcggcggcgaagaaggacatcaacacgctgaagctggagctggagagcatgaaggccaagtacctggagctgcagcacgagatggacgcgctccagaagctggtggagcgtggcgcgccgtcgcccctggcggcggggctcaaggccaccggcggcggaggcgttggtagcaagaatcacagccaggggccctcggcgtggagcagcgggtggaagaagctgggcaggctggccaagatgaccggcggcgacgcggcggggcacgacgggcacgtgccgggagcgcccggagacgcgccgaggaagccgcggaggtggagaaactccatctcgtgagcagagcagagcagagcagagtagagacgacggagccccggtggcggtggaatcagcttgtttcgtagcgagcagagtaggcggcctagtaacttgtgtaacacccattttcatgcatgcagttccgagattgaaaaccaaagcagagtggccgagattgcgtgtgtgcaggctgcagactatcctaggagaagaagatcgtctcgtctatttccagttccagtgtgctgcc

SEQ ID NO: 4792 - DNA, 502 bp, Zea mays
  Clone ID: 700426869_FLI
gctcccccgcagcatggtccagctacaagatccaagatggtgtgaagaggctcccggtgcgtattgcctgttgttggacgacgtgtgcaatttgtaagatagagccaagattcgttagccgcctccttgcagaaggtttgtggaacccctaccctgatcatgtcattgaacttggaggctccccccaaataattaatcatacctaggttaaccaaaatgtaaatagacaccgcgtttcgggttgtcggtggtcagcattcctccttttgaagatgcttgtgatgatatgagaaatcaggtttggtaggggctgctgcctgggcaagtggggtttgtgcatatgggcccaggtagtatggttgcacatgtctgctcacagatgctgttgaatggaaggaatgttgtctagtcgcttgcattgtaaccattggagattgtccatttgtatgtatggatcttgtctgtacatctgtaatccgtgcgatgatgtgttttatggaac

SEQ ID NO: 4793 - DNA, 547 bp, Zea mays
  Clone ID: 700426948_FLI
ggcgtcgcggccacgtgcgctaaggtacctgtcgatacaatggggcatcgacctgtccaaggtgtccgtgctcgtgggcgacaagggcgacaccgaccgcgaacggctgctccctggcctgcacagaacgctggtcctgccggagctagtttgccacggcagcgaggaattgtgccgcgaccaagacgggtttctggcagaggacgttgtctccatggactccccgaatatcctcaccctcgccgagtaccaggcggcggtcgacatcctcaaggctatttgagagtccgggattatgatacatgatctgctccgacattccagctgttggttccacactctgctggggttattttggacggacagttaaaatttcacagcgaatgactgcaaactttatataaaaaagatacatgtttttgttttcggttacttttatttttttggaaggggcttatggtataagtgtacatgaatcttttggtgcacatagtatacatattaaattatatttcctctatttcaaaataatagtcgttttagtttt

SEQ ID NO: 4794 - DNA, 974 bp, Zea mays
  Clone ID: 700426995_FLI
gaacggtcaaaggcagactactattgcttacttaataagtagtagagattgttgaagagaggctctcccttactacttttcttggttcatccatggtataggatgtgactgtcagcctgggccctaacggcgagctccggtacccaccatacccgccggggaaccagggcgccgatggctacgccggcatcggcgagttacagtgctacgacaagtacatgctggcccggctgaagcggcacgccgagttgtcggggcagccactgtggggcctgtcaggcccacacgacgggccgcggtacgacgagtcgccggagacgtccgccttctttagggagccggggggctcgtggaagtcggcctacggcgagttcttcctgtcctggtacgccggggagctgctggcgcacggcgaccgcgtcctggccgcggcgtccagggcgttcggcggcaagcccgtcgagctgtccgccaaggtgccgctcatgcgcggaccgagccccgccgacgccaccgcggggctctacggcgggtacggcccggtcgcggagatgttcgcgcggcacaggtgcgcggtgatcgcgtccggcgtggaggcgcggccggacgccgcggcggaggggcgcctggcccgggtcaaggccgcctgcgcggagcacggcgcgcgcctcgcggcggagagcgctcctctctccgtggcgcgcggcggcgccagcgccggctcaccgggcgtcgtctggctgtccgccgggcgcactcggccgtgccagttcacgtaccagcggatgggcgcggagttcttctcgccggggcactggccgctgttcgtgcagttcgtgcgcgcgctggagtgccccgaggaggcccatgaggacgacctgccggtcagcgctggcggcggcgagcggctcaccgtaccgtcagcgtccgccccgacgagcgaagccacaaggacaagggaggtgcagaccgtg

SEQ ID NO: 4795 - DNA, 551 bp, Zea mays
  Clone ID: 700427029_FLI
ggcgaagatgcgaggagggggagaatataccttccgttggacgagcttgcgcaggcaggtctcacggaagaggacatattcagagggaaagtgaccggcaagtggaggaggttcatgaagggccagatccagcgtgccaggctcttctttgatgaggcggagaagggcgtcacccatctcgactctgctagcagatggccggtgctcgcgtctctgtggctgtacaggcagatccttgatgccattgaggcaaacgactacaacaacttcaccaagcgtgcgtacgtcggcaaggccaagaagctgctgtcgttaccgcttgcatatgcaagggctgcggttgcaccatgaaccatccgtagatcacatcttttttttcttttcttttccaaacccaccttgttttgccccacccttccttttttttttgtatataatcagcttcagctgcctgcatggcataagccttgcctgttcagggtgattccatgtccctaaatactcaatcagctcttgttacaaggaatggagaattagaattcaagaagcgt

SEQ ID NO: 4796 - DNA, 548 bp, Zea mays
  Clone ID: 700427079_FLI
ggcagtggcgcacacacaaacacacgggttcatcttctagctcccctagattgcagctatctcgctgctggtgtggtactggccaccagttcaccatgggcgactcctcgtcgtcatcggcagcctacatcagaatggttcaccatatgatagagaagtgcatctgcttcaacctgagcaaggaagagtgcatggacgcgctggagaagcatgccaacgtcaagcctgtcgtcacttccacggtgtggaaggagcttgagaaagagaacaaggacttcttcgagacgtacaacaaggaccgcgaggagcggaaggtggaggcggagacgatggcgcggatcgagaagatgctctccgaggcggcggcctccaagagctccgacgacgaaggctagctagctatagcccgcgatccgttagcttagctagctctagagagctatagatcatgcagctccgacgatcctctccctgcatgggagcacaagagctagccttctcgtgagtcgtgagaccattctatttaattagctggctatatatttact

SEQ ID NO: 4797 - DNA, 1141 bp, Zea mays
  Clone ID: 700427152_FLI
ccgaggaccctgagaacccgtacgggttcctgaggttcccgcagggctacaacccggagctggacagcctcgcctccaaggtccgcggcgacgtgcggcgcgcgtgctgcgtcgtgtcgggcggcgtgtacgaaaacgtgcttttcttccccgtcgtgcagatgctcaaggaccggtaccccggcgtgctggtggacgtggtggcgtcggccaggggcaagcaggtgtacgagatgtgcaagaacgtcaggtacgctaacgtctatgaccccgacgacgactggccggagcccgccgaatacacgcacatgctcggcgtcctaaagaataggtactatgatctgatcatctccacgaggctggcggggatcgggcacgcgctcttccttttcatgtcgtcggcgcgcgacaaggtcggctacgtttaccccaacgtcaacagcgtcggcgcgggcctcttcctcaacgagatgttcaaggcgccgactaacaacctcgccgacggcgggtaccacatgtataaagacatgctggagtggatcggccggccggcgaagaacgttccccagcagccgacacagccgctgcgggtgtccatctccaagaagctacgggcgtacgtggaggacaagtatagccgcgccggcgtggagaagggcaagtacgtcgtcatccacggcatcgcctctgactccgtcgccaacatgaagtccagaggcgacgacgactgccttcttcccctcgggcactgggctcagatagccaaggaaatcagctccggcgacagggggctcaagcctctgttcgtgatccctcatgagaagcacagagatgaaatcgaggaggaggtgggggacgacacaagcatcctgttcatcaccaccccaggccagctcacctgcctcatcaacgactctgccggcgtcgtcgcgaccaataccgctgccgtgcagctcgccaacgcccgcgacaagccatgtgtggcgttgttctcgtcggcagagaaggcaaggctgttcctgccatacgtggagggcaagagcagctgcaccgtcatatcttcggcgacggggaacctgatcgacatcgacctcaacgcggtgaagaatgtggtgaaggacttggagcccgctcccagctt

SEQ ID NO: 4798 - DNA, 719 bp, Zea mays
  Clone ID: 700427201_FLI
attcctcccatctcccaagacctcctcagacccgagaagcgcagctgcggccatggacgccaccggcactggagctggagggaaggcgaagaagggagcggccggtcgcaaggccggcgggccgaggaagaagtcggtgacgaggtccgtgaaggccgggctccagttccccgtcggccgcatcgggcgctacctcaagaagggccgctacgcgcagcgcgtcggcagcggtgcccccgtctacctcgcggccgtcctggagtacctcgccgctgaggtcctggagctcgccggcaacgctgccaaggacaacaagaagacgcgcatcgtcccgcgccacgtgctgctggcgatccgcaacgacgaggagctcgggaagctgctgaccggcgtgaccatcgcccacggcggcgtgttgcccaacatcaacccggtcctgctgcccaagaagacggcggagaaggcgtccagcggcgggagcaaggaggccaagtcgcccaagaaggccgccaagtcccccaagaaggcatagggtttggaggcggatccgatgttgtcatgtgtaggttgtaagcgggcaatgtgattggctgtgtatctgcttcgctcaagttgctttatgtcattcctaatggaataggaaatgccgtgtttcttacgtctgcttttggttctgcattctactgaaaaagcgtacgataattaacacattcaccttt

SEQ ID NO: 4799 - DNA, 1125 bp, Zea mays
  Clone ID: 700427219_FLI
cgcgctctctgcctcgtggcggcgacgacgccctcctccaggtggccaggccatcgtcggatcgtattcctcggccccttctccggtgatgagcacccagaataaaaggctcaaggatgtggaggtcagtttcccaatcgtctacggaaccatttccttctggctcggcaaaaaggccagcgagtataactctcacaagtggactgtatatgtccgctccgcaaacaatgaggatctgagtgtcatagtcaagcgcgcggtgtttcagcttcacccgagtttccagaacccgacgagagtcgtggagcagccgcctttcgagctgtccgagtcggggtggggagagtttgagatagccataaccctttatttccacagcgatgtctgtgacaagcgcttggatctgttccatcagcttaagctgtatccagaagaggaagctggacctcaatcgaccaaaaagcctgttgtcgtggaaacgtatgatgagattgtcttccccgagcctacagaggcctttttcctacgcgtgcaaaatcatccagcagctaacgtgcccaggcttcctcctggtataaccttgcctcctccaggtatgtgtatgttccttaacttacaacctgcacgccttgtatttcaaaataggaaatgacaaagtagcactgtgtgacttctcgatcatctaggccctatggaaattgttccgtatgaaaagaagcgcggtgacactaaggatcatcctttgagtcagtggttctcgaatttctctgaggctgacgagcttttgaaactagctgcagctcggcaacaggttcaggttcacatagccaagctgagaaggcagttaaccatgatagaaggaatgccccagcaatcgaaagccttttctgtccctggacagcagtttaggcacatctaatgtagtgcacctggtttgtaaggaagatgttggaatggaacctttcagcaactgcttgacagattgggttctgtgtattcgcattgaagtcgctgccttgggcttgcaaatgacctgtatattctatgaagtgtagtaccgttaggctcataagagaacactactagcatgacctgttctttttaactttttcttatatctccatt

SEQ ID NO: 4800 - DNA, 521 bp, Zea mays
  Clone ID: 700427257_FLI
cagccagaggagacgtcgcgcctgtgcctaccatggacgagaaggagttctggcgcatgctcgacctcttccccgtcgtccgctcccgtggctattgcgctgatcctggaacatctatcagaggaaccagacagcgctcacgagttcaggaggcagcgaagggcaatgacaaggactcatccgacgcacaagatttgtttatgcagaagttgaagatggctgcagagaaaaagattggaacaacaaaagcagagttcttctgcaaggcatttgaagaaactcatgagaagcttgtttacaaagagctgaatttggatgctgctaagaagtttctgagcgcatatgagagctgatgatgaacagtaggtagatgctgctcaaggatcggcaggtgccaatgatcctagaaagttgttgatgctgtcgagattttgatcattgacaaacttgtgttgtgtgcagacagtagacatccctttttggtcagctacacttcttttttcagagaagcttttgaagtt

SEQ ID NO: 4801 - DNA, 702 bp, Zea mays
  Clone ID: 700427304_FLI
tgggggcaatgatctccaacctggcattcgtcgtccggaccatcttctccaagaaggggatgaagggcaagtccgtgagcgggatgaactactacgcctgcctctccatcatgtcgctggtgatcctcctgcccttcgccgtcgccatggaggggcccaaggtgtgggcagcgggctggcagacagcagtcgccgagatcggtcccaacttcgtctggtgggtggcggcgcagagcgtgttctaccacctgtacaaccaggtgtcctacatgtccctggacgagatctcgccgctcaccttctccatcggcaacaccatgaagcggatctccgtcatcgtcgcgtccatcatcatcttccagacgcccgtccagcccatcaacgcgctcggggccgccatcgccatcctcggaaccttcatctactcccaggccaagcagtagccgcccttggcgcgcgcgtctggctctcaggcctcagttcagttcaccgccgaatcagctcggcgctcgaagatataacagattatataacttttgaggatatctacctagcttgtataatagtattattactagatcctctcttctttttttccgtattttctttttcctaggactagcttattactagatcatttcgtcgtcgtgttttcactatgactatgatggcgtagagagagagagatggatccatctaaat

SEQ ID NO: 4802 - DNA, 983 bp, Zea mays
  Clone ID: 700427308_FLI
cccgtcttcttcctcgaccgctaaccttaccggtccccaaatgtcgcctctcgtgctgctgctcctcgcgcacctactcgccacggccactgcagcgggagcagcgccgaccagggacgacgggcctcctgctccgtcgtcgtcgtccccgcgggtgccggcgacgacgccgccgtggccggaccagttccacgcggtggtggtcacgaacctgagcgcgcgcggcggcgggctgcagctgatcgacctgtactacgactggccgcgagggcgcgacctgaacatcgtccgcgaccagctgtccggcgagcggcgctggagctggaacgtggagtggagcaacggcaccgccttcctgttcgactccgcgtcctgccgcacattccagttcgccgtgggcctcctgccgcccgactggaaggcccgcggcgccgcttacctggggcgcgaccgcgtcgacggcttcgactgccacgtctggtacaacttcgtcttcgcccgctactacgaggacgtcgccaccggacgccccgtcagctggaacttcaatgggctgcagcggcatgtgctgagcttcgaggcgggggcagtgctgctggactcctccaagtggcaggcgccggcttactgcttcaccaacaccaatggcagcagtgccaacgccgccgcttcgtcttcctgagatcacgtcgctgggcctccggagtccggtgtccgggctccacctgcagctggacgctgcatgtcatttggcagtcggctctcatcttgatggttgactcaggagaggcttttactattagtcagtactgattctcgcgtcgcgtgggctagaatcttaagacataattattactagttactaatctctgtaccaaaaagatgtaactacaggttacattacatctttaaaaaaatatgagaagcctcaacactaggcaaaacacccttagtctttgttgaggtactatagtattgatccc

SEQ ID NO: 4803 - DNA, 765 bp, Zea mays
  Clone ID: 700427336_FLI
gttgatgagcttggcgagaggccggagttggagttgcgtccacaggactgcacggctgtcatgaaggtctgcataaggctccgacggtacgcagccgtggagagccttttcagctggttcaggggggccattgggagccccaccgtggtgatgtacacgacggtgatccacagccggtgccgtgacgggaggcaccgagaggcactgtccctggtgtgggaaatggagcaggcaggctgcctgcttgatctgccggcctaccgagttatcgtcaagctatgcgtggcattgcacgatccggggagggctctccgctatctgtcaaggatgaaggaggctggttttattccaactggcgacatgtacgacagtctgatcgagggctatttggcagatgggaggctggccaagtgccgacagctgatcagagatgccgagtcagccggtgtgaagctggataggaggctgctttcgcggttgtctgaaactggaggcagacatccttagttgactctggtgagtgttgttgacatgtgttatgcacgggtagaatccggacaggacaggaacaccacagaggaaaattatctctagcatttattgtagagtaatacaaagagtaatcttggcagaagattagtacgttgttgcccagtttccctttgtatttgtcagtaatccatgatttcatgacaacgatgaattgctggctgaaatcggctccacctttaagccaaaatcctgaaactgctaacgcatgcttgc

SEQ ID NO: 4804 - DNA, 2209 bp, Zea mays
  Clone ID: 700427360_FLI
ggcgtactggtgcaccgaagaagagattcgacaagttgctggcttggactctgttgtgttccttcgcctcttcattttcagcatccgtatcttctcaattacttctcttgtttgtgtatttgttgtgcttcctgttaattatcatgggaaagagatgaatcacaatcatattccggaagagtcactgaatgtttttactatagccaatatcgtcgaagaatctcgaaagctttgggtgcactgctctgctttatatgtcataacaatctcagcctgcattcttcttttccacgaatacaagtatatttcgaggaagagactagcacatgttactggatatcctccaaatcctggcctttttaccgtgcttgtccgttcgattccgaggtttgacaatgagctgcttgatgacacaatcagaaatttctttgttaactatcacggatcaagttatctgtcgcatcaaatgatctttcgcaagggacattttcagaagtttgtggatagagcagagagggcttacaggagatttgtaagggtaagactctccgtatctgagcggaatgggagatctagcatgtccaggtgtggtgtctgtggtgtaagagcttcctcatttcagctttaccgcaacaagttcatcgaggccaagaagtcagacctcactaatccggaagtagtggaagctcaaaagaactgtcccggtgccttagtgttcttcaagactcgctacgcagccgtcgtcgcctcacgggtattccagtcatcaaaccctatgctatgggtgacagatctggctcctgagccacgcgatgtgtattggtcaaacctctggatcccctacagacagatctggctccggaagctagcgacactcgcagctagtatcgttttcatgttcgtgttcatcgtccccgtcgcgtttgtccagagcatgatgcagctggagcagctcaaaaggatgttcccgagcttgacaggtctcctaaataagtccttcttcgccagagtgataacgggataccttcctagcgtcaccttgctgttgtccctgtacaccgttccaccgctgatgatgctcttctcctctatagaagggtccatctctcgcagagggaggaagaggagcgggtgcttgaaaatcctcttcttcaacatctggaacgtcttctttgtgaacgtcctgtcgggatccgtgctcaaccagctcaacgtcttctccagacccaaggacatgccgacgatgctagctgaactagtgccgaagcaggcaacctttttcatcacgtacgtgctcacctcaggctgggcgagcctgtgctcggagatactgcaggtgttcaacttggtctacaacttcttcagcaggttcgtctgctgctgccatcgccagaataaggaatacgtttactctttcccgtaccacaccgaagtgcccaaagtcctcctgttcaacctgctcggcttcacgttctcgatcatggcgcccctcatactcccctttctgctcgtgtacttctgcctcggctacttggtgtatcggaaccagattctgaacgtgtactacccaaagtacgaaatggggggcaagctgtggccggtcatgcacaacgccatcgtgttctcgctggtcctgacgcaggtgatcgcgctcggcgtcttcaccatcaagcgctcccccgtgacggcgggcttcaccatcctgctgctcgtcggcacggtcctcttcaacgagtactgccggcaccgcttctcccgcatcttcgaggcctactccgcccaggacgtgatcgagctggacagggacgacgagcagtccgggaggatgcaggagatccaccagcatctgctggacgcctacagccagaccccgccgggggagggatcctccaggggcggcagccaggtgcccatagagctcatcatggaggaccccgcgcaggaggcgtcggagtccagccaggagctctgcgacaccgtgcaggaggtggtgtccggggccatccacgaccacgaccacgtcgtcgaggacaaggcgcattccgtgtagactagatggtctggactctcttcgggtgcgtacgcatgtagatgctgtacagcgcgcatagcagactcgaaacccgaaagcaaatacttacatttataaatctacgtgtataaaaacaacagtctaatctaatggcaatcgggtactttggcccggctc

SEQ ID NO: 4805 - DNA, 686 bp, Zea mays
  Clone ID: 700427386_FLI
gctcttccctcaggtgattgattcagcttccagccagcctacaacgatgcgtgtgttgttgcactgcacccgtggtagccaattattcagtacgcgcggcgtgctgctgagtccgtgaacacggtggtaccctgcatgcaggactcggcgagggagacggtgccgtggggcccgagcatcgcctgcagcacgcccgcggccatcgagtgggtggagcagtggaaggcctccaacgacccctccggccgcttcatctcctcccacgactccgccgccaccgaccgcaccggagacaagctggcggtggtcaacggcgacgggcacggcgcggcgaacggcacggtcaacggcaacgacgtcgctgtcgccatcgcggtgtaacagtaatgaactggaggatagggacgaacgaacgactggtaggtgtggcgtacctgccgcgtgcccaccggccggccatatatatcgaatcccggcccggcgcggcagcacgtgctattgttacgtgtcaccagcgtacgtgtctgtgtagtgcctcgatcgtatctgtacgtctttaggaaaaggtgtgtccgtgtgtattgtatgtgtgtgagcaagcgtgcgtgacgcgctctgcctgtgtgacaaagcagagcagtacaagctcaggcattttctgtccgagcgatgatttgaactggatc

SEQ ID NO: 4806 - DNA, 276 bp, Zea mays
  Clone ID: 700427394_FLI
ggtccgaggcgcggggcacgaggtccccctccaccgtccgccgcagggcctcaagctgttcgagcacttcctgcggggcgagcccatgcccaagcctgtcgagagcgtccagtcgttctagatgagcttgctgccgcgcttggctagttggctttgatgaatagtaaggccggacatgtggcaagccatctccactccacatttcttcaccacgttttcaataactggcgctggccgaaataataagagcagaacgaataaaatgccgctcgctag

SEQ ID NO: 4807 - DNA, 404 bp, Zea mays
  Clone ID: 700427416_FLI
gaggcaacatgtcaggcgattaggcatgtgtgctatatggggctgagtgttggcctactaagagacgacatatccaacaactaagtgcttaccctaacttgcttgggactaaaagactatgttgatattgatgttgtgatggtgtggaggcaacacaacaagagtggacccaacatatgactttagtgatgtttgtttagtggccagaagactgtgcaggtctatattccttgttgataagttcccttctgtgaagcagactgatctatcatgcctaaccactcgccttctccatcgcagcttgttatatttctgcttgctttagtgtctgtaccttggatgttgattccaaaacctcttcttttgaagaaacaaaatcagcatagtactcgtatatttttatt

SEQ ID NO: 4808 - DNA, 862 bp, Zea mays
  Clone ID: 700427445_FLI
gtaccatgtcgtgtcggggctcttcgcagccccgcccccgccgccgccgcgcccgcgggaggagcccgaggcggagccgctcccgccccccgtgcagatgggggaggtctcagaggaggagctcagccagtacgacggctccgaccctaagaagccgctcctcatggccatcaagggccagatctacgacgtcacccagagcagaatgttctatggacctggtggaccatacgccctattcgccggcaaagacgccagcagagccctagcgaagatgtccttcgagccacaggatctgaccggcgacatcactggcctaggcccgtttgagctcgatgccctgcaggactgggaatacaagttcatgagcaagtacgtgaaggtgggtactgtcacgaagaacgtcaccgttgaagaccgcagcagcgccgcaagcacagcccctggaaccagtgaggccgccaccgaggccgagaaggcgccgactacgacgacgaccgaagagaagccgagggaagtgccagcggaggctgtgaaggagaaggaagccgccgctgccgccgccgcggctggtgaaggtgcccaggaaaactagagcatttttcagtatgcagcaataattcgacatggtcccattcggttcgtgtcggggccctctcgtatatcgtatcagcagcgtggcctgtgtaattggatatacgtcatctgtacgagcgccatggcccttgaggagctggtgctttgtgttgttattagtcgtccgttgcagattttaaagacatcgggttcaggttgggcgcccctggccctgtttggtcggaaaacaggcgctctttcaaaatgagttatttctttgtaccgt

SEQ ID NO: 4809 - DNA, 622 bp, Zea mays
  Clone ID: 700427482_FLI
cgggaacgagaagggcttctcccagtggcagcgcctcgcgatcggccaagccctgtccattctgacaatggcgcttgctgcgctggtggagacaaggaggctggcgatcgcggaagccagcgggctgaggcatcgggaggtgccggtgcccatgagcatcctgtggcagggcccagttttctttgtgcatggtgcggccgaggtcttcggtgccatcggcatgacagagttcttctacgaccaagccccggcgaccatgaagagcctgtgcgccgcgttcgggcagctcgcggtggcttccgggtcgtacctcaacacggtcgtgctcagcgtcgttgcgttggccacaacgcgcggcggcgcaaccggatggatttcggacaacctcaatgaaggccatcttgactatttcttctggatgatggccgctcttagcttgctgaacctagctctgtttgtgcgctactcaatgcggcatacagacaggcaacgtaagcaagaccttggtttatcataatttcaggaaaaatatgtgaacaaagcagactagaagctatatggacagactactcatgaatagtaacattgtatgaaacagctaaatgcatgtaacaacttattc
